United States Patent Application Publication US 2014/0057251 A1 - sequence listing, part 10

SEQ ID NO: 15184 - DNA, 7535 bp, Cannabis sativa
ggtgggttggcgggttggcgggttcaacccgaaacccggtactcctaaaaactcaacctgcgaacccgccagaagggtaccaggttgaacccaacccaacccgcccgaacatttcttttaaaaaaaaattgcgtgttcaccggttcgggttcaggtcaaacccgctagaaatgttcagctctagtatcactcgtcaaatttatatattctttgtttcagaatatataagtggaacaagtaagtgattttatgacaatggagaaacgcatggatcaagaattcaataaactgaagaatgaattgaagagacacatggatcaaaaattgaaggaagtgaagaatgaactaaagaagacacatggatcaagaaatttcttctttaaaatttgaacagcatggacttaatatgtaatgccctgattgcggggtgtcacatgtgtgcttttattaattagttataataataaactaacgatttaagaaaagtgtagtttaattaaaacttttaggaaaattatttaaaccataacttaaactttgttacaaaatatcactggatttggggatccccatagttacaaacttttgatttatattacaaaatattatcacatatttaaaacataacaaaagaaagatcctgtccactgagaatcaaaacatggtcggctaatatgtacattgctgggagacttctgactcatggctggtccaatttcctctttcccttacgtgcaccacagagcacctgtgaatcacatagacttagcaagaaaagtaggtaaaacacaagcatcacatgaagcataacattttaacaatgcacatcatacatcatcacataaagcacttattcaaagcgtaatcaaatgacaataatccattaactgccttataagactaacagaatttgatactttataaagtatctttaactctcgttaccaacgagtttcttatgtcactaccgttgtttaattaaacaaccgataagtaagaaacttaacaacaatttcaaaagagagtaataactctttcttaacaatggtaattaccgtatcttatttcgacatgctaagcagtgtgtggtattcttccttaaacccccaaccaacattcggttagttagtttcctttaactaatgtatacaaaattgcatcgaacattcttccaccttatatatatcatttcaaaagggtcaaatattaagccaagattagatagtattaaacagcttacaaatacttgtcctgaaacaacagcggtacaggaagagggaaagaacaatccctctttcctggtaaagtacttgtaattacatccttttaaaggaatgaaaaatacatgaaaactaaaaattaatgccataaaaactatagaaaagacaagtacagtttcataaatctcttccaatgtacatctccaactttgctgacaaatctaagagagatcaagagcaatagcctaagttacacatttctcatgattcataaattgagttagtttaaaatgttgtcattgtaaactagaccctagtacaacaaagtgtccaaatgccagagaaattaaggtattgacgaccataatatctttggtcaatcccccgtcccacttgtaaatgattaacatgtgtttcctcttttaagagcatgaactctctttcctagtgcctcctccaattaagctacccattatctaactttcaagtgcaccaagcgccttcatgtcctccaggaaagccatatatgagtcatcaatgctctgtggctttggagctgatgatgaatttgttgcatctgtctttgcaaagggtgctgctggtttcgaggctaccactgtggccgatagtgattgtttaggttttgttttgggggcagtcatctctcttcttactcgaacagatgcaggaacctgaattgcaatccagaaaactactttagtcaagggagacggactgtcttgtcaaagttcagaatgaaatgtacaattatagcacagcatgtatacaattgaaaagctgataaaataaagcttaaactgatttttcatccttttttacaacactatcaccaacaattcaccatcattttggtcacagacgcaaacaattgcatattatactccttttataaccccaaaagataccatgtaatgtaaacaagcaaaagacataaacggtcgctatcaattgtttttcacaacactaacaatttttgtagtgtttcacagcaccatcaccaacaattcgccatcattttggtcacacacacaaacaaatgcatattatactccttttatgaccacaaaagataccatttaatgtaaacaagcaaaagacataactggaatatgcatccagtagcagagcaaacaactcaccatcgatgtaagttctggtgtgtgctgagctagcggtctcttaacaacggtaggtgctgcagacttaatatatgatggcttctggggtacagtaggcctgttaaaaacatgatcatcatcctgaaaagagggaggaggaccaggtggaaggggcggcctcatcatgggaggaccagggggaggaccaccgtatggtggcctgctgataagaggggccatcattcctgggggagtgggccggtttgtaagtccaggggcagccattggtggccgcatatctgggggaggtggtggaggtggaaaacgcgatattccagggggtaatacatcaggcgacaaagttgagatcatggcaggtccaggcacagcagaatgttgcctaggtggaggtgggggtggaatttttaaaagatcctttgccagtgaaggattattgttttcagcatcagatactgaaccttcagaaagattacttgcaggcttgggaggcatcctaggcagagggggaggtggaggaagtacattatgcccctagaggaaagaacgccacaaagagaggtgtcaatttcatagtttcttcatattctttaaacacggataatcacaaatcacaataggttgaatagagaaaagccttacctgcataacctcctgggcagtaggttcatcggacagaggctgatttctctccctttcatttccagcagtaccaggaggaggaggctgtgtggactgttgaagaggtggaggaggaggaagtggagggcgacttgcaatttgttctctaggtggggggcccggaggtgggggtgggggtggaaaaggtagtggaggtaatgacatgtttgttcctgcaggcaatggcggcaatgggggtggaggaggtaatggcaaagactcaggcaaaacagagccatcaccagatccattgttagcagcatctggaagaggaggaggtggaggaggtgcaggcaaagcaccctcatctaagtctgtttgtgacgatgatgcagcaccactggttgaagcatcagataaaggaattctaggtcctgtatttcacattacatagaaaatgagggagagagaaacaaaccaacatcatccgccaagcaagacaaataaaataactaaacatacctattgatgatttatacattggaggttttccagggggaggggccccagttggattaagggttgcgtggtagtatacagaatcctgcagcaaaagaagacagagctcataagtggaaaaagtaaagggtttttattaaataacctctaaaacattattccatatcttacttcaggcaaaggattcttgactctatcctcctcctctgcagttgttcgtctccgaggaggtcccaaatgactaagaaaaaaagaagctatagtcagaaactcaaactaaacagaaaatatagaaaaactattcaacagcagcacaatgaaccaggaagaaagaattttacgcacctgaacatcactggggcctcacccttctccttcattttctcttcatattcctatcccaaagagcaaataaaacttatgaatttataatcacatagaaaaaataaaccctataagctccaggagaaatttgttaaagcttttgtattgttatgtataatcacgatccagacttttatatacatatatatatatatataatttacaaataaaacataaaataaatcaacatccaggattatatacatactaaataaaagacacgtgttactatgctttgaaaggctagaaaggaagaccacttctcacagtatgtaaaacgtgatgaaaccaagaactacaactgcaatccaccaatagaacacctgaacaacaatctagaaaacactcttcagtgcagaagttaaattgagatgttctttgagtttcactgctatctgaaaaacaatgcatttgttttctatcccttttctttcagtgttatgaaggagaatagtggataagattacatgaaaaatagtacaggagcagaaatttttttaaaaaaaagagtaaaagccatatatatacgccattaccttcctcttctttagaacaaggtttagtgtgtcctctagttgtctcttcttgtgtttccttgccttgtccaaagcaccatcggcctctacagcaattaatacgaaattacatgaacaatagaagccaaaagagtggtaaaaaagtgaactgtcaaaaataaaggcaaaggctaactgacttctttttttaaaaaagaaaaatgtaagtaaatacaacaaattacttctagcaatttagtgttcataaacagggtaagaaggtttcatgggttcctgcagtgttggcattactttgggagctatggctaagaaaataaaaagaggaaagaaagagattaattgaagaagtgagtaataacgttgacagagagcatatgggaaaagattatgcaatacattttcatttttctaaatattccaaacagaagaaaatgaattctttggaaaacattttttttcctccctaaaacctgagttttaaacaaaaggctaaacgactgattttcaatatagttcacttataacaggaaaataaagatgaagtggatataagaaatatactgagaccatgacttactcatcatattcaacttgtcaatctgctcctttagtgattcagggtccttcttcaaaattcccacctccctcaccttcttcctttctttcttattctgttagtcacagataaaacaacttagcagcatcagcatatggatcaaatttcaaaccaaacaatgaactcattgtaatacaaatagaattgtaagtgagaaaattagtataaggcaagtagattaagagcatattctgcatgaacaaagcaatagctctgtgtgggtcagtgagtgagtgaaatgggttcgattggtacgccgtattagatgtattgcattctatagtataatataaaattgtttatcatatttttatataatactaccttaaatttttttatatcaaaatattgtatatatagaagtcaataccaaacattatactatataaaaaaataacatataacacaattcaatatactgccatacaatacaatacgatttaatacggtgaaccaaatggaccctaaatgtaataattattataatctactacacccttaaaatgaaaccattaacaagaaaatgtgagcccaaagtacttaaaatgccaaaacgcggctcaatgctgccagcctgccaattaataactacctttaacatgatcaatttaaattcaaacattctcacttcttatttaacagctgaagggaaaaatgagaggaacattggggaaaagatgatacaattacagatattaatgcagtgttgtttgcctttttgttcacaagtgatagactgatacgaataataatgataatctttttcaactttttcagcctatttgtctgtattgaatcaagcagcatgataacagctttaaaaactaaaccatcaacaagtaacactgccaacatagtgggcaattctttaaccatgaaaattttaagttggaaaaattagtgagcaaaaaaattgcaaaacttcaattttaaaaggaaagaaagaaatgaagaaacaactagcaaaataacaaatgctttcaaattttagtgagacctcgaagaaaaataagaaggtaaaaaaaatgaggatgagttaattatttgtaggcaataagtttttcaaaaatatacatacgtgcaaatttcaatttgggtatcattagatacacatacgaaaagggacttcgttaagttaagctataataagttctcaatgctgtatcataccattctattatatgtgcatcaatttggtagttggatacatacatgagaaaagtataatcctatctttctcttatcaacttattttaaaataaaatatgctcttcagaagttttccagtaaacaaatcgaaaagggagtgaatatctcatcagtagaccaaatcgcgattaatttaaggcagggattcaaatagagaaaaaattgacagtaattgagaataaaattccactatcaaatgagaataataataataataataataagtaggagttgaaagaataccctttttaattcctttttgcgaagctccttccgataagcatccgtaggattcatgaccttacctcccttcgttgttttcatgtttacctctctcgctttagcagccctagtaatactaattggagccttcttcttcttcttcttcttcttcttcttcttcaataatcgcaggaagaatttgttgaagaaaagttttcctttccttcgaataatcgaaaccccaatcggatttataatatggctttatttgacccaatgtttctaacccaacataatttatggtggacaccgcaatattttttattttattttgttctttaaaatcaatttagtatatttatatatattttttaaaaaattatttcatatactattttttttaatttttttttttttataaagtggttacaacgctcgctagttgtaataaggatttttatacaattttttgttgcaatttaagttgcagtgttatttgtaatagggatttctatgtagaatttagtaaaaatgcataaaaaaactgttttaaagtgtaaaaaatgaaaaatctttttctttaagaagaaaatcattttaaaattacttaaacctaaactaaattaattttaaaaaattaaacaatatttttcaaaatattctttttacaacctcaattaattttaataaaaatttatctaattatcataatttttttaaataatgtattttttttacttaaataaaatttagtatatatttctcttttaattttctttatcttaatatttttagaatgtggccacaaaatatagcactcatatattaaatgtggttgtttaacggaaatcgttggtttaatagttttttttctacttttttcgttaaagttaacagttaaaactaacactattaaatcaattaattaattattttttttaaaaagataattttaaatatttaaatttaatttaaaagtatcgaaaaatttagataattattattttatataaatttaaatttaaattagatgttaattcaattaattaat

SEQ ID NO: 15185 - DNA, 2431 bp, Cannabis sativa
ccatagttcatattccactcgatcgtctgggtgtggaacagcttctctccaatcaagattcacgttgaccatgtccccagaatggattgatttctttaatacttccccaaagtttttatcaatgagtgctgatgggatggtgatgttctcaatgtacttggcagatgaaccgtcttcttcaggagaatccattgtaattagaggttcctccttgtcatcagctaccagaactgcagaagctcctgccttctgggcattccacaccttcaaagcaaagaaacaatctgaaaagaaaaataaagagtggtgagaacagtttctatgtaagcagtgtccaataactatccaatcatccagtccccagatcatgaaggtaaaaaaaattaataaaatcttcctttcttttacagcaaaccattatgcataaaaatgtaactctgagatctaatcaaccataatctcgtgcattgaaagatctatttaaaagaaaaggcttagcttagccagctattcgtgttcaaaagatcatccaaatgtatgtagagtaaagcatgtaaacaacaggaaaatgattttccttttagccaatagctacacaatctataagtgacgaacttcaatttttgtatttcatgactgaactgaaaatccacaaacttgaccaaagttaaaggaaagttattgacaaataaaagacaaatgaccaacagaaacctcaacctaaaataaaaataaaaaggcatgacaaacacagaaacaagcaaatcaaaacaatgaaaaccaaataaaaaggtttggattggaattagccaatccagataatgaaaatgcaatctaccaaaggtacaaataatagctgtagataaaacccaagttaatcaattagtagtttgaataaggttccaaaattaactgcttgaaaagccattaatttccatttaaaaaatgataagagggagagaaagaggaagagcagtagaaacatcacagcataaaatggataaacgaaatttgattaccaaaagtataatacaataacaaacttaaatcccaataaaaaaacatggtaataattagttaaaaaaaatgaaagtaccattaacatgatctataagggatcatctttactcaatccgaaaagataaaaatattttaaaaaataaaagcatttcagtgaagaaagtgacagaaaagaaatcaatgtaactaaagtaacacaaagaacttaaagaaaactgcaagtataattcaaagagtatatttcactactaaggagcaccgatcttctatcaaagccaaaacaaatacaacctaactgtaaacatttcgaatttcaagtttacagaaatagttttatgaaacaataagcgtacggataacatcaaatatgggataaagcataactatcgggtccaattaaaatgaagaaactaaatccaatatttgatcaaaactagaagaaggggtgtcgatacaaaaactggaatcgacttaagaacctcacaaaatcaattggaaacctaagcgaacatattttcttgattgacaaaaattaacaaaagaatatatcatcagtaataaatagaccaaaccatgcaatagcaatcaaattaacaaaaatatgagaagattacctccacgatccagcaaaacgaaggtgggaagagctccgggcttggattggaacgaaatcccaacgtcggaaaactccttgcagcccttttgattatcttttgggtacaaaacatttccagccatgctgccaccatattgaggtatcccaaagtttccaatggcagtgtcatgggttcccctgattcggtcgggtgatgttaccctcaagctgttcttctccaccacgaatcttccatgaattgagaagaaaaggtgcgaaagacagtagcagaaaccctaagaagagcctcatcatcgctgatctctgaaactccgttcacggagattgatttgaaggagaaaatacaatatgagtcgatttgagtgtttaaattaacaaaatggctaacattgaattcacactgtgcgatcaatcatatcataatcgtcgcttttattgtcgagtgtaatttttatgaaaattctgaaagtgactatttttatctaaaaaaaaaacgtttaggaaacaaaccgggttttaagtgtgctattatgtttagtaataattaattaattttaataattttattagttaagaattaaatttgtaggatttaaaattttatgaaatctataaagatcattcataataatatgaaacctaacatcattgatacataaaaattaaaaaaaattaagttatattaactccagatacacaattaattaccattttttaacttgtgttgtaattaacaaaatgataaattggatcataaacttttaaaatagtataaaatagagtaaatattatttt

SEQ ID NO: 15186 - DNA, 8882 bp, Cannabis sativa
gttttatttagggcataaaacccaacaaacttaaacttagaccattaaacaaatgttatttaggatttttgtcccctgaactacgagttatgcatgattgtgtctcgtgaattttttagctcgttaaaaatagttcccaaactattcatagtatcgtaaagtgatcattttgtcaagttttgtcacatgtgacaaatagaatgatgacgtggcaatttactaatttaaactattgtcatattaacaccacatgtataattaatttgaaaaaaaaaataattatttttttaatttagttttacttaatattttaaaaatcattaatcaattttttagttaataatttttaaaaaatacatatttttattttttattaattttaaattacacgcattattatgtttgctacgtgtgacaaatcttgacagaatgaccactttacaccattataaatagttcatggactatttttaacgggttgaaaaatttagggacacaatcatgcaaaggtcataattttgaggggcaaaaatcctaaatagccaataattataaaacacctcttatttttgtttctaaaataaaaaataaataaagtagatatagaacacaattttgtactttgttttaaatagtagtaatagaatacatttttattttcaaaaataaaattatgattgaaaaattaaaaaataaaaatattacaaataccacctaaatcactattctaaaataactgtcccaatttaaatattttgaaagtcataacctttagacttttgagtatgttgtataactgagttttagaaaatcaaacaagggaaccttaaaaatgatatataattatcaataaaacattatgtacaaaatcaaataactatgtattatcctaattttaaaggttaaaaacagaggtactcattaatagaagaggtattaggaaaaggcaaaataacagagaattaccatgagagattacattctgtattagcagcctataaaaaataaatagccactgaaatttgagaatggcactcaaatttgatgatttagctgacaaaaaaagcaatttcagtgcaagatttcatcttgtaacaaatctaatactacatagaaaaaaacatagaaataagcttcaaaacttcagccatttcttctctttttccttgctcgtaactgcattcgatgcagatgcatgagctgcctgtgtgtctgctaatgttttccgagtctcattcaattttctcatagctgcctcataaaccgccttttcttttctgttcctgtttgccatttcttcaagcttctcgattttcattctcaactccttaacttcatcatcatatgcaaccaaagctctccgatccacctttttcccctctgcagcagaatctctattttgctgctttttcgctgaaccattcaaagcttccccatgtttcgagagttggtgattgataagagtaaagacgtcgggaaccatttcctctttctcttttgcagctcgttttaatgctgcaaacttcttatctcgtttcctcttaccacctctgctccgcttctttactttctcgctcttttcttcttcacgagactcaacagcatggtcgagagattgtttagcaggaagagctctgacatttataggatccacgattccctggcccgaaacacctaatcccattccttcccgataacccatattagccatcatcttagaagctatacctctagtgtggttctcccacttggcaaagatgacagtttctttctggatgccacttttcgaggtgctgctgtctaaaaaccctatgccccgtggactatcttcgtcgtagtcactagaatcagattcttctgagcttaactcactttcttcttcattgctcatgtcagcatactccgatagtgttatagcttcatcccctaggtttgcagagcttccatcatctcggaaaactactttccctaccctaagttcatcgtcccacgactcaagctcccctcctctccaaagaccaccgctaccatcagagactgcccaaacactcgatcccacagctgactgttcccatattgttgggatatactttttcagcgaggataatggaacatcgattcctgtacattacatagactcaaagtcaatacccagttgcttaaaagaatccaaaaccaaaataacagaacatcgatggtgaactacttgtctgttattgcacattgcattaatgaaaacagtaaaagaaccgaagataattggcaaagatgtcacggcgaaacactacacaaaacagaaaaaacgaaatagaataaagagaatgtgaggggtaatagaccacagcttgtgcctaaatggaggagtacatttgaaaatggttctcaaactgccatttgcgtttatggcaacaaaaaggtagaagaacgaaataaaatgcttgctctctgggagaagcaaacattatcagtacatttcctgaacgctgagccagaaccagaatcatcatttgaatcaaacattgcttaattcatttaaaagtcatgctatttcttaaactggacaaccattgctagcaatattccatacccgaacaaaggactctaaacactagtgagctataattacaggttacaaatagattttgctgcagcataccatgtgataagcggcagttgttaccaaaccgacatctttgctgcagaaagaagttgcacatctgcagtttgtttgtggtctaatgttagtttgtggcttgacaaacaccataaattcaacttgacaacttacaacatgaacaaattgaattttcaacaaactgtcaaccaactgaaactaattcgcattaaattcttctacacttaaacgtgttatgctaatcatctataaagaccatattataccaatatgtacaaaatgagagtcaaatcgttgatatcacatgtagctacctatgtttctcataaatccataaattagattttccaaatgagatcactacaagccaatagatattaaaacgaggagagaatttgcggtttaccagcatactttccgaagtgggattgaggaaagaaacctttgctgaagaactagaaccatctaagtcaacaattagaccattataccatcttccattcgtgtaccgaaatctacattttgatccaattttgtagcattggtcatcctccaaaggttcaggttgaacctctgttggatcaagaggctcaaccttggcctcattatcagtaggacatgaagttagaagcactgaatcaacttctctaagtaaccttgcacgttttaaatgtagaagactctcctcagcatctttaattgcctgaacaacctcctcacaaacctgtgaaattacaaaaccattcctatcaagtttaagcttaaatttataaaaactataacataacacaaattagaaaagaccataagtagtgaaagagatcaccccaaaataaattatataaataaaatcaaaggtatgatttttcaccaactaaatatgtctacatatcataacttgcaaaaggatagtttttcaataatcaaaagtacccaaattctgagacattttgagtttaagctaaaatttgatacactttacaccataaaccagaattaatatgattttatttataccaaattaaaaaagaccagaattagtgaaagagatcaccccaaaataagtaaataaataaaatcaaaggtatgatttttcaccaactatatatgtctacagatcataacttgcaaagggtagtttttcaataatcaaaagtacccaagttctgagacattttgagtttaagctcaaatttcaacccaaaactatagataaacaaaatcaaaggtatgacctttcaccaactaaatatatcaatctatcatattatttctatagattaaccccaattttcgaattcttgtcctgattagaaaattgaaaaattgattgaggtgagtgggtcaaagaaatggcgtaccgagagaagctcgggattggcaggatcaaaagctagggcatctttaagggcagcgagagaatcacgttgctcatgcaattggagctccaattgggtctccagaaccctctcttcttcgtcgttcgccatggcctcttcttccctccagttcaggatttctgcagcgactcaccaaaaagatcagtcttttaccacttttatttggcggggaagctaatatatgtaaataaactataaataagctttttttttttacttataatcacatttactaaattatatattattttaacataaattaaaatttaatataatattataaaaaatataatatataatctaatttaatttaatacaatataataaaatatgacctaatacgaatttatcgaacaattaagattgttaaattcaaaaaatttcatccaattttactaatagatatttgacgtagataaaaattcaaaagcacgatttgttacatattaaacaggtccagccctcgagtggggcatgcacctaagacccacctagcttagagccacaaaaaaaattctttttaaaaatacaaagtcaaaatatgaatcgttacaaaacaaaacgacttataatgagattgtgccttgttgatattctacttcatattattgcattagatttgaggtaccacaaccaattgttactaatagctcgctcgagtggcctagggtaggttgaagctcaaagacaccaaattttacctctttatcaatctaaagtttttaaagtgtaattagcgaacggttagtatgaatttggtacatgtcaaaaattctccaattccaagttaaagactacaaatttggcaaaaaaaacaagcacaattgctcggaattagaacactctcactagtatatctaaatgtcttgaattgctcaaaatataaaaaacaataaaattattaagaatgaattaaatatatgttctatcaaatgcttcaaaatttcattcataatagctatacacaaaaatctaaaatttctttctccacacaggcccaatcctgaacataggctgattaggcctgtgactaagacccacttacacagaattcccccaaaaatttatctttctaaaattatacattgttttattgattttaaaaattattacatttatttcaaaaagatcaaatattttttttttctgatgacctactatattgtaggactaaccctctagccctgtgacctgtctccataactaaatcatcatttagagcttcttcatttattatttgaacatattgtcgtttttctcattctttcatatacataaatatatagtattttattaatatttaaataatataagaaaagataaaaaaaaatataaattttagtaaaatattttaaagaataaaatagaataataaacgtaatttcactaaatcgttttagataccctgagatatgtccatgttcattactcatgtcgaatacttgtgttacaacaaccataggttatgaagttgggtcgaggcgatcacctccagtagaacctaggttagaaaataggcgtcgtcaagccaccttcccaatttcgaaggactttgttggcttcatgtatgctgaggtacccacaatctcgcctcaataccatattgaaattttacaatgaacaaacgtattatagtggttacatattgaaatttgcttataatcttcttactcaaataatggaatatatttaaacttttatctacttccaacataattacattctcatacacaaacaagattttattacatttccctacatccatacccacgataaatttatttgaagagtttgttgtctagttactctcaactatagccgagaaaagtaatttgttgacatcttcagggtcagaagcattaatttcatctcctgcatcagaaaatgtcatataaatatattcacagtcaacactaacttgaacagtccactcatcaattagtacctgttctcgatctaacttgaacagtccactcatcaatgatctgcataattaaaagaccaaatgtgtagtaagatttccttagtctacagctttacatgtaatatacacaaagtatatatattcaaatcaattttacaagtgaaaagaaaataagtgaaaacatgtacaaggctcaaaactatcaacagaacatcattctatatacatatagatatatatatatatatatatatatttgaagccttgccataagtcaatcttggttgcttgctggcaaatggtgaagttactctaaacaccacttggaaaattagacaaccatttacaacatcaatcaaattacaaacaggatgtgtttggaatgtaatagaaaaaaaaaataatccaaatttcatttaagagtatacttcaataaaataaactttccaccattttgatagaagactattacatttcaaaatttgtgaaaaaagtcattcccatacaaaatgaaaaaaaaaacaactttcttacctattttttttttttccgaattgaagcgtttaatatataccttttttgagctacaaaaactaagatccaccccaatactcctattgctacttgagctagactacgtgatttttcacctatcttttatatgcatatcaaattttaatccattccgtttctatttcaattcctatgaaaaaacaatatttttgcctttttatttttgttttatttttactatatacactttttttgagttacactagggattcaatcccaggaaccccaaaccccatcaatatccatattgtcacttgagctagctttaagcgatttttcacctatcttctatatccacgccaaattttattctaatctgttcctaattcaattcctatcaaggatgatccaattgaatcaaagacaaatttgaaaaagaaagaagaaaaaaaatataatttttacctgattgaagttttcaaaagcagaatcaccagaatcatctacttgagtaagacccattgatttttgcattctctgtagtgagtttctatttccaacaataacagttctagctttatcaatcaaatcctgaatttcaaaatacttcaaattaaactaaaacccaacaaaaattttaatgctaattcaaattaaaagttgaaaattttcgacctgtttggctgacaaaagctcacgacactgatccttcaatgtaaatagatcttcttgaagcttttttattctagaaactattttcattggatttgcctataaaatcaaacaccacccatgaatgaatctaattataatgtatatgagtgaaattaaagattgaatttttgaggggactaacattttcgggataagtctgttgaaactccttgtcgagcttgagttgaaccagtgtcaaatcgtggttggctttcttcaaaaggttctccaaaccgtcggttgcttcgtggtgttcatctctgtgcgccattatactctctttctctgagcttttttctctctcttagggttttcaaaactgcgaagaacaaaccctttcttcccgcctttggttgtttgggctcattttttgttccagtgttcttcgattcactgtaacttaacgtgtgtccttatgtggcttctgccacgtgtatgttattctgcaaatagttactcttggcctttgaaaaaaaagaatagaagagaaataaagaaataatttttttcccctagttgtttttggtaatcttgaaaatggaaaagtaaaaaaattatggtttattaggatttttgtttctcaacattaacatctattaaattatgtttttaataatttttaagtcgtttaaaatttttcttaaattattaagattgttgaatttaaggatttctagctagtttcgttcaattttattaacatgacgattgtagttttactaaatcgtgtcccgaactttgacatgtattaaatcgtactctcaaactttaacatgtactaaactataccacctgaaattttatccatgtcagactttcgttagtaaaatttaacagaagtctttgatccaacaatctcaatagtttgtgataatttttaacaacctgaaaagttcgagatacataatttgatgtatattaaagttggggagccaaaatcctaagtcaaaaattatttattcatttatttttcttaactacaacatctatttcataccactatcacttcttatcaaacccataattcttattctattattatctattcttatactattctacatagtactatattattcctatctatattctaattctaatatggtgagcacaaacatcatcaccttaataaaatcatgttattaatacaataacttgaactaatgggcctagtcatggggctttctaatgggctaatttaaggcccaattaaatgtccatttgcatctaatttggtgtggtgatgcaaacacatatatgacaggacaaccttcccttttccctttctttgtttcagtttcaaattttaattcttttttacattttcaattttcaaaaccaaagaacatatttctttcttgtgtcctcaaattgaacacgaaatcaaacaccaacctctaattttcttattttttatttatttactagccaactttcatactcatatagataatttctctttctaattaagtttttactagactaattaagtctttcaatagtaaaaaaaataaaactcaattatctatccacatccacattttctcttataccctacatatgttcatttacaccttccctcttaaaaaaagattaagaataataatcactttttgaacaataaaaaaatgattttcaccatttactaacgttttgagaaaggaaaaaaaaaagttatattttatgaaaaaaaata

SEQ ID NO: 15187 - DNA, 12256 bp, Cannabis sativa
  modified_base (182)..(184): a, c, t, g, unknown or other
ttttaaacagttttttttcttaatcaatcttttagattacgaccagacccggacgcaaatcccctccccacagccctagcggtgaaccaagcttctgacttgaacccgaatccgaccccggacttagacccgacttaaataaaataaaaaaataaacataaaaatgaactttacagaacacnnntttgttttctgtttttaaaattaaaaaacaaaagtggttatagaacacatttttgcttttcaaaaataaatttttttaaaacaaaaattttactttcattttgtaattaaaaaattaaaaaacaaaagtgttaccaaacggcacctttataagtgatttaaaattcaaatttaataactaaatttcacccttagaaacaattttccgtttatctttttttttttgttttttgtcttttaataaaaaaaaaaactcattgagaagtgacatcttgtaaataatgataattttaataacagtattgttgctactgctagacaatttagcagtctttatatagtacttgttaaactaagttactaaaatagcacacatataaatacaaacctaataaaaagatgcggtgactttcaatattatgtataatctatcttgactaaaaataattacttaaaaatgtgttacatatgttctcatttgtaagttgttattttattttgagtaatttgcggtataaatacgtaaatttaactcaaagttgtaaataaatatctaagtttaatttttaacggtaataatacttaagttataattcttaaattgttgtaagtacctgatgttaagtgttaagtaaattaccacgtgacaatttctaattggtcaaagttattaaatttgtattttttttaaaaaaattaatttaaatatactaataaaaaaaatgatacgcggataatgacttaatattaaacggttagtacctacagagtttcaaaaaaaatataatttaaataaaatataatttaaatattatttacaagtaagaattaaaattaggtatttattaatttggtaatttatttgaacgcaaattactatttaggtaaatactgtagtagtagtttgagtttctttctaaactcttccatctcaaaacacgtccacaaattgaacttgtggaccataactgaccaccacccattcgattcctacagctacaagtaataaagtgcaagtgtatttcatattttatcctaacccaaacaaaacaacattcattatacgaactgaactcagctgagctcaactacacaacacaaccatggctattactactgcttcttccatttttaaggtgtcatttctaatgacccttctatcaggtctctggccagaccaggaggcctctgtaacagtgtttccacccacgtgtaatcgaattgagtgccctagcttcgaaaccatcgaggtgggtaatggctacgaaattcgtaaatacaattcaaccgtctgggtttccacctcccctattcaagatatctctctcgtcgaagccacccgtactgggtttttgcagtgagtttcatttctttcttttattcccattcctctctttttactttttttttcttttttaataatataattaatgtcgatttcaaaataaacacagtcaaaaaagagaaatgctaaagttgattggtgcctaccaattcacagtaggtgtgctaccagttaaattcaatataattatttttactttaataataattataaaaaaccgtttaactatttataagatataatcacttaataatacttaatagcaattcttatttgaaaagaaaaactcaatgagtatatattttgtagcattgccacttgacaacttaacgtgcctaatacaatattgacattccataagatgattgttattgggcgctactggtagtgactagcccctttagacacatgttgttttgcgattggttagcgatactctttaaaaattattatattaaattatatataactcgatatttaattggaccaataacaattttaacacgtaaaaagaaagtgttatacactattggtcacctttagcatttctcattctataattataattagttagtggtattaaatacaataagtcattaagtcacaccacaaagtacactatagcatttctcagtattttgggttcagcacaccaaaaccaaacataccttaaaatctgtaatggttattaatttcaggctgtttgactacatccaagggaagaactactacaaggagaagatagagatgaccgggccagtgatcaccgaggtctcaccgagcgatggacctttatgcgaatcctcattcgttgtaagcttctttgttccaaaaaagaaccaggcaaatccagctcctgcaaaaggccttcatattcaaaaatggaagcccacatacgtggctattagacaattcagcggctttgttaatgattacgaaattggagtggaagccgccgcactcgaagccagcattgccggaactatctggtctgccgctattgacaagaaccgtggaactgaaagcagttcggtttacacggttgcgcagtacaactctccatttgagttcaagaatagggtgaatgagatttggatgctgtttgatcttgaaaaatgatttcacttgaataaaaggaataaatgaagttagaagttgggttcagcttggatttttaagtgtttttttggataatacccttttgtggtgaggaaaggatattgtagttgaactgaataaaagtgatgtattgtagaacaaaaatggtataaggatcagaagagtttctcttttccttctcttttatgtgtttccttaaccctcaaatatgttggttgactatacaggaaggacttgactatgatcaacaagatttcccagcttagatatatagatatttggcttagcaacacttttcatttgtccaaagtaaaaagctaaaaccacttcctttaacatgacatgacagtattcattaatagatgctgttgcgtggctgcaatacagctgagagaattcattaaagttacttagtttaatgtccattaaaagaaatgcttacaatgaaaaactcaactttcgataaggtgtcttctcataaaaagaaaaaaggggaagcaagtgggttccccaccgggttattattactcatgtcacaactccattaaaagggtattttattaccaaaataatctttatttactgcatatcatgtaatctcaaggtttaggggagatttttttctgagaaaaacagtgatatggagatgaacagcagtaaaaggccttggcacttttagttatagttatagatacaaattttcttatggaaaaggaatatcataaagtgatagaagaagaaaatgacaaatgctttacaactttccctgatatttttaaagctaacaagaatattcctttcctcgatttgaaataaaccagatatgcctcaatcaacaaagaattgaaaaagaaaattgaggcacacagatttctacctactaaatcgtatattcaatcagtaggaattcctacgaactagaacttacaatgaccacaagtttgatttgatcaatcccattctactgggttactactcccatatcttacaaacacgccacagttactgtcagatgaaaatactgtgggagaatcactgacctgttgtgaatagtcaactttcggtaatctatcaagaggttgtgctgatgatgacaagtatgagtccaaaatatgacccttttcctcagacataaatctactttgtggcctattattcaataaatttctgcaggggatggaattatggggataatctggcgcatatataccgtgaaagattgatgagatgggatccacattgcccgtatcagcataatctacagtgctgaaagagtctctggtactctcagttgtgaaagatgcctcgtctgagctggtaaagagagaccaatcacttgatgatgtagcatcagaaaactctgccccgtttgggagtcttgtttccatagccggaacaacattcctgtttgcactcctaaggatgttgtttgaggtgtggtgagtaaaaccatcacccattccagctctaatatcatcggaaaaagactctggaccaacatattgaccgttgagtttgccttttccagaccttgaaggctttgacgtacaatgagttgcgaattctggaacttgctgctggatggctcttccagtaagtgttttttgaggtcgcgggcaagacctggaatagttaaagaaaataaatataataatgatgcgtgcgaagaaactacccgaagaacagggaaataattggtgtctaacgcatcactttgggtagtaaaacatattacagacaggcccaaatactaggtaaagtggtagttataatcatgcaattataacagggaagcaaagaaaaaacacagtaactatatcttttctaaccagaactctaaaattaattaattatacctcatgtaaaataatatatacgctccttctgacataacatggctcattgcaactggctggacctgttaaataaacatgatcaaagttagggtccaattttattagagcataaacttcaaaatgatatttaaaatgaaaaaaaaaacaccaaaagactcttcaaacttctgcacctaaaatttgaatcgacaaaaagagatggcaaatatatgttattatccttacagagtaattaatcaagtagtaggctgttcagcaacattttaatcaaaaaattagaaaacaaaatttgagtatctgttccgagtagccatctgaaaaatctggtttgttttagagcatgtggcatctaaatattgatgagagattacctcagtgtcatctatcctgaaccaatttccttgcaggtctttaacgtatgaaacataatgcccagaaaaagatgcatttaatgtatccaaatgcaccacgacagcgtagagcaagtagagtggaggaatatcacccgttccagtcatgaatggaatcatatcaagcatatcaggaaatgtgatgcacttgttaatttttccatattttccttcctgattaagttaagggcagaaaaagaaagtcaggggatagaaggaattcttgcagtaaaagaaacatgtatcagttaaggtgttaagcctgagttatatgaaatgaaagagagaaagcaaattaattcacttcttaaatacttgacaattacaccaaagaaaaacattaatataattccatactcgaaacaccaccgaaaaatgatacctgaaatctctttaaaacaattgtaagaatatttggtgcttcatgtatgcttagctgcttcctagctcgaacataggtagcacaccttaccaaaagaaaagaaacaaacaaacaacgtcaagagctgataaatttaacggctttggacttcctcaaaataaaaattataatgagtgaccaaaccttccacatctgtacatgttttctccatccaaatcttcaggagttgtaaattgtgtcaatgcatcttcaagtgactcaacccaaccatatatctccaatgtaagatccataatgttttcatatctttcagattcatgacgacatctcaaacacttgacctggtttcaataaaattgcttcattcacaattaatgtggcagagaatttttttcaatttaagaaaaatgcataacaaaaggttacaactgacttatataaaagcaccttcgatcttagatgccccccaaaagtatgctgtacaaaagttgtctcctgcaatctgggatctaccttactttctcctcccaatccctccaagcatatggattgcatagatgcaatcagaagcctggaagaaaagtccataaaacaaatgcaaattatgtcgttactcatctaaacatagaaaaattaaacttcataactaatctgattcaaaattgctcagaaaaattaaacagcagcaaacgattgcaaagcagtaccccaaaatgcaataactaaatttcaccttaagaattcgtgtgcatcttcctgacttccatcaccaatatggcaattgatactccgcatgtgcaaaagaattctgctaggcgaaagtgggcctccagtttctcttaacatcattacatgttgctctaattcacacatgagacaccaatctttaccacaacctaaagtgcatatagcagatagaagtaagatacatgtgtcttcaaggaaaacatcactagatattgacaacaacaaactgtaaaggagaaattaaacctagccaaaacacaaaatgaaaagagaaatgtgagtacatgatcttgaatgtgatttacgaagcaagtaaataatgagaggctttgtggaggtcagacactgcaagacagcatttgcatagcaactgcaaaacagaaaacaatttcaaaaaaaatgtgcaaaagagagaaaacatgagtccaccaaaacatgtgcaaaaagcatcttttacatatttaaaaaagaaaaatcatgttacaaaatctaaaataataatgaaaccttttaacttagaactaatagcaatcaaaatcaaaaaactctgacttccaatttctagacagcaacagaccaaagtaggctccagctgttgtgaggttgatgtattgaacgcaacaatatcttgaggtttcaggtttcatgaattttctatttagtctcattaaatattctcaactcaaaagaaaataaaaattgagggcagtgtacctgttcccacaattcaaaaggccccgatatgataaattaaacatgtcacactggaagaacttcacaaactcctcataaggaaacagcatctgaaaccgacaaatgaaacatccaaaaaatcagcaatagatttaaaacccaataaaaaatagtcccttgaacagtgaaggtaaacaagaaggtacattgaacagagtaaccttagttttgtgtctatcaccactgacttctgagacatcttttctagtgagtttagtttgctttttcagggccagcgtcttcaaaatccgtgtgtttgcacctccatcactagcttgtatgggagcatccttcaatctagaggattctgcacaacaaaaatgaaaaatgaggaaccataaatagagtacatttaaagtaatctttttcatttaaattatcatcagagttaactttttactcacttgattcaagaacctgccccttccactctctttctgagcagaactgctcctccttctctttcaaagttgattttggcaacttacaactcttgcttccaagagaatatggtggtcttttaggtttagtacctccctttatcacggtcatttcgggagaacattcaaattcaacctgttcattatgggaagtagtttccgcttttaataggtttccaccattctgattaaagtccttcccaatgtcatacccattggatccattcttggatgaataagatgagcatgagaatccatgatggttttctggttctaatgtgttccaatattgacttccatttgtaccattctcaggcactatacttcctggagtagctcgttcatgaatataaatatcagagatattaacactctgcttgtttgtagattcttctgatatgaaagtctcactgtttcttgactgcaataaacaggtcattaagtttattacatggaaaatatgatcaaatacaaagaacgctaataacaaaacaaatataaagatgctaaccctatggccctttaaaacatcttttgatgaaacaacatttgaagaggttgtataatcactccaactcccactgagttcggcagaagaatttggtgcagcagtatccttccttctcactgtttctttgttggatttacgagaagcacgtttttctgcacttcttctctctggcacagacacttgaggcgcatcaacagctgaacgatcaattgtagcagagataccattgctaattgaggaataaattatattttctggagcttcggtatccaccatagtctgctcaatgttgtacccaacatacgaagaattcatggcatcattaggtaagaacctctcatacatagaatcttcaactgaagaggtcataagaggtgagcctgagttggtgcttttcatttgctggcattcttgcttgtggacttccctccagtgaataatctgacacttcccagaactggaaggaatatataaatgaaacacgtgtatttttcagatgagaaattaaaaaaaaaattattaagtaaaagaaacatggaatgaagcaaaggactagggatcctccacctagcaacaataaaaccaaacagaaacttaaatcgaattgtttaaacatagaaaaacaagaaagaatggaatttcaattagacattcaacacaagctgtaacgggataaagtgggatatccagcaaccgataacaatcaattggagggggcatggaacatacttattgctagctgttaatgttatcattcataaaatgattttttttttttttttgcttcagattgttatgatggttcaccccttaagttcagccaaaagactgagagattcaaaaaagtatatttatttcaatattcttttatatatatcaataaatatatctatatataaattcagattctatataataatatatttacttcaaacttgctttgttgagaaccttacaatgagacaataacaatctatagcaaatagtatgttagtatgttatctttgtggcctcataaaaggactagagcttaccaatatctaacagacttgcacttggagcagcgagttgtagctggactaaagcaccttgcacatgcatggtttccattttttgttgaagccacaagaggaataacatcagcaacagccattgcttctgctctacgagcttcttcagcagcaatctcagcaagtaaatttatcctatctctcttcttagcagattcactccattttccaagtaagacataagcaaccaaagggagcacaaccaaaaacagaaacagggcaggtatatcagcttcccttggctcgagcatgtccccaccagcatactcatgtccaatatcctgttcaaatgactacccaggagatgatctcttcaaattacataattccaagacaattaacatttgctgcagaaacatgaaaatgcaagataaatcatccatacccaacagaaagcagtccaattttctcattaataaaaatgattcctttccatatatgagtttgtaacccttggccgttgccaaatactataaataaaccatgtgaattaactttccttttgtgttctgtgaattagaattaaggtaaataattagctaaaaacaatccaaatgaattttcctgtccataaacttttagatcagattggtttagaagttcactaaattcatacaatagtgagaatcagactctttttagaaaatgcactccattgcttcactcattgtagcaacagaaatgcctttctcctacaaacaactgctgtgctgtttttcatagtcgtgttgtgagctagttggcgctaattttcagtaacagccagggaatctatctcaagaatttctatagtgaaacaaaacagataaggcaaacatctcatttaaacaccaccaaaactattatctacactaaagcaataacaacattacaaatctctcctacatgagcatacccattagtcaaaatgtacatctaagagaaacccatgtactaaaaccatctaaaatccccaacttttacaagaactctctgacacaatacctaacattaaaaataacctctctccaaacctagcattacgcttaaactagattaactacagaaaaagacaacatttttcaatcaccaaacaagatttccctaccatttcagctaaatgagcaattaaaagtcaaaaagaaaaggaacccagtacaaaacaagcaaaataaatctcagatttcaagaacaaaaccatgaaatcactaagaacaaaaaaaaaaaaaagcatacctcatgcacaagaaagaaatctaagcaaatcccagtaagtgtaccacttcttcagctcccttcttcaccgcccaggaaaaaaaaaagattctttgattcctcagacggtaagccaaaagcttgttcttacagtcttctctaacattcgcttacttggcttcttcacacagcacatcaccctcttctctctcacatttccactttttaacttctacgaagtattccagtatgcgtactcggacccatattacggtgcaccttccacgtggcacattttaattgagtgttgaacagggttcagtgggcccattagcaatgaaagaagaataaaaaccgaggatgagaagatgggggatggattaagtatcgttggatgtgtggaaattaggggctggactggactgttgactgtagagacgtcacggggaggttggtcaaataagattatataattggtggagaaagtgggacccacaatgagatgatgttcccaataatttttaactgcgagccacgtgtacggtgggatccatcatcaggaatcaggataattgttgtgcaggcagacacggtttttaaaatttgtgctccatattctcccaatttaaaataataataattaaataatatggttttgaaaccattttgacttttgactgatgacaaagtaaaaagcaacaaggtacgtattatacatacatacgaaatgtcataagtaacccaaaagagaaaaataaaacagagctattacgaaacaaggcaacatcttacgtaggccattacaaaaataacacaatctaaatggtcgtctcgtctctttgtactctttcttttttaatataaattaacacatttcaacgtaggcaagggcatcactattcactagtctctcggcattaagcaaaacaaatgattattaccttacctttggctggtttggggatggtagtttataagtttctaaaatatggtacttatctaattatttttaaagatatggtacttatctaattctttttgaagatatggtaatattataatatgttgttttcctactttatagttataatgtgctacttttctgaaacgtgtacctttcggttcggcgtgcatggtcgaagactgtattattggatggttcttctttctaagtagttatttttgaatttaaattgaatggaatacaaagcaatttttgctaaatcgagctagctacaaatctgtacaagttctaactgaatcttcttttttgaaaaataataaccttcatagttatttctgtaataatctatatctaaattaaatatgtacgcagcagtttttttttgctggaactttaaataaataaataacagctagcttactgcaactatataaagggttggatggggagaggtcatggttcgaacacaacttttataagctataaaactattaattaattgtaaaacgctgcactcaaaaatatatatatattatataccttactaaagtttttatactctaaattttgtggtttgttagaattaaaagtagtactaccagaatgaagttagcacctaaacaaaataaaagcccagcaaaatatatagcgcatgtttatattaaattagaggaaattatactagatgataacattaatttgtactcccttttttaaaatttattatatttgcattttttgtattattttattaattttatctctatcacttcacaataatttttattttctctaattaaaattttacttaaattttctcacaaatctctatatccatctacaaaaaatattaaaattgtatcttgtttatgtgagaatgttggtacgggctattttcctttttttaaaaaaaaaatattaaatttacatactaaccaatcacaagttcacaacaacaaaaaattaataaataaaaaatagaaaaatgtaagtattagtgcttagcaataacacatattactcgtttaaaaagtcaacaattttaagttacatggatccacatttcttagggccactcccattaagttgcacttagttgttaacacaatttcaagatatttgaacgcaatattggtttacaaaatgaatcatatggaaccaaaaaacatagtgaaaattgttcaaaaagttactagctctttaaataactggtttttggtttttcaagaaaacataaaagtattcttttgagaaccaataggggcgtttgagattgttttca

SEQ ID NO: 15188 - DNA, 5313 bp, Cannabis sativa
tctctctctctctctcttctattcctctccactttcctcagtctttaatggctgcccgcctctatgagaatttctgagtaaaaaaaaactattagtgggtcggtgctggataagcattttggcctttctctttttggttgtcaagaaaaagatacccattacccattgagaaaagaaaaagatagtttttgtttctaagcatgtgtttttgttgaatttggtgtaaatttgatctgggttttgctaaaaaagtgtgatattttggaccctttagtcagaaaattatttttgatagtgcggtgctgaaaccttgacattattgaaggtagaatttttagaaaagcttttttgtgttaattgagtatttttttttttttttggtattgtgatgtaatgactaatgagtcattttcaaggatccgtgatgctacatcgtggagagtcaattacatcaatatgcatgctttgttctatttaattggctggcagcattgacctttggaaattgtttttgattcaccccaattttgaactcaagtgtagataaattatgtaatatagatttgatttgtggttgtgtttttttgatttaatttttgcttctcactagcttttgattataattcttgagaaagtgctttctcattaattactggctttgttcttgaagattgccagtctgactaagtttctgattgtgaaggttgaagaggtttaactttctgggcttgttcttttttgggagggaagaagagaacttctccacatgatagctttttgtgaagaatttttcatcacccgtttaaagcttctatcgaaaaatgaagtctttaatatcttaacatccaaggaaagtttagatgccctgaacttccctctgttacaaagcttgagattttgaaactggaatctctggactaaactgcactagatttctccagcagcattattcttttcgagcttaacgaatttcggttctatctaaggtacttccaacattttatttatttattttattttggttctagtccatccactgttctctcttgttttttccaacaatattagctgaaaatttgcatgtgtttttttggtttctcgagaaacccttcttcttctttgtggttctactaaatattcatccaataactacccaaaaaaaaaaccatggcagctagtagataagagattaccccccataaatttgaatcctattgacccaattttgttgatgcagcgagagatcggcaaagaaaattagaaaggcatataaatctttctacaggaagaaacaaaaaagaagaggaaatcattgatttgatatggctaagaggtctcacagacgcgcggtacggtatgagaaagatcagtcagggtgtatgtggggttttattagtatatttgactttcgccatggccgctctactcgtaagttgattacagataaaagacatggaagcaagcacactattggtaagaactctccccccaatttctagttaacatgtttttatatttggaatcaagaaattgcattaattggatttagaagtaatgattaatttcatttctggtgtattaagtagggaattaacatttggtttaatccattttctgagtagctgttgaagtttttttttttttttgttaattttccattactgcaggaactggaattgctaagaataggtttgaaatattgagtaatttgggagaacattgtcaaggcaccaatgctgtaagtaaaagtgtttcctgcatttgtaatatattgttgttataaggtttattgatatagaaagagatccttatttcagggtgataggactgcagaaattttgacagctgatacggttaagcctagtgtcaagaaactcattgaagaagagatggttaatgagcagggcatgaagaaagagactagggatgctgtagaggaacctaagcagtcagaatctgcttatgaaggtgatgtaaagatggatcctaagaggattaggaagactcgcaagaaaagccgtgatatggatgtgcaaaatgtgcaatctgagtgctcttgtaaacataatgctgaccaccaatctataaaagatctagctatagatgagataatggaagagttctctcgccggattcaccaaaaaagtattagtttcaggaaggatggcttgaatggtgaaactcctgagctattaactgacaagcattctgattttgaggagaaattgaatggggtaattaaggagtttataattcagaagtttacagatgggaaatgtctcaaagaagaccagaaaatccacctccaattcagggaactcgtcgataaactacagctcaccagctcagatgaggaattgttgctgaagctcttacaggatccacaatctttgctggttaagtatgttcaaggcttgcatgaatctcaagtggaaaaagatgcagaatgcaagcccattggaggatctgatttctcagaacataagcttgtcaactcaagaaaatctgaagatgttgtcaatcataaacatcggtcctttttcaggaggaggaccaagtctcaagaacgaaaccagttggaggaaaatgaacaccctgacattttgagtaaaattgtcattttaaagcctgggccaacaacaggtttaagaaattccaaagatgaaagtagcctcggaaaatcccaagagtatcatgatattgttggaagtaaagaaccaagtgatagagttggatcccactttttcctttctgaaattaaaagaaaatttaagcaggctatgcgaaaacaacaagaacaatcaggatctggaatttcaagcagatcttccaccggtcatcagtctaagggagatagtgaaaaagtagttgggaagggaaatgttggaagaaattctcctactaaagatcatttctatattgaaagaattgctaaaccttccagtggttcgaggagaggggacaagattaataaaatgaaagactctgaaataagtaagcaggaaagtgatgcttttcccagcgaaagaatgtctagtatctatgaccaggccaagaaacatctctctgatcagttgcttagcaatggagatggtgcagacttatcaaaccgacataatactaagaccctggggaggatcctttctcttcctgagtacagcgcttctcctaatggcagccctagaaaggactgggaaaataactttgtgactgcacaaatgagattctcttcccaagacaaatatcaagtgatcaatgagaacagatgttctcccaaatcagaaaacaatgtcagtcctctaagtagggaagcagaaaatttagagagtaattcacctgttactggcaacagccctgatcataaagtagaagctcctaactcaaagactgatatttctgatgatgttggtcgtgaaattgaagtagaagatgctgttatttccactaaagagaatatcagttgtgaaggtaatttgtccaccgtttgaactttaatacaaaaatcttttggcaatcatctcgttcagttaaaatagaaatgcagttaagtctgacacaaaaaaaaaattgtaggtgattcagagtttgtaaaagaaagtagcattacttcagatggtccctgtgaaccgtgtagctcttccactgcaagggatgacccgagtgatgatgttcccgtcacctgcgatgataaaagtgattctctttgcttgaaacaggtattaatatttttattcacttgttttctttcggtgcatataaagcttatattcatatcaggtcttccattttcctgtacattaatttcatggaaggtttttcttgttttcatggaaggtcttccattttactatacaatgggctgttcactagtccagagaatctgagcataaaatatattcatatgtaatcaacatttatggctgtttattaggattcacatgaagagaaccaagtccaatcttctccaccaagttccccttccagctctttcacctccagaaaggttgccgattcagaaagttctgtggacataccagaaaggccgagtcctgtttcagttcttgagcctctttttggggaggatgatattaaccctgcaagctccacatctcaaactggtaagcatacacaccctcattgattattctcttcaggtattttgattttcctgctgtttaacccttattgactaatgtcatttcatccactgaacttcagccaactcaacaatacaaccacttcgaattgaatttgaagatcctggttctccacctgctgctgatgaagcatgcaacggaaaaagattattggatgacaaggagtcaatatgtgcttatgcaaaagctttgatgcaagcatctgggttgaattgggataaaatctgtataaagttgttttcctcagaccaactacttgaaccatcattggttgatgagattgagtttttctccaacaaactctgctgtgatcagaagcttctctttgactgtataaacgaggtccttgtggaagtttgtcaatactattttggttcctctccttggctatcgtttgctaaacctagtgtatgtccgatcccagacatgacaaatgttgctcttgtggtttctaaaggagtttattggcatcttcgtcaaattcctttgcctcatactcttgaccagattatcagaaaagatatggcaagaactggaacgtggttggacgttcggtttgatgctgaaaccattggttttgatctaggtgaaaccattctcgaagacttgatggaagacaccatattaagttgtgtaaatataagttgcgaaagtgaacatgatttgcttccagagttagaggaaaatgcaagaactgtcgacttgtagaaaacaactagcattttgttcatactcgaagtttgaaactgacccacattgcgtcaaaagtgcaattcaattttgttcactgggaagatggacagctaatgtgatctgataagaagagaaggccttgtgttggtacctgaaacatcctggatatagtttgactaagcttttcttctaacttcgtgtaatgaatcaatctgtacagaatctgccacatcaaagaaccaggagtcatgggcatttctaggtgttattttatcaacctaaagatccttcatgggcaggactcaggagggtcagagacttcagtttggacgtgctcatttcatcgacaaaaacggtgtttttttctttaggatgacaggcagctagctatgtagattttgtagagttctgcagtgttcatgtgttagttgagggtgtgtttattttgtttgattgattcttt

SEQ ID NO: 15189 - DNA, 4761 bp, Cannabis sativa
aaaaataaataataaatagtataaaaagatcattatactaaaattaaaataatgagatttacttatataatactataatttgagattatttgctgtaaaaagtgtaaccaattaaacattacataattcttccaaaaaaaattgaacattacataaataaatcaatttttttttttttttgattaagaaataaatcaaatttatcgaacaagaaaattgggcctctatctcctactatactaaaaaagttgttgtttccaaacaaattttgataggttattagggttagggtagtgtgctgacggagcagtgctcaccttatcctagaaaagcttatcccggaacttgcagaaatcgcagtacaccataagttcataacccaatttcagatcttccctgttcgcattaaaggttcgttttttaatttcattttatttaaatatttgaaaagaacttctccctccctgttgtttctcgtcgttgtcatacatagtttgtcctgatacgagcttcttcgttgattataagtccattactctctctgggttctctttgttttagattttcaacgtgcatggatggagaaaataaagtaataatcaaatgggtatcttaattcacgtgttcagagtttctgaaactttattcaaagcctattcttccgattctctctaccactcgtgaaatacgccttctttcttacctcacactattatctccttctacttgcttgtcctgattcgaagcttggagtgtcgtttccgaggttctctacatttgcttaggcggaaatcccccactccgatatgttcctaaaactgaaacaggtattgtaatttctattacttgattttgctattcgattatcattattcgttttatatttatgaatgtgctaaaatctccatctctctctatttgatttcatatgttgtggttgtgattttcttttgatgtttgcgtttattctattatgctatgtatgtgttttgtagaaatgtctcaatctcttttcatgcatttatgtttgctgaaatttcgaactatttctttttttctttgttagatctgggtttgtggcagttgttcatcgatggagtgtttatgattaattattgtgattcatatctgactcttgtgtgtgaaatgaaaagccccctgctttagttatgaaaatgaattatttgtgtcatctgttaaattggtcttctgtattatgcttctttttctatctgtattatagtatattacttgattattgttttagcatttaattaaatttctaccagaaataccaacacttttttgttattaaaaggttgtataactaagaacagtaaacagtatgtggaggcacacatggctgtaaataatgatgatgctacaaaacaaatctttaactgttgtttattgaattgtcttcaagtacaccactttggtatgttttttggaatagtgttgattagtgaactatggttgctttcatgtggtggatgtaaaaatttatatgttgtgtatataaagtgagctgcatttatgttatcattttacatttgtgcctgctttataggcggtgctacattaagttcataagaaagagcaatgacaagaaagggctagagggtcaaaaagaacctaagaaggtatatgatttcatgctcgactatgttggtgtgtttatctctcgagcctttttgatgtaagttatgttcatatatatgtatataaatgcgaaagcttatatgattattgttaatactggtgtaaaatattcatttgctgccgtgtttggtcctagttatgtcattgttgtgtttttaacaaaccttgtctaaatttttgttaagatataaatgtagagtgctatcattcaagtgccaatgtttcctattttctttttcttttgttttgaacaaactccgcaagacagtttaattcaaggctaaaagtttgaagcatattctcctgcggtgtcattttctttttataataaataagcctttctcttgtgccctgatgattcttatattgttgaaggcttctgttttttggttcccgtgtcggagttgattacaaatcagtggataaaatattatgcagaatcagatactctcatattttccatgattacaaaataatagatggcatactaatttatattattttttcagttaccgaattcagattttcatttcagaatcatatttttttaaaattacagtgttcaaatcaccaaccaatcaagccctgtgtttttctgatggtttgatagaacgaagtgatgggtgttcgttcccgtagtggtagtgatcgactaagaacagtttggacccctgaaatggatcggtatttcattgatctcatgttggaacaagtcaacaaaggaaataaatttgatgaccatttgttcagcaaacgagcctggaagcacatggctttgttgtttaattcaaagtttaagtttcagtatgagaaagatgttcttaagaataggcataaaacgttgaggaatctgtataaggctgttaagaatctccttgaccagagaggctttaattgggatgaaactcgccaaatggttactgctgaaaacaatgattgggatgaatatattaaggtccacataactaactttaaaccatcctacttttttttttattaatgattgtattcccttatcttaaaaaattgtagagactatatgagtcggcattgcattgcaggcacacccagatgctcgttcctttagaataaaaaccattccatattacagtgatttgtgtaggatatacagagatgcattccctgagccaacaggtaatcaaaatgtcattatatatcagttgggagattcttaacttgagctgtagtttgtcgttgttactcaagatgttactttccgttactagaacctttatatagaggctagagctgttcatctgtactgatattgaatagtaatagttaaatgtcaattttctttcctctctttcttctttgctctttcttttatgcagttattattttttttttacaagtaataatagatgacttaggctagaaacgagaatgagttgtttgatgatggataattaggtaagaatgtgcctgagggatccttgctttcaagtggtaaagtagctattgaagttacacagccaagtgaagttggggatggggacacactggcgcttcatgatatcatgattgatgaagattatggaataactatatccgagaaagatgctgaacttgaagctccacaacaggctatggcgagctcgagaggaaccacattaagtaatcgaacaagaacttattggcagccgcctatggaccggtatttcattgacctcatgttagaacaggtgcagaaaggcagcaggattgatggcgtatttcggaaacaagcatggatggagatgattgcgttgttcaattcgaagtttgggattagctatgacatggatgttcttaaaaatcggtacaagactttgagaaggcaatttaatgtgatcaagaatctacttgatttggatggttttgtttgggatgagacgcgccaaatggtgactgctgatgactgtgtctggcaagattatatcaaagtatgtattatcatttggttccctcttattaaatttcacgtgtcaatgcaaaatatatatttgtacgaaaaagaatgcagtatagattggcaaaacaatgaaaatgtattaagagtgtctgaaatgataatatgcaggatcatacagatgctagacagttcatgaccaggcctgtaccttattataaagatttgtgtgtgatatgcgatccatgttctgatgaaaaagagagctcttctgggcaagggttggagcaacaaaatgatcaagatactaggtctccagctacatcagtttcaaacagtgaatttaagaacaagcgtcaactagagaactggtcttcccttcctcaatcaaaaagatttcgggaaaaagacgaaggaatggctagtgcttttcgtgagatggctactgcagtttcttctctgtcagataataagaaaactgaagagaactactccatcccaatagagaacgtgattgaagcagtgcaagctttgccggatatggatgaagagcttgtgttggatgcgtgtgatttgatagaggatgagaaaaaggccaaaacttttatggccttagatgttaagttacgtaaaaagtggttgttaagaaaactgagaccgcaagcatagccattttatttgtgctgtagtcgacttttgttttggtggatgggctactcaggtgaattagggtgtcgtgttcaagaaaaggaaaatgaaagaattcacatcgtagagagatagagaggcagatatgaaagaagcttgtatctatatatatctacattatttgttgaagtgattcaaatgattagttcaactagtaataataaagagtatagtttttttatcaataagccaagacacacttgaagatagtatgagactcagctgaattgtacataatatgcatttcattgatgtttttacctatttatgtcaatatatcagtaagtcaaactaatgcacacgtgatactaagacttaaaatatgtcatatgccacatatatagaggtaggtgtacacagtgccacaaaaaaaaaaaaaatcgaagattaaggttatttttttttgggtaaaataccattttggaccctttgttttacaaaagttatcaattggaccctgtgttttgttaaatgataaa

SEQ ID NO: 15190 - DNA, 3697 bp, Cannabis sativa
atatatatatatatattcttcttcttcttttggtaactcagaacatttgtgccttagattgtttttaaattccttcatagtcaattaatagttcgcagcttaaaatgattcaagatggttttttcattattgaccaaattgcatatttaaagtcaaatttgatgaaatcttatcaatcactcaacttaaaccgtaaatttgatgaaataatactagtctagcttatctccttttcattctttttccctcttcacaaatttatattaactttattgcccattctaatattagaattatgctttgtttaggaacttgaaggatcttttccttgaaggaacactagcaccagaacttacaatccttggccacttgaaatcaatgtaagcatttcttcttttatcttgtcaaaccagatacttccatgtattaatacttgttgttcataagtactaatgttctcaaatcaattgtctttgtatgctgcagcatcttgcgcaacaactccttcagtggatcgattcctgaggggatcggcgagttagaagaattggagatacttgatttaggatataacaacttcagcggaccccttccgaaagatcttggcagaaatttgtcacttacaaccctgtaagttattatatagtggcagccatatgtgttcagctcattctttctttatttgcttattgacatgcttttctgcctggttttgcagactcttggacaacaatggtcttatgggtagcttgtcccctgaactgaatgcactaaagatgaattctgagtttcaagttgataaagtacagatgtctggtgcagctagagaatcatctttcaaccaaatatcaagtttttggtatgttacatactaacataagcttttagactgttaaaaaagaaaaaatatctttagggagtctcaactctcatgtgaaatgctttatttttctgtttgtgctcatttcaaagtaggaagggaaataagtaattccctagtaccacaatcaacgtagatagaatgtgaaaatggaatcctatctcaaaaccagttgtcttttttttttttttgctaagaaatctcaaaaccaattatcaatcagtaagatccacatgttttttctgtatgataatatgttcttacacattattaatgtaggactttctagtaagtatcggtatcgacatgcatttttgaaaaattagcagtgtaatctttttcgtagtttttgtttggtttaatttctatatggacattgagttggtacatgttctgcttttgtgacattatagagtgctcttatctctgccaggatgcaagctgaagattttattcaccgacgagtgctgcaggccaagagagcagaatcacctaatcaagttcctgttaatccaacatctcaaggtggacagaaagtttccccttcaccatctccatcttcatcatctgctcaagaagatactgcaccaccatcaaaatcaaaaactccacccaaaataccaaaggctgcaccagcgccagcgccatctccctcttcaccatcgccttctttggcaccgcctccagtttctattcctaaatcagctttgcctgccagaaacaacaaaccctcttggaggagtcatcatactgcaatagtggctggatcccttggaggagctggtgtccttgcagttgcaatactcgcctatctgtgtatatcgtccaaggtagctaatgtcaaaccatgggcaacaggattgagtggacagcttcagaaagcatttgtgacaggtaattctgtctcactaataataaaaaaagttgtctattttataaatttgacctcatgtccatgctgcaagttttatcacagcaaatattaattcgtgctttgattttaggtgttccaaagcttaagagatcagagcttgaagtagcttgtgaagatttcagcaacgtaataggttcttcaccagttggtacactatacaaagggacattgtccaatggagttgaaatagctgtagcctctcttacagagacatcttccaaggaatggtcagaaaaattacaagtccagttttgcaagaaggtattggaccagaaaaaaaaaacctctattggatagcttcggtttattcagtatcacagcctctaattgttttacaaccatcttttcagattgatatattatcaaaggtgaaccacatgaactttgtcaaccttattgggttttgtcaggaagaggaacctttcactagaatgatggtttttgagtatgcgccaaatggaacactctttgagcacctacacagtgagtgcctatctagcttattagttttaagtactagatataaagtacttttgatcacttttattccaaatctgtaagactaacgtagtaatggtctcaagatttgtatgctgagtgttctactttctactgatattccatgaaattctaatgctggtgaaatttgattttgcagtaagagaagctgagcaccttgactggggaatgcgtttaagaattgcaatgggcatgatttactgcctggatcatgttcaccaactggaaccacctacagcgcataacaatttgaattcctcggctgttcgtctcacagaagactacgctgcaaaaattgccgaattcagtttctggaatgagattgctgtagctccaacagaatttccccccgagatgaagaagcatccaaatacaactatgtcagtcagcccagaaagtaatgtctacaactttggagttattctgtttgaaatggtcacaggtaggcttccttactcagtggacaatggctcacttgaagactgggcatcagactatcttaaaggagatcaacccttgaaagaaatggtcgatccgactttaagttcattccaagaagaacaattggagcaaattgggcaagtcattaagtcttgtgttgattctgacccgaatcaaagacctacaatgagagatgttgctatgaggctgagagatataactggaataacacctgatggagcttcacctagactctcacctctttggtgggcagagcttgagcttatgtccacagatgcactctaaaaattgtaacttagaaaaatgtaagtactaaaaaaatgttcttcagtcttagttttggcaatgcttgtgcttatagcagttagagaatcttttacttgtacatagatggaataggagggaaacatgggaaattcttcttcccttttccccacttttaaattttcctccgcttggtttcgaaatcaatgtgacaaatacacaacaaaaagttcttctacttcatttttgagaatttctctagtgccacctctcttttctcttcctttctctagtgatacctcttgtttgttcctatcacaagacatttgcagcagcagtcaagaaaaagaagggaagcaattcaaccatctttttctttttcatttggattagatatctgaatgaaaatgattagcccagatgagaaaagggtggcaacaaaaattcattttctcctgcaatttggtataaacaaactgtaaattagaggtcagacccgcttatattatcgctggggaaaaccgaatacaaagctgacaatgcacaagcgagaactcccacttcacaatgcgccactttgtttgaaccttgagacttaaattaaagctcaaaccaacataagttgttcaaattaagta

SEQ ID NO: 15191 - DNA, 6695 bp, Cannabis sativa
  modified_base (5000)..(5002): a, c, t, g, unknown or other
caacacaaatgggctcccattgcaacagcctacgccgccttatcacaatcccaacacgcagcaacctatgccgcctgatcactatccctccatggatgggcccctatcgcagcagccccccatgcctaaagtttcgatcgacccagaccccagacctcgacctagtcctgtcccggacaatgcaaaagatgcttgtccaaaacgcgagcatacaactcaggacgtactaggtaatgttatatataagtatttaaagagcttctgtaatgaataatgagtaactaatattaagttcctctctactactgtactaaacgcagatcatcctgagccacaagcttcaaagaaagctcgagatatgtttttgggttttaatataagggaaaagctcatggagttctctgaaatgaacattctcaagagaaaagctttctttgtaattcttcaacttatttatttttacttgaatatattattttaaggtggaatacttttagatttcttgttccacttagcatattctttttttcatttttaacgagtcccttggtgatgatattttatctgattctttttcctcttaattttgaatttacaggaaattagtctttatatggtggagaatgatgatggtgtaaagaaatttttcaatcgtatggatgttagcagcagaggaatgattaacatggatgaactaatagccgcattcaaaatttcacttccatgtccatctgttgatcttctaatgaaaattgtaagcatacgataatttacataatatttcgatgttgagttctatctcaaaataaattagcgataagatgtattaagttttcacatatggcactctctaacaaaaagtactagctcactatacatagaattgaatttacagggtgatttagatgaggatggatatttgaactatctagaatttgtgagcatacttgttaaggtaagaatgataggcaatgaaaaccggcacattcgtgcagcctttgaagttttcgacgaaaaccaaagtggatatatagaaatggacgatctacgacattgcttcgcttatgatagtgatgatgaagaaaacattgaagaagttgttgaagaaaacattgaagaagttgttgaagccattatggaagatgtggacattgataaggtatgataagagaccatccttgtttttattccaaatagtttattgctcttatttactcaatttcttttcatgaacttgtaggatggaaaaataagttatgatgagtttgctgcaatgatgaaatctggtacaccaaaagcacagaggcagtaaccccaaaatcagttcaacactctcagtttaatatactgaaagatatgatagagtaattttcttttgttattgttttgaaatgcttctcagttgattttctagtttaagacatcattatgcttttcttttctgaaaagggttgcacaaaatattgtttgttattgagtgtttgctatgtttcattgtcttctgtcactctttctcctagtattaatttattgatatctataaagataggtgatttagttagctatgaactgttaggtatagagtttttttcttagtgctattagtgttattgggagcaaagaatagaagaatgaaagtagagtaaaagaaaaggtgggtcagtggctcatctacaagctctgctacaatcagctttctttgagagtctacaaagtgccttgttggcttgaactgttcttaaataccaaatttaacatatatagattagcataaataaatgtttattctaaaaaaactcatgacaccttattaatatattatcattattaatgttacttgtataaatttattgatagtcacttgacttgttggtttggtataggataacatgagagacacagataatagcagttaacattacttgactaacacattcaaaaaggtgtaaatcatgtaaaaagaaggtcctccacattccctcttcaattatggtgaaatttctctaagctcttctctgtgaagaatacctcctcacccttcgtccattttctcttcgatggaggaagaacttctttttcgagtgttcggtctagcttgcttaggtcgtgtaaccaacgtccatttcctttagagagaatactactgtagacagcagttgtgatcatcagagaccaatctgaaaaattcaaatcaagcccacttcaatgcagttgtacagtaattttattgaagaacattgtcccacataaattaaatgtaaaagtatggccatatataagaacatgagctactcttctcatcaccaattaaaatgagctactcttctcatcaccaattaattttgagatgaaactccataaatctcaacaaattttgaaacagctattaattcattgagtcaattccacaaaaacaaccacaattaaaggactcattactcaatttaaagtgtttggatatcattaaaaaaaaatcttttgtgagtaaattaaaaattatgtaaattattttaatttttaagataacttctcaaaagtcattttgggagaatctacaaatcctaacttcttctagaaggacttttaaattaaaaaatgactttttattttttatccaaacacccgtagaaggatttttttttttaattctaaaagctgaaataagagcttatagaagctaagccaatcagagccattgtcaattctgattcaatacattccatcagttacataccaaaaccaaaccaagttaaccaaaagaacacatttggttttgtgtaatagaatggtaatgataatgtaatgtaataagaatggtaagagaaattgattacattgtttggtttgtagttggaatgaatgtaattagaattattgtgtttagtttagtatgataatgtaatggaataaaatttgtattgaacaaaataaccatattacttttatttaataattataaaatattcaaaaaaaaaaaaagaagataatatagacctttaactttgtttagtatatttttattaaaattatttcttttatttgtaatggaatgtaattataatgggattatattagttttggtatgtaattatcattataatactcaccgtaataattattacagacatattcattaccattacattactattacaatgaaccaaacatcgccttaattaattaggatttaacatgataaataattaaatacataaaaatgttgacttctcatgagcttcatcatcaactttatcttttctgagtttaataaatgaagatctataacaaataaattgattatttcaaaaaaaaattaattccacctttggtatgagatttagatttgatggaaataaaaatgtaaaatttaaattaaatttgaataataaatatttgtgtttcaaggtagatttcactttttaaattaaaatagtagtaatatcaatcccctccaacacataagttttatattccctctaagtctactctctctaactctattctctccaactcgcacttacattacatatacttcattaggtatcatttcgtaaaagaaataaaaacataactataataaaaatacattctaatactttaaaataaaactaaacaataaaataaaaaaaaatgacatgtagctcaaacaatatacttaatcaatctcatcacatctatcataacagtgcagcatacatataaattattttgggattgagtaaaaatcaatacccttcaaatcttggaagatattggatgcaaaaagctgccctatttcttctatttgggactgaaattattagtatagcatcgattggttttcattgaaatttagggaagtgagattcttgagcattagcggcaacctttaagattattaggcgctaatagtcattttataggtaatctttctatctcttttctcccttttttttttcacaaagtaaaatagtctttctaattctatcgatcaattagggtttaatatggcaaatacacagagattattgctggaaatcgatggaaatgggggaatcacaacaagcgaggtttgctgaaaacgttggcgggaaagtgaagcgggccctaaaaattttaagtttagggatatgtcagaatcttcagcattagtgacgactttaaattgaatgtgtcgtccctaatagtcccttatatacatgaaatccacttcatcttcttcatttgggtcacccgtgtttatcccccaaatcatcatctatcccaacttcccaaacccagaaaatcattccccatatataccctaatctttgattttcctcattgaatccccattctcacccatgttagggccgcccgcctctctccgcctatcaccgaggtaatcattctaccttttttctttgttcttccgtaaagtaaaattgatcaatttctggatataatcaaattttgatttgttattatatttgtgttatttttggatgaatatttggacagtccctctctctccagtctcgacactctcgacagttcatcttcgtctccctcggcgaaggtaagtaaatatgtgttagaattaatttggaattaattaggggattacatattagattggtgattgtgttaattcttttgtgtttatttatataaaaattgggtgtgtttaaaattaatttatgtttgtgatatattagtgattacaacattctcattgttattacagttataaatttttgtgatatattaagttttatatttcattcatttttatgtgcctggttaatgggtgataaagataaatgaagttctactttattattattaataaataaaataattaaggtttttttcttttatactttataacaattttttttttatgtatttttacggaattttacataaaattctataaactaacatagtaacttaaatcgcaactaaaatctacataacaactcatataaaaactatcggagtaactagcggagtaatttaaaccgtaaatttaaaaaaannnttaaaaaaaatagtatatggaataattttttaataattaatacgattttaagtaattaaagttattatgaaatactttgaatcataattaattgtaatacttcaattaatagaaaaataagtttcaaaaagaaaattaatagaaaaataatattatttttgaaaggaaaagtaatattattaattcatatcattggtaaaatactaataactaacaaggcttaagtaatttgttcaaaaaaacaaggcttaagtaatgaagatgaaaataaattctctcaaaaaaaaaaaattaatgaagataaatttatatttaattttaaataatcaaataaataaaaagatcaataaatttaatcataaatataaaaaagtgttaatattataaaatcacaaattagttcatttaaaaattgtaattattattttttaaattgaataaaatatgttagttacttcgttataaaattttcatcactatgggagggatattgttaccaattgttaccaattttcgttataagaaacgaaaggcatattgttaccaattgggagggagggggacatgtggggctgtaatataaattttggagtattttatattttgatcccataaaaataaaaaataaaaaagatatttgtgtttttaaatatttttatatttgtccccataaaaattatattttttatttttatcttacatatttttgtttgtagtatgaaatttatattttttatttttattctcaaacggttattattatatagtgataatatttttttttcattattttcatcatgtgcttttgaccagttcggagaagctgagttagtggtgcatattcactattcagtggcattatgtcagtgtaaatgattcaacataaatctaaataagaagaaaaaaattgttaaaaataactaatatatctgtcaacagtgaatgatataaagatgagttgtgcatactttccaactaaacaaaacaaggtttctatcttaataaatttttagaggttcagattggaaagtagttcaagttaacaatttttttcactaatagacttaagtttgattgatgatgatgatagtgactaatttttgtaatgaacattatatgttagtattactttatgatgattttaaagtagaatgtttctaactatatacccctatatgtattgagtagtaataaatatgtttcttacttgctaacaaatttggcattcttagtatcaaatacctacagatgttgaaagctactacagtgaagatggtactagcgatcaggacccaactgatcctactcaacaatcacctgaggaaatacaaagattgaaggaactggtaattaaattgcaaaagcaaatagatctaattcaaatgcatgtggagaagaattcaactaggccatctcaacctcatgtcagcatgcatggaccctatcactatcccaacatgtatgggcccccattgcagcagcctccaccaccctatcactatccctacacgtatgagcccccatcacagcagcctgctctgtcgccttatcactatccctacacatatgagcccccgttgcagcagcctacgccgccctatcactatcccaacacatttaggcctccattgcagcagcctacaccgccctatcaccatcccaacacatttgggcctctattgcagcagcctac

SEQ ID NO: 15192 - DNA, 13106 bp, Cannabis sativa
  modified_base (2800)..(2821): a, c, t, g, unknown or other
agataaaatcaagcacactttgatattgattgaaatgtatttctcagctcaattaaagagagctgctattcattatatttatagcagagtattacatacagtaaaggaccgttggtcagggtacagctgtcagccaaatacaaaaaggaataaggaatattctgacaatacaaaggacactaatgattgcagaatcaataaaaataatgacgccataacagaaagttgttatacggatgctgatatggaaatgatactgctgactatgcacaaatcctatttctcaacaagtttccaaatccaaaaatctcaatagttcagaaaaaaaaaatttaatactcaggaaaatttcaaaaattacaatttgattcatgtcaaagtttagtaagcaaaaatttaattaatttttttttctttttttttttcaatttccacctcgtcattgactgtataaacacttactccaaatctatttcagtaaactaatggtattatataatgaagtaagtaagctaaccttttgatgttttaattattattaattacaaaaaggttgttagttggttagcttttgatgtatagttggtatttcattattaataaacatgagtgattagacagaccaattgggttgttttgtttgttttgtacttagttacatagatttcacaaataaattagaccttggagaccttgattggatgatcacatgttacattactcactttaacaaattaataataacctttttcttggaaaagcaacaccactaactatcaatatggtctgtcgtagcactactcttcaatattctaacacacattgattctccattatacaatccatgtccatcaactttaaaaaatatatatgagaaataccattttgaattttgtgttttataaaaattatatatgataaaatagatcttatattttccaaaatggtaaaaatagaacttgagcttaattttcaacaattgtatttttttaatataatcaattttaaaacaatttctaacatgaatagatacagaaaatgtaaccaattttgtcgtaacatctcttgatcggattatattaaattttattttgataaaatttttagaaaatacagaatctattttgtaatttaacaaacaaagagtccaattagtaacttttacaaaacacaagatctaaaatagtatttacccaaatatatatatatataaatatatatttatagtgattattttaatattaatatttataagtattttagtatttttggtacataaataattaaggtgtatttttttaaaaaaaaaaattaaagattcaaacaatttgttatacttaatgaatgtaatagagtgtttgaatctaatttttaattttccaatttctaaaaaaaattgaaaatttataagaaatttcatgtaactatattttagtagttggtaagaatattaactatatattattatttttggaagagagagactgtgtgtgtgtatttaaagagatctagagtgtgagtagtagtagtgagcttaggtatagctttgataattaagagagaaaattaaaaataattaacagaatcaaagatggaaattaacattattgcaaaaaaaatgttactaatattattgttggtgttgttattggtatgttctctaagcgttaatgtgttatttattttgaagagagttgaattaaatgaggttagttggagtagaaaagctgcaaaggaagctgaagtagtggcaagcatatcttgttctggccatggaagagcctacattgatagcaccattgttaatgttaaccaacaacaacaacaacaacaacaacaacaacaacaacaattaggaggacctgtttgtgagtgcaattcttgctacgggggcccttattgttctcaacttctaccttcttgccctgcagatgccgatcggtgacaattttctccttttctctatacatattaagaaaaattatttatcgcttttagttatgtttcgaagttggattttggtgactaatatatgtttatgtattgttcatgtacattgtaattaatatagtatattgtttatgtaattgtagtggagatccatatttcttagagccattttggatggaaaatgcagctatgagtgcaatcttggtgtctggttggcatagaatgagctataccttcaaccattcaagtttcatgtccattcaactcgaaaatctaattcgaaatttgcatgacattgttggaaatgcaatcactaaggaaaaatacattatttttgggtcaggcacaacacaacttatcaatgctgctattcatgctctttcaaatcataattcttcctctccttctaagattgttgcttcaatcccttttttcccggttagtatcctccatttttctataaatatatttttttaatacatggtagttaataaaggtattttgatactttcgataaataaataagttgcaattttattcagataattacataaaacattattttttgttaaaatttcatatttttacgtttaaagattttttattttttttttcacttttttacggtattttataaaaataatatgaaaataacaataaaactacgtaaaagtaacaggaaaataacatcaaaacaacaaaaaaaatatatatatacagataataaaaaattaataacaaattatcaagaatacaacataaaaatatattaaaatataatattttctgtaaataaaatcataaaaaattgttaaaatatttaaaatttcgtacaatcgtatttttatannnnnnnnnnnnnnnnnnnnnnatttgtgaaataatttttttttttgcatgataatatataatgtagctacacagaatctcctacaaatttttaagaaattacaactaatttatttaggatgttaaaatcatggtttacaataaatatgtatttaattagttgtttattcggcatcataaattatttagaacattttaaatttttttggaaagatcttttgcatctatgtaacaaaaatactaaaaatactcgtagatggtgattaaaaataattactacccaataattctttgttaataaaatgtatcatttaatattttatttaatggttatgaattatgcaaatttaactatcatgttataccttttttttagagagaaaactatcatgtagtttttttaaaaagaaaaaaaaaaaagtactaaactacttttcttatgattttgaatactaaaactacattgaaaaatttttggtaaactattatttttggtaaattttttatatttttacgttgtaaagatttttttttttttttacatttttacagtggtcataaaaataacactaaaacaacaaaaaaaaatcatataaaaataacaagaaaataacgtccaaataaaattaaaacaacataagaaaacaatatacaaataacaagataacataaaagtacatcaaaaaaccgaatttatataaataaaatcttaaaaattaaataaatatttaaaattccatactacaatatttttataatatttttgtgtgtgtgtgtgttttttttttttgaaataattccaattatatacaatagattcttgaacaaatagtaaatgagagcatttagatatgtgacctaaaattgtccaataaaaaattttattattatcattattattagtagtagtaatagtatcctttatccttaaggatattataaatatgaaaagctttagttttggtttggaattttggcagctttacaagcaacaaacagagttttttcaagaggtggattacacatttgaaggtgatgcatcattgtggatgaacaagatgaacaactactctaataataatattaccaatctaattgaaatggtaacctcaccaaacaatcctgatggacaactcaaatgtgctcgttttcaacacccaaatgctaaagccatatatgatcgagtctattattggccacattacactacaatttcaactactccagctgatgatgatatcatgcttttttcactttcgaaactaactggccatggaggcagtagatttgggtaaaccaatcttcatttagcatttgatgagttgtattgtagcatttcatactaatacaacattcatgtgcattgtgtagatgggcagtggtgaaggacaagactgtgtttgaaaaaatggataaatacttatctataaacaccatgggagtttcacatgagtctcaactaagagctttgaagcttatgaaggtagttatagaaggaaaagaaggggagacattgtttgattttggatataaaacgttgagctatcgctgggaaaagttgagtgaagtcatatcagtctcgaaacgcttttccttgcaagaaattgagccagaatactgtaatttctttcacaaaattagaggaccttcaccaggtaagatgcaacactttcactatgcaatgaaatctcttttggtcattttaggacttttatttaaaatggttcaatcctacacatcatatataaatatgagaaatcttattatgtgcgttttttcatgtcaaaactttgaaaagttgcgaggatattcctcatcaaaatgttattaaagtactctttaagatcaaaaaaatgttattcaagtactcattttccataccattctttctcgtacttctacatgttatataacccaacctaagaacatttttatgtgaatttgaatgcgctctacatgctaattaaagttatattgttctatttttgacctttcattctgtcctgttcatttttcgagacgtccatttggtagagcccatgtggccatagtcccactgtacaacataattaataattagtacaaaaagaatccatatatcttacttttgtaagatcgtaattagtacggagttttcttatagtcatgatgtttgtacgaaatttttttaatcgtatatttgtcagtttgtcgtattcttagaactgcctttttttttgtctgtttttaggaagtctctaggcagtttcctactttgtatctaatcccttgtaaatagctatatatagagccatccatttcattgtcaaaattagtattctataaataaaatactagtgttattttctctcaaaatgtttttctaaattttcttgaagagatttttgaagttaatatgaacgaatcacatcatagctctaaactaaatttatgatgaaacattcctaattttcaacctcataagagttcttttgcttgtgtggtgattatagacatcatgtgaattgagagagatgttaaatttcagagcataaatactaacaagtgaactccatggcagcttatgcatggttgaagtgcctgagagaagaagaaaaagactgctatgcagttctcacagcagcaaatataatcggtcgtagaggtagcaattacggtgctgaagaccggtacgtacgacttagcctcatacggacccaagatgattttgaccaattactccaccgattaaagattttaatctcagaagaaaacactgccaaatctatttgattcttctctttatcttaaaagaagacactgtggaatatcacaacactactagtataacaatcaggagaagaaaacaaagtcatgtacttaatcaaccactttagcattttcacattcaaaatctgtcattgttaggtggaccaagaatcttggtcacagttgaacttgtattcatcatccaagtcttttagaatattggaaaataaattgttaatcatgtttgctgttcatatttgtcaagatttgaaagcaaaatgctaaccagtaaatagccaatgttagattgaagagtgcaaggtccttatggaacaagttagacgaattatgaaaattacagcagtttaatatcaaacaaggcactcttgtatatttcaataatttatctcacatcatttgcattcatatgatccttgtgattgagttaagagaaatgctaaagggcaacttaaggtgccaagaactacaagaaaccgctaactactcataacgtaccacatcagtttaatgctcttgagttaaaggtaattaggatcaatgacattaactatcagactagaatctatctcaactaggttgtgaattgtagctacaatggagccaaatatctttagtcttgagacaatagacaattttttacaataaattattctcttcaaataaacataaaatatacaattaatgttagtataaattagaacactcagagtgcaacaggcctttttggccctaagtgtctctgttttgaaaggttgtatttaattctcctctgaaacaacaaacaaaggaatcctaacactagaatcaaaatggcatacgcttcaaagtgggcacctcgaaataaattctcaaactcgtacctgttcaacctaccacagttacattcacatacactacgaagtagattcctgttcggggtaacttctggatccagaacaaaatcaactgtcatggcagcttcttctaaccaaatatttgtcgtctttgatttgtacccaggcacgctggccataactgcattgtaatataaaagtaattgtatttttttcagttgtacctaaaacaaaccgcacaaaccttattgggtttactatttaactatagcagcataaagaaatattaacagcagaataatgtatgcaaaacagtttagcagtactagctatgaacgcaaatcccctgtccgagtaatctagactacaacagaccacaaggaaaccccctcaccctgattcacctcccctggaggatcttaaggggttaaaatggctctaaggacttgatattcaatatatggagccgctgttcgttcatgtatagctgttgtgggacgtagtgttagctactaacttgtattactctagattattcagccagttgataatttctgtatatcttcgaatgcttcgaatttttaagtatcaacattattcctaacaagctctccattggaattaagaaaaataaataaaagatcgtttttaaaagaatcattatagatattttcagaggaaagacaatgccttcttttctttttcttgttttgcttcatcataatcttctatattgagcaccataaaatcacattgatacatcaaatagtagagcagtgctacgaggggtaggtggtccttagcaccatacgccaatacaaggtaaggttcacagaatgagctatcacatgtgaccatttattttagtgtcatgctgaacctgaacactatttgtgcctcttagcattattacaaatcatatatagactttcgcaattcaaagtcctctataggaattttatgcagctaaagaatattaattcaattaatataggtttaattagtacaagtacctttgtacttcccgccaggggtaagcaatcgatggaaatcagcaaatactctatttgttttaacctgccaaacgtgacaagtcaagtacatgtcatggaaagaagtaacaaatcaatttcatcagtcaagtacatgtaggaaggtttaatcagataaaaaaagtcaaatgatattgtaagttgtataacaattgatccctagaatcaactgtgacagtcatttagaacattgaactaggtccttaacgggaaattaaaacccaatgtaagccaacaccagagaatgtgttaaaacataaaaatcagagttggatcaactttgtatagtttaagcttaaaaaaagttggtaataaaaagcatgcataaatcaacatttatcagcaacaccacaaaagcacactgaaaaaggaaaacaatagagtagcggcaaaagtagatgatttcaaatataccgtgtgatttactccctcaatggtaatagagccaggtaatggcctcccactatctgatgaaacaatccttccatgtactcctgactaaaagaatttgagacatgaaaacaacatttcacacttgattttacaaagtagaagcatataaatactatacctagtaacctgagaaagaaaatcttaagactaaattgcttaaataatgtaaattaacttggactagcttgagaaacaaagagttcaatgagacaaatttatagccaccactaatacctgtacaaggctcaaaacaagattgagcatactcagtttgttgtatttccaaagggtagcaagctgcataatggcacacaattaagaaataacaatgttaaaggtaacgataaaaattaaagagcataaagcagaaagaggaagagagaagcatacgtgccatcaatataatgattactcactaccaaggccaatctaagtactcacacaatattgcaattttaggactcgtagtaatgagaatagagggaaaaaagacatatccattacacaaaacatgatttaagaatatattaacctcatgagcaggaggccatttgttgtcactaatctctagagtcaattcaaaacagtccccatgtatgtagttccagtcttgcatacctccataaatagggtacctgtagaaatgtttactgtcaaacaattgctgacaagaaattatacataaagaaaaaaaaagagttaaagaggatatagcctgtaactcttttcttatccaaaagaaaaaaaaaacggcaaccctaccaatatgcaccatttgtgattccacctggaaattcattgctcaaggacatgttatagtgagagcgactgtacacactcgccaagaaccgaaatgtttcatcatcaggacaggcataataaactcgtctgaaagtaattcacagaaagccaagcataagacaatatagagaagtcattaggatacgaaatagtacattttgagaagagaccaaattatacgttttaaagagaagtccgaacccatgaacattttctggtatgagaatcagaaagacattaaaaagaaaatcctttataaatggtcataaaaacattaaacataataagaccagcaggagataaacggtgcaagaaaataaattgcaataattaattaggtaaatcctacccaaaataagtatggagtactcgtacatacaagcaacgaaaaaaaaatgaaaaagtcaacatggtgttcttaccttttatcttgacttccatcccatggataatttgcaacaagtgcaccctgtgaaaaataataataaaatagacatcattctttttctatgcactgtaattttaatcataattcatgttagaaaagataaattccaaaaaatgtttctcaacattgtatttctaatgttggactgttaaatttgacttggaagaataaccatagatgaaggatagaccaatagagaaaaactatatttgaatattaaacatgttcggtttggggaatgaaatggaaagaatcaatttccattttagtcctttatttggtcataatttaagatcttaaaatatcattacaatgaaatgttttttccaccatttttggtggaatagctactactccaaaaaatgagaggaaccatttcaatgtacaataacttttgttattaaattttatcttttttttttaactcatgttaaatttttattgcgttctcattcctctggtctcattactctcaacgaaacaaaacctaagagaaactattattaaactttttcatctactaactggtaatgaaagaaaaaattatttcttttacaaagatgatgaaatgaaataacacactaccccatgcaagctggcagaagctgtaaaatgaatctggtttgaccactccattattgctcttgtttcaggttctcttgcaaatgcatcatcatcgttgaaaaactgtcatttcatgccaacgtctttcattaatagaaatatatatatatacatatatatatatatatgtattgggatgatggcttgtaaattttagactcaataacaaatcaatagcctaaaacaatgtatttaggcatgtctactaatccataatgaaaaggactgtgaaggtaaataatttggagagcaatattaacaattgacttaaccctttcccagttgttccttttagattaaaaaaaaatacatataataaaaaaagtgttaacggtgacactaaaactaatacctggtctggaaagtttcgatttaaatcaacattattcccattaccacgccgacgtagggaaaatccatcgggattcattgacggaagtatatgaagatgagtacgttcaacaatcaaagtagcctgtagaaacaatggaccaagtaagactgtgatactaaagctcattcaaaaataactagtgtctattaaaaattagaaaaataactataaaacaaagatccccgttgagtaatttctatcaatataataatgaaaaaatatagttattagaggaatcaggaaggtgaaccaaaatagatcaatatttaaagcaatgaaaaacaacatatgtagatcacaagacaaaaaaaatagttcaaaattatgtgacaagtgaaaatataaattctggaactttttccccctcactttatcagtagacaaactttcgtaaaacaactaatctggtaactgagactcaactcagggagtgatgcaagaacaaaaaactaagacaaaaaatcttcaatcaattatagtgcaaaaaaggttgtctaatttatgctgaagccaatttcctgaattaaaaagaaaaaaggagagatacttgatatctaaagcatcatttatttactaaagaagcagttagacaacataaaaaactaaagaagagtaccgatggatctttcaaatagttatcacaaatccagttggcaagtaacattagcagctcacgccctacgggttcatctccatgcacgtttccaatgtactgcaacagcaaaaaaaatcactaaaaagttgttggaaaagaactaagagtttctccaacaagaactacaaaattctttctcttttacttttcctcttctagtaaaaagtaaaattgaacagaattatcaaaatcccaattaactaaattatgttggcacccatctaaaacaaatatattataatcacaaatgaagaaataattcatagtttgaagaagaagaaaacagctaggcgaagacgactcagactcagattcagtttcaccatccaaatttggaacttataacattttaatctttgcttgtttaaatagaatatcattcaccttaaatgcaggttcagcctcatcttctccaggcttgtcagaaatttctatgacccactacaggaaataacaaacaatactctcactgtttaagataatgctaacttacattcaaacaaactaaggcaataaaatagtaatagtaatatcaaaaaaataaataaataaaaaaggaactaacttcagtgaaacgattaccagtggtaccccattcacactcttcccaatactgataatcagagaaaaggcaaaaaataaaatattatcagtaccattgtcctgaaaagcccctatcttaatatcaaacaaccacattgcttgtttcttcatacataccatcaatatgccatctataaagaaaaagaaaacaataatctaatacaaaatcaattcatggattacctgtaaattctagatatgttgctacatcttttcccaaacgccttaattgcaacctcaagctcagaattagtcatgtacccttcagctacatcaacactatcaaaccaatttaaagcaataaattcaatataagataattcacaatgaagtttttgtttgtttgtttatttatttcttttcaataaataccttttattaatctgttttttctcaaataaacgccttgcatggccattataagtggtatttccaaaaatttctgtaatcaaacaaaacatcaaaattaattgtaatccggcatagaattctaaaacatataagtaattcttcgaattttttgtattatgatcaggagatgtagaataacaagctcttctggataagtacgataaagaatattctcagctaaaaagaatttgagtgattatcaaatcaagacaagtgaatgaagaaagagaagcttaccgggaggagaaaatgagtcgtagctttgaaggccgcctctggcgaaagcatagtgaagaaaagagcagaaactgagagaaagagatattgataatgtagagagatgaagctccatggtatgggatcatgggagggagcttcagggatcagattggaattgattaaagaagaaaaaggaagaagaagatgaagatcacagttcagatctcatctcttgtgatttcaagcccaacccgaactgaccacaattgggttgggctgaacaaccaagccctaaacactataaatacccaaaaacaacatcgaatcaaaaaagaaatgtaataagttgagaaatacctcttttcgttttttattattaaaaaatattctcattttatattttattaaaatgtacttatttttgtgagtaggttatccaatatacatttgccctccacttaagtctaacacataatttttattaacttaaggggtataatgaagacatcatttataaaagtaggtatatcttaaaaaatataaaaataaaggtaaaatttaaaatatgtaaagtaaagtaggtaaacaatgtaatttatctttttatataatttttcttgttgtttatcgagattttcgaaaattaataataaaataaataaactttgtaaaagaaataaattaaagacaataagaccaagatttttgtatggttcgaatattaataaacactagttcacgagtcaattgtattgagttaaaaaaactttgaagtatttcgtaaaagtatttttgctctagaagatgaaccctagaaaatctctctaaacccctttgcatgaaagggtaacattctatttacaggtgagattcgagtatgggcaaattcgaacctggtagggtttatatgtatcatctaggcctactaatggggcaatataaaatatatgttgactttgggccacttgagtgaggtcgtattcacgatgtgaagattgttcgtacaagtgtggaccgtttgaggatgtcaggtgtcgtgcgtagc

SEQ ID NO: 15193 - DNA, 6265 bp, Cannabis sativa
  modified_base (111)..(114): a, c, t, g, unknown or other
ccccacggctctggcgctgaacccgacctccgaccacacatctagacccgacttaaataaaatcataaaataaaaatgaaaataagctttacaaaacacacttttattttnnnnttttaaaattgaaaaataaaagtattttttaaaaacaaatattttaattttgttttgtgattaaaaaattgccaaactaaacctttatttagctaatagaattattgttgaacttttgtcaaatgatacttccatctgcacaccacagaaattaaatagaaactatcaaataatttagaaatggactaaggttttcggacagtaactaacgacagacagttctagtacaaccgaaatctaaactttacgtacaaattaattacaacttttcttatttactttttagtccctaatttgttgttatttagaagatgacccatacaacaaagctagctagctcagtaaatttattattatttttttctttttcctttgttctgtactcaactatctgatttgagccccatagatcttttcttggggatttcggctgaaaatggaggaatttggggttttgatactcaaaatctagggtttcagttagggcattggtctgggacgtagggcatactggttttttagttaatatattcataattttgctgagctcgataagaggagatgaagcagttggtagggagaccaggttctgggagtggcttagtactccgattagggcaagttatttgtgctgctgcttccatcggaatcatggtctctgctaatggcttcgctacttttactgctttttggtacttttctaatattatttaattattttaatttgtttgaatttatatggttcggggaaattatcttcttgggagtttcggttttttctattatgcatgtcagtttggatggaaaattaaattaattggatatgtacgcgttgtgggttaatcttctattctaactgaattgtagttatattcatggttgatttcaaacgtgttcatacaccaatgtgttctattctaaggtgtaatgctgaaacattaggacacacaatcatagttatagttgcgaaaagtattttagtttaattgaaatgtattacaatttgttttcactgattcttactctatacatgttcctagacgtctttttagtcaggatactgatgttttgagaattgacagtgaagacccaaaattttaagcatttgtattatctcatcgaagtcagttttatgcttttggactcttattttggagagttgaaagtatacaagcagcttttttcaaccttcttttcaaataagtttatgatttgagttaattcaggctgtagatttttttttccttgtcatgatggcgctgttaacttgatatgtgaaaaggtgtaagctaaatcattataattgtactttggcacatgcactaccttgattgttatgggcgagattttgataatttatataatttcaggactagaaatacagatatcaaaatcaattgctcttatatggtctattctgttggtttgaaatctttattggatttttatcatttatttatttttcatgatggatttctgctactcagattcaggttcaaattgctaactaaactgctcaaagttgaaaaaaattctcatagaaatgttaaacaatgttctattgtgtatcccctctaactagactaccaagagcttctatgtttattcttgtactcaatttttttcgtccttgaattcagctatttgattgcatcaatgggacttcaagtcctgtggagcttaggactggcatgtcttgatgtttatgctttgaggagaaagagggacctccaaaatccaatcctagtcagcctgtttgttgttggagattgggtatcttactcatttcttatatgtcatagcatttctttgccacaaagaaatctctaatcattatcatgtggatcatatgcctaatttttgtcttaaatttgagagatgattttgactaatctgttaaatcctgctggactttttatgttgacatttgctatctctattgtcacaactttaaaatgttgtggtccttgttttcttccattatcagcatctcagtgatcattcttaaaaagctggcattcatatcctcacagtagatcagacaacaattatataatcattagtgtgaatcaaatactggcatttcattttgtttccccctcttagatggataaattgaaactagcttcctcctcattggtctttgtgttattgttgatgtgccactttttcattggctggttaatgagccttaacacataataagaaggataattctggctttcacatatggtgcaggttacagctacattatcactggcagctgcaagctcttcagcagggattgtagttctatatgcgaaagacatgaatttctgcacagctcaatttcatctcccatgcagcaactttcagatttcagttgccttggctttcctcacatgggctcttattgccttatcatctcatgtgatgttttggatcttattaacttcagtttgaaagactgttgcgtacctgcctcattatcaagacaagtgctacagttctatagcaagcaattactggcttcaacagtctttggggatctctctcattcagttgcatcatctttgtgtgtgagcgcaaccttgtccacgatcaacctgcgctgcaccctcgtttcatagggctccatccatttattattaatctcaagtttggagctgatctatcaaaatgaggcacatttggattcaagttttacttgctgtagattctaaattttacattgttatatacttgtgatgaacaaagacggtaatgaaacaaaattttgtgtaactctcccatatgtttgcagaagttgtattatctcttgaaatgatgtgtaagcgtcatgcaaatgaaatgacattgatactttgtcaaactctcacttaggggtggcgaaattgattttgacatgacacacgaacacgacacgaattgtacgggttagggttaggaaaattagatgtaggttaaaaataggtcgacacgacttgacacgaaatagaaacgggtcaaatacgatacgattcgcttaactcgaatttgatacgatttttttaaaataaaataaaagaaataattattaagaacaatataattatatatatttagtgatttaatgttaaattataaaattttaatttttttttttttttacataaaattgaaaatattttaattttttaatttttattatgtatacataacaagttatatatacataaatgtatataaattttttaataaaatctaaatctactatttttttctacaacttcatctttaataacagaaaaatgggttaaagtagctcaacacgaacacgacacgattttttacggctcgatttaggattgaaaaaattaaagacgagtcaaaaaataagtcgacatgcctgacacgaaatatagaaatgggtcacctaaaatatgagataaacacgatacgatgacacgtcttgtcacccctatctcctctatatcatgaatgcatggttaattattaattagaacaaattctctattctgaaatcgacttatcttattgtagggccgtttggatttgacttgctttaaggtggtagctgtgactttatgatctaacattaatatacaccacattaaagataccctcaattacaaatcagttccaaacattgacataaaaagaattagactaattctgagtggtttctaaaattccatatcattaagtttattagaaattacatttgcatgctattatcttcttctattcaccaataacaaataacataaatacattattctggtcctgtatctaatccatacagtcaaaaagagaaaagggaaactaaaaacgttgttgctacatgaaatccattttgagatgtctataccaaatgtcatcagaatcgtcacataacgatctctggcttcaaaatgcttgatttaatctctttgtgtgggaggacaacacctccattactataaacttcatcagctatatgaacatcttctcctaagattgtcatgttctctatcctagcccacctgccaacagtcgaatgccatccaatgatactgctggaaatgcaagcatgcttcttgattcgaactccacgcattacagtacagtttgagagtctgacacctggctcgatttcgcatcctggaccaatggctacatctggcccaatgaggcatccttctccaatcacagcactctcatccaccaaaacatttcctataatgtgtgatcctctgaccaacttagaggatgattttttccgcaaggagtctaagtatagtcttaaaccagttatgtagtcctttggctgtccaatgtccatccaaaacccaggcaggaccatagcatacagcttcttttctgctgcaatcttagggaagacctctttctcaattgaggttggtttcagctcaatccgatcaagaactgatgggttaagcaagtagattccagcattaatcttgttgcctacaaatatcttcggtttctctacaaacttttcaactttccctgtagttccatccataactaccacaccatacttggatggttcatctacctaagacaaaatggtaatttttcccttcagtaggagtcaatatgctttatgtcaataacttatagcatgtaagttggatttaaattaccttggttaccataatggaagcctctcctccgtgactcttgtggaattcgatcatttcttttaacgggtactcgctaattacatcactgttaaggacaaagaagggctctccagagttatctatcaatttatccctggcaagagccaacggaccagctgtgccaagtggttcagtttcttgtgagcaagtaatcctgatatcgagctttttctcaaaatctttcaaaaaattaagcataacctgaaacaacagtgtaaaaagaatgtatatttatccttcataagcatccataattgtagcagaaaaaactaattctatatctattttgctcattgtacctctggttgataattgatggccagaacaacttcagttactccaatagctttgagagcttcaatcttgttacacaaattcagaaagatgataaatgagtttatgtgtcacaagggaagtgaatacaagcaagcaaacatcagcaattgacccctgcatcacacactcgcatctcatatttataaaaaggagacgacaaagaaaatgtgtctcatatttgtaaattgaatgactccattattataaagacacagacttttcaacataaccgcatataatttggataagaaacaacgttagctaaagatggtccccccctactttgaaagtaactacaacactgccataatctaacaccccccaaccaaaaaaaacgagaggaaaatacataatttaaagtaaaacctgatgcaatatcatgggcttgttggcaaaatcaaccagtggctttggtacactgagagttaatggccgcaaccgggtcccaaaccctccaacaagaatgagtgccttcatggataacagaccaaaaaaacaaaaattctcttttgctgcctgcaatgctgcaaaaagtgaatatccaagttccatccatcacagtcaacctaaagcaaaaccaatttcaaacacttgaaaccataaaaagaaaaagaagaagaaaaatttaacccaacaaaaattaatgaaatatatgataaaatttcaattgcaaccaactctttattgataataaaaacacacacacatacacacattttcctgtcaaatcattttggatttggataactggtcaccttaagaatatgcaactatgattagctacaagaaaaacaatgtaaagaaaaactaattgataatacacactaaatttgatgaataagctggtgaagaaaatggcccaacactcgaatcgatcacaatgacaaatcaatattatggtcgaaattcaatttgctgtaaggacaatgaacagatctgagtaatacacacggggcgaataacaaaaacttacaggcgttaaagcaagaaggtagcttcgattgcagcaaagcaaatctattgaattttgttacagaaaaacaaagcttttgaatgagtctcttttcaagttcagagactcgagacgctctctttatgtaagtcttagttttcgtcaccttcacagtaaaggtttttttttttttttt

SEQ ID NO: 15194 - DNA, 6635 bp, Cannabis sativa
taatgcatcatctgtagtgataggtagtcacaatgtatcatgttcttgatagggtcgaaagcccatagcttaaagagccgtagctgtttagcccaacacgcgtgacacgtgtagtttcgtgggtgaaatttaaaccactgcgactgagactgagagggtttatagcccccacttctagggttttagacgaagtattccaaggttattcacaagtctccggaaccatctttgcctgaagaaatgggattttggggtatgtcttatttctttttctcaatttcaatattcatcaaatttcccatttttaaaattctgtttaatcaatctttcaattttcttgcttcggtttctcagcttccaagcaagtacataaatattacacaatattttataagaagcattatgcttgtatatcttctatattcattgatttatgggttttcctttcaacaggaattgaagttaaaccgggaaagccatacccttatcactcggataatgtaccaggtcggcttcatgtaacccaggtttgattccattccactgttcaatctatgctctcattagaagtctgtaagtttatcaagtattacatggagctttggttttgccattgatatttgggtttgttttatcattttcatttagggattacttatgttagatgttaggagcacatgatttcgggttattaagttggatttctatgctttgaaatgttaaagttatactgagtttggtgtttaaaattgaagcatcttggtatcagatacactctgagttggttcttagatttgtgtgtgtttgattgtgttgtgtggtaaatcaggctactcttggtttgggctccactgcagagaggagtatagttcagtgtgctattggacatagaagtcctatctttctttgctctttattaccgaataaaaatgaatcatgttcattgaatcttgaatttgaggaagaagaattagttgctttctccgtcattggtccacggagtgtacatctctctggctactttgaggctgacgagggtgacaccatcagagatgattatgagtcgtatccttttatgttttctagtgtttgtttttctttcttgaatttctacaaacgttatataactatatgtatttcattacccattattcattattttgtattattaatgctgttgtggaattttgtatatagtttaaatcaatataaattggatatatgattttcaaaagttattatttctcttacatcatattaaagcgattcttttggagaggatatcgctgattcagagactgagtcatctgattttgacaatagtgatgatggtgatgaattcattgatgatgatcttgacatgtttcctgattcacctgttccaaacagtggaggtatgagcatattgacttattgattacatgtattttaaaattttactgacaagagctttaatatctttcttctgataattcatgatgattttctcaactaagaaatcatttggcgataagaaagattacttaagtaggattttttcttttttaatgataataataataagaaagtagtaatgaattgatgctttacctcacaacactaacactattagttattccccaaaaaaaatcagtttttagttgtattatctttatttcatggatgatatattggtaatgactcctttgattttgttttaagttgtaattgaggagattgaggatgatgagaaacctacaagtaaaactgggcaatctaaaccacagaaaaagaaccaatcaaaaggctctgaggacagcaaaaactctcaacaccaagccattgttaaaaaggatagtgttccagttcttgaaagtgaagatgaagatggctttccagtttccaacaaacatggaagcaattcaaatgttcaaaagcctgaactagaggtacagcaatcaaatgaaaaggttgagaaaaccaacaagaaaaagcaagatggagatggtgctactaacttgaagagaaaggtcgaaaatattgaccaggagacccgagcagagaagtgagttgataaaaaaaaacaatttcttcaaatcttctggaaattcttttttttaaaaaaaaaaaattgtttagctataacttatttatgtgaaacatttcattatatttgtataattatcttattacattactttagcgatttagggtgcgatagtttacatattctttttccttatttatttgtttatttccttctggtgttgcagtgcaaacttacagttattgctccttgttaaatgtttggccacttgaattctgatactgaagttgtttttgtaaatgttttaggaaaaagaagaataagaagaataagcagttaaaagaaaaaattggggaggagaattctgatgaaaaggagcacgtggagttgaagagttccaatgtgagtcaggttttaacaaaaatggatgatcaggaaaagctggctaaggaaaagtgagtttggctatgtctaggattctctttctttgtttgtttgtttttcccttttcttttactttgcgatcaatcttgtgtcttgtttattatcacattcccactgtttggatgaacccctaccccaaaagtaagaaataatgttgatgaggggctttaaggtttaaagctttatcttatatccaagtatgaatcaatatgtagtaatttgcataacccgctgatcatttacattgcaaaaagataattgtgttatcaattttgtcctcgctgctactttttatttccattagttaattctatgcaaatgcctgattagctttttcttgcatcaattttcggcgcttgtgctcaggagccttgaaaatgaagagtcaaaaaagaagagaaagaagaacaaaaagaaaagccaggacaatgaaggtgaaactaatgtggatcaaactgtttctgctaaggaaggtcaaaaagtatcaacattggagtcagataagcaaactaaagcaaagtcgtctaaagttagaacatttgccaatggtttggtcgttgaagagctgtcaatgggcaaaccagatggtaagaaagctgctccaggaaaacaagtaagtcttcaagtcactaacatttattctgtgactttccacactgaagaaattatattcaattgtccaattccatgattatgaaatcctaaacaaagaattaggtttctgtagtttttgttctaaggcactttcacccacctctaaacaaaattaaatgaataacatttcaggtcagtgtccactacattggtaagctaaagaagaatggcaaacaattcgacgcaaatgtgggaagagcaccatttaagttccgcctaggtacaactatttttgagcgaaaacttacatataccttcctcactatttgtattaacactcctctcttttggttttacaggtttaggacaagttattaaagggtgggatgttggacttgagggtaacacaatgtcttcttttttttttctttctttaaattgttaaatttatctgtttgtttcttaaaagttctttacatccttacatacattttgccaggcatgcgtgttggggacaagagaagacttactattccacctgagatggggtatgtatgcctaatgtcgagtttataaatttctattagtcgagtttgagcttgtttcttatttgggggcatacatttgttttatttatatatatgtttatgaatttgttggtgtaaacttttttcacgcagttatggacgtaagggagcaggtagtgcaattcctccaaattcgtggcttgtgtttgatgttgagttaaatgatgttcgttaaatctggtgagaggagaccatttcttaacaggctaccaggcttgtaacaattttgctttgttgtgaaaatatattcaaaacttggatttttgaaattctaaaattatatttgtgggagtgagttcaatttaagagcagttgtgacttcagatgagggaaattgcactcaatttttgtttgcataaagaacatacattgacttttgttgagagaaattatttgcttacataatggaacaagccttgattattttgtcgaaatataaggaattgcaacttcaaaagtaaagtattaggacattaacaaagatattgaaacaagttataatttttatgagcaatttgtaacttcggattttttttttccttatttatttgattttataaatagagttttgttgaggatcatagccaagaaaaaggtcacgttgaagtcagtttttatttttccgagttaaagttttattaattcattttatcattattttacaataaacggtgtgcccatcctcccaaaataatataatatttacttttgacaacttttgttataaaacaaataataatatttaaatttaaatattataattaaaacaaataatattttaaatattatttttttttaacattaaatttaaatttaagttgcatcaaatttaaatcaactcataaagtaacataatcataatcaatttaaacataatcgttattttattaattggcagaccctccatatacaacattcacatagctacaatacacatttgtaatggcagaagttcattttgaatgatgatctagagcttgcactatatgtaaaagtacatgtttacgtattctacatcatcatcttcaaaatggatattctatatacactaattgctccaaaaagtactcatctaagaattgtttatgtccttttacacgagcccttgtcaatgtgagatctcttttttcctcgccttgttgagctactcccagctatgaacttgttgaaatatatttcatcagaatcgtcaattaattctgaaattatgatatcatcaagactcatattgtcatacaaatttggagaacttgccaaatccattggtgaactttgagtagatgatgtttggtagaatgtattccatttgggatcatcttttagcaatctccaacagtataccaacataaaatttgaattgttatcatatttatacacttgatgggcattctcaagaatttgctcatcagaccaattattgtaacgtgtttgttgtactcgtttataacacctattgaaatatatcacattttgatttatcttgttccaacggtctctacattgttttccagttcttcgttcctcacctttgtggttggtgttgaagtattctgcgattcgatcccaaaattttgcagaaatttgatcactctccacgattgtatctttagatgtattaagccatccatttattaaaagtatagttgcttccttgctccatttgagtttactttcttggcttggtttctcttcattgtgtagaaccacattttccaacctttcaacacaatttgcaggttgggtcacagatacagatgttgatgatgtttctagattcaaatcaacactagacttttccatacttggcgtataaatttttggagccatttcaggttggtgtggggatggcatataaatgctatatggtggtggatttcctagtgtaaagaatggagcacgttggggtgtttcaaaatagccaaaattttggtaagggaatgagaacatgggataattttgagaattataaaaattttggtagaattgagaatattggaaattttgattttcgggattggtagcataagaattaggaaaattttggttccatggagaatattgaaaatttggatgtggagggttagttggtggaaaatttggatgtggagagttagtaggtggagaatttggattttggggattggtatatgagagattttgagaacttttggaattcatttggtaagaaaaagtaaattaattaagtgttgtagaagaaggtatgaaatggtatgaaaaatagataatactagtaggtattaatagtgaaaaaaaattgacttttttttagaaaaataataaaacagcaacggtacatttccaacggtacattcccaacaacggtacaatgatgatttttttttaacctccaatggtgagtggctcccttcaaggatgccaagtgataagtccacatatcatcaagcaaagttttaagagggaaattgaatggagctataacccaggttctctattaaacccaactcaacagtttagtagttagcctcagtcaatattgacttgagcttattgaacatattaaaactctttcatgacaatctctgaagttaacatcggcatcaagaatataataaggaactatataggacccaaaaaagagaaagatatatgaaaaacaaaaactctgattactattctggcaataagttttcaacagtctcattattcagattatttactactacatttgatgtaacaaaactacatttggccatgtaagatactgagttaagtaaggtctcgttgaaactagatactagtagggttcgacgggtgctctgaattttgctccagcataaattgctgcatgtcctagctcttcttcaatcctaagaagctgttatgccatggcaatgccaaaatatatagaaaggaaacttgttagtgcataatatgttttatcacacttgaagaagaagataattcctaagcacaacaatatgtgtacctggttgtatttagcc

SEQ ID NO: 15195 - DNA, 4801 bp, Cannabis sativa
cagtagctcatcagacattaagtttcatcactactcattccccaaaatggctatcctaaaagtgagaatactactactaagcctaacccttttagctattctggctgcaagtgtgatggctcaaacaccatgtggatcaaagacatgtgcccctggtgaatgttgtagcaaattcgacttctgcggtcgtgggactgagtattgtggtgcaaattgcaaagcaggcccctgcacaacaaatggtgtttcggtggctaacattgtgacacaacaattcctcactcagataaagaacaaggctgctgctccaaactgtcccaaccagaacttctacactcgagaggcttttctcaatgctctaaactcataccctcgtttcgccacaactggctcccttgatgattcaaaacgtgagattgcagccttctttgctcatgtgactcacgagactggctgtaagaaacttcctcttcttcttcttgttctcctttaccttgctacctcatcctttctgtgtaagtgtgtattattgtactgatcaagtcttttactttgtgagcagatttttgcttcaaggaagaaactggaaaccaaaatgaaaagtattgtgatccaagaactgcatgcaaccctaataagagatacaatgggcgtggcccactccaactgacatggaactacaactatttagcagccgggaaagctaacaacttcgacgggataaattcccctgaaacagtggccaatgatcctgtcatttcgtttaaagcagctttgtggttctggatggagaatgttagtcctgttgtaagccaaggctttggagcaaccattcgaaaaatcaatggtgttgttgaatgtgatggtaaagaccgccccaaagttcaagctagggtcgacttgtaccgcaactattgccagcaatttggtgttgatgctagaaataatctcttctgctaggttctttacttgttgaaactgcttaactaaataaaagaaaggcacatagagcttctaaaatatgctatatataagtcagtataatttcttataatattgtattcctctgatcaactactaggagtgatcacttctatctacctaaggaagaaataaagagcagataattctcaccactcacaagttagttctatcatcaggctctttttttttcgaaatagcagtgaagaacagatggatcagtttgtttgaactccctctaaatttagcaattcaacatttccactacagaagagtataataccacttataaaacaagtactcgttcaacaaaactgaataagaaacatacataagtataaaatctaagaggagaaagttcatatttcttttttccttttaataatatgttgtacagccgccatgcatgcaagaacaaaatttaaaacttccatgtcagtagtcatcacctctggaaatgacctctttgcaggttggccggagtaagattgtatgttcaaactgagatacatagctgcctttaacatcgcatagaggaggataaggctgcaaaaacaatggcaaaactcagaaaagctttcacatgcatcaactcccacttagcaaactcaaaacaaaaggagcaaaaagatgttggcaatacctggactataccgacatcgcacaaattttttaacgccataagatatttggtttctcctagacggtctagatatcttttgcagaaagccaatgtggaaaagttcttgttaattgtggcaagtaactgcttcgccctcggcaacctcaggggcatgtggccaacatcaaagtttttcatgtaatggctacactctagatcttctctgacatatcccttccctgagcatgacaaacacattaatataagccagaggggctttttttttttataaaaaagaacagggtgtcgatgtaggaaaaccaaatgaaaggaccttttacctgttgacccaaaagtttcaatagcgaaaaattcaccctcttccatttttgtctgctctccacctttcacgataggaacggattttcctgcatgtatttggtagggtccaatgctatgtccattcaagtttcgaatgcttttaactgccaagattaaccatattcttacttgcaatccacatatacataaggaatgtagattaagaggtgcaaataacgaattcatatgcagtaacaaattagagcaccaaactaatataagaactagaaaagtagaacgagaacgtgttctcctagctaacagttggtacaacttgggatagtatcattagatatcataccttgatgcacctttccattaatttcaacctcataagactccataacctcttggattgcggcaccaatatcacaaagacgaacatcgattccagcctcctgcataatcaatagaaaataaaaagtactgcatattaagttcctgttttcggaaacaaaaaaactacagagcacatgaatcacaactccatacataactactcatgtttaagaaatcaaaatacaaaaagttaccaacaaggacagctaagtaatagaataaagatacagattatccagaaaggtgagagacaataaatatatccaatgtttttaaattaacatactgcaactgttaaaaactatctccaatttttacagtaggtatcatcttgaatttttatatgggctccaataatttacacttgaacctggcatcctatacagtactatgcacgataatataagttgttctcttcaattttcttggcaccatgtaacagtaccttgataccagtataggttgcttcacgcgaggcttcaagcaatggatcaaacattgggttgaacgcaaaagtaaaagcacagtcaacaattaatcctgttaatcaaacaacaacgtgtgtgatacctccagccaagagtaacatatgccacaaagggaaaaaattctaaacaaataaacacactcagcacataaaatattacacacacaaacacactggaaagactaatataaaaaaaaaaaataaataataataaacatgtgcaacacacgcacagctgatattaccatcaacatgagttccgaaatccaatttcatcacatcatcatactgaagtacagtcttatctccagcatttggagtccagtgagcagcaaccctgtcgatgcgagaggcctttgaatatgagatgacaatgcaaataaggctactacgtgaaatatgcataaagcaggaaaaaaaaatcaccaattcaaagagcatcctgttggaaaagcaatgccggcttccaaaccattttcagatattaacttgcggactgtgttttccaatgtctcacatatatcagtcattaacattccaggcttcaaaatgcttttaatgtgtttcctaacctagtcacggtaaagaaaacctacattaaaagtcatttccaggtagatatagtttttcatttcacttaaaaagcaatgcaattatgcaagaatttaattatttatatgaaacccaaaaggcaacctgacgatgaacttcagctgctcgacgaactgaattatacattggtttttgaaggcgctccaactccctcttctcctcagaggtagtcctccataagttactgaaaacaataccaacttcaataaggtgaaagaaaagtacaacaggggtgagagagatgcagataggcctttaatggaaaagcatccccaacagatcatactaaattaaattttaaccaaataaaaaaatcgaccatgaaaagactgaggatttccatgcttcattaaagcctccaaaagaaactacagtatacactgtatataatatgttatgtaaaattgctatagtatagaaatagtgcatactcactcgtccttataattttggatctccccctcaggaaactctcccgagggaaaaaggtcagctacaggaatagatggtggatcagtctgtgcaagcacagatggggcattactctgctctgatggagctttctttttcctatttataagagaagaaaatagaagtttcaaaataaaaactttacatcaaatataatcattaaatcttctctaattaacaaaagactcctcacttgtttttatttttcttctttttcttctttgtagcttctgcaaaagaaatggaaaaacgatattactcaatagaaaggtgaactcacaaatcataaattacattttaacactatatgtcaatgattagatcataatgcaccacagcaacaaaaaaaatgactgttacttgaaaacaatgctctaatattataaaataaaataaaaaatcacctttttcatctttttcatcatcttcatcattttggagtattggaacctgttcagcatgctcatcattggcattttctggctctaaagtcccatttttttcagatgggacatttgggtccaacttttcctctgccatcagaaaaaatacctaaacagaatgcacaacaatcatcaaaggagaaagatcataaactatcacaaaagtctgaaaatagaatggtgtgtaattagtgtgaatgtaagaggttcctcgaaataaaagtgtcaacctttaacaagaaattcgttcaagacgacctaaaactacgaaaaacgaagtacccttcaaaggaaaaaaccccaataccaacttctagggctaaaaggcgaataacatcatatgcgatttctaagttaaatcaattgaataattgagagtgaagcctaagacatttcaaaataaaacgatccttttgacgaaactaaaaaaggtaagagacatgaagggagagagagagagagaga

SEQ ID NO: 15196 - DNA, 3901 bp, Cannabis sativa
  modified_base (3818)..(3847): a, c, t, g, unknown or other
tgtaaagggttttatttagggcacaaaacccaacagatgtaacatttgagcccattgtatagcatgaaaggattgcttttgcttctaccacagcaggaggaacacttccaacaaagggcctggatattcctgctctaacctggttcaactcatccaaaataataacaccaatgctatattttctgttattgagatcaatggctgcatcaatatacatccgaaagttaccctttgaaaaagatgtcgaaatcttagtatgcacaagggcaaaagtagttgattggtttttatgttattgcgcatccaaatacttgaagaaaaagctaacacaccaattaaacacttcattaggaggaatatcattatgtctgtaaaaaactttgttcctttgattctagagggtccacaaaaaactgtataaaatattaatatgatctttatcaagaatattggtaacactcattaaaaactcataaatatcaaggtatttataattatagtagtgattcgcaaactttgaatatttccaagctttcctcaatctagagcactctaacaaatcatgcttaacagtttcaggactaagtttacaaaggggacaaaggggagaatcaataacgtgtttcttaaaaagggaagtagctacaggaatagcatttgacatgactctccagacaaaatgtttaacttttaggggtgttttagaattccaaatcttactccaaaactttttggactcagtagaagatgaagaagagggaatgtcttgcttagagagagccaaatgataggcatattttacactaaatagaccataactctccttaccccaaatgagctcatcttttttatgcaatccgataatagaaacctcaagagtatcattaaccaaagaatcttcaaaatgacacctaagtttcggcaagtcccaagatattgaatcatctatgaaataagaaagcatatatgagttaggtgagccattatccttatagatcacgaacttattataaggtatccaacaatcctcgattgtcctaatttgttccccatccccaattttccaaattatacctaaagccaccaaatctctcccccaaagaatacttctctaggaaaagaaagggttatgaccaggagcagcctcaaaaatagaggagttgggaaagtatcttgctttgagaaccagactaagcaaagaattgagatttttaaaaattatccaagcctgcttagcaagcatagcttggttaaattgaattaaagaacgaaagcctagccctcccataaacttagatttacaaactgatttccaggatttccagtgaatttttttagaatccctagaagaaccccaccagaacctggccattgcaacttcaattcctctacacagcttgataggcaacctaaaacaggccatcgcataggtagggatagcctaaattacagcctcaaggagaacctctttaccagccttggaaaaccacttagcagactaattcctaaggacaaaaaagactttatcttttagaaaagaaaaatagtgatatttagatctagagagacactgaggtagacccaaatatttactaacgaaaggtctatcctctagattaaaagtgctaaagaagagatctctaatatcctgcaaagtattgggagaaaaaacgataaacgatttggaaaagttaatgacttgtcccgacattctagagtagatgttaaaaatatcccaaagggagctacaagagctcctatcagctgaacaaaagatgaggctatcatatgcaaaaaagagatgagagatggaaggagctcttctagagatagacaccacctttagaagacactcctcttgtttagcacgaagaagagatgataatacctcagcatagagaatgaagagataaggggatagaggatccccttgcctaatgccctagagggcttgatagatcccctaacaacaccattaatcaaaatggagaagttagtggtagttatgcatctcataataagagagacaaaactgatagggaaattaaaatgaagcataatactttccaaaaagtgcagtcaaccctatcaaaatccttagccatatcaagctttaaggcagcccaaccatatttactacttttcctagaattaatagcatgaacaacttcttgagcaataaaaatattgtcaaaaatttttctaccagacacaaaagcactttgaaaatgagagatgattttatctagaacaaatttcaaacgattagctaaaattttagcaataaccttataaaaagttgtacaaaggctaatgggtctaaaatccttaagggtgttagcatgctgctttttaggattaagaacaattaaagtagattaacatcagaaaactcagcaccagtattaagacaatccaaaacaacattgacaaaattatagccgacaatgtcccaatttttttgataaaatatgcattaagaccatcaagaccaggggccctatccctagaaagattaaagatagctttcctcacctcttctacagagaaaggctggccaaggaaatcgaatttaggatcctcaagagggggacccgaacaatccaaatctgattaacagcctcagcatcgcaaccatgagattgaaaaagatcagaaaaataagaggaaattaaattacatatatcatcaaaattattaataatattaccactgtcatctttaagaaatttaatagtattattcttttttttatgggatgcaaattggtggaaaaatttagtattcttatccctagcttgaagcttgtgaaccctagccctttgtctccaatagatctcttctttgtacagaagagcatctagttgagattggaggctttcaatttgacaagcaacatcactatcactagggatagaagtttgaagcctagcaatttccttttgaagatcactgattctagagttaaaaagatgtttaacagatttattccaagattttgagagaagagatacaagagtcttgaccattaagaaacctagtaaaatccctacaattctcatagcgattaatattattagcccaatagttcttaacagtaagataaaaatcataattctccaacaaagcattttcaaagtaaaatcttttattgataaaaagaagacaactattactatcttcattgagtaggaccttaagggctctatgatcagtaacataaaaaggaaaatgataaagaaccgcattagaaagaggttacaccaaaaatcagaaccaatagcccaatcagtttttcacaaagagtattattttttgaagtatacttattatgcacataaggaagaggaaaaagagcaaatgtatctaaaaagctatcaaaattatctgtctttattggaaaaaaaagttacttccagtcttattagaatgcaaaaggtaactattaaaatccctcctgataaaccaggaaagattagggccattataaaatgttttctaaagaagactccaagtaaaaggtcattgggaagtaacaagagaatcataaaaaccagtaaaatgaaacatttcattaacattaaggcttatattacagtcaacatgattacaagaaaaagttaaaatattaacattggcactatccttccataaaagcatcagtcccccaccaaagaatttcctattgacttcaaaaccatgatcaaagccaagagtggctttgactctatcaacggcatggataggcagtcgagtttccatcaaaaaaagaacagaaggacaatgttgttgggaatatttaccaggatctagatttnnnnnnnnnnnnnnnnnnnnnnnnnnnnnntatgaattttctaaaacaatgaaaataaaaacaaaagggtttaagaaaacctta

SEQ ID NO: 15197 - DNA, 7855 bp, Cannabis sativa
  modified_base (772)..(772): a, c, t, g, unknown or other
  modified_base (1506)..(1510): a, c, t, g, unknown or other
  modified_base (1573)..(1575): a, c, t, g, unknown or other
tttttttttttttttgtatgatgcccgatccaaatgttgagtgggcttttgagttgcattattggagggagtaaggaataacaattaccagaaagtgactttcccacctctgagcttaagtccacaaaattccagaacttgacattcatctcagcccaatcagaatttaacttcattctcatcttatccgttttggtttatactgatttacaattttaatcaaatgacaatgacatttgatttatttagaaactttgggttaattagaatttttgcccttgcattttgacatgtattaaattatgcctcctgaacttttaaggtcgtaaaaaatgccccctgaactattgagatttttggatttaaggacttttttccaatttcattcaattttactatttcagtgattgtttatgtgctaaactatgctctccagactttgatatctaccaaattatgcccttcgaactttaacatgtactaaattatgccctgaactttcattcatgttagagtttttttactgaaattggaaaaaagttcttaaatccaacaatctcaatagttcagggacattttaacgaccttaaaagttcagggggcaaaaatcctaattagccgaaactttaatatgattttcaagtgtttttcttagtcagctttagctgatgttttttttttttttttaagtttatttgtttttattcattgtaatactgttgtaaaatcgattttattttaattataattgatttgagttattttgtgttanttgtttttattcattatgttataaccggtttgagttattttatgttatttatttttatttattatgttatagaatcggttttaattttatttatatctgagacatttatttctggtgaattttctaataatttttccggtaacggtgacttttttggcaaattttccaaagacaataacttttctagcaccggcaaattttccagcaattttttcaacgctaataaattttaaatattttatagtatttaaaataaatttaaaaaaatcaattgcatacaaataaaataaaatatgtgtaattaattgtttggattgaagattctaaattattcaaaaaatatgtaagatatatagtataactataatttaccataaaaaaatttaggtgtcgtttggtaatttttttgttttctaattttttaatcacaaaataaaagtaaaatttttatgtttgaagaataaaaatgtattttgtaaccatttttttttcaattttaaaaacagaaaataataatgtgttctgtaaagttcatttttcattttcatttttttattttatttaagtcgggtcttggtctaaggtcgaattcgggttcgggtcagagaccgagttcaaagccagggccgtgggggatttgggtccgggtctggtcggattccaaaatattaattaagaaaaaaaaaactgtttaaaaaaatattaaaaatgatttttttatttttaaaattttnnnnntcaattaaaaaattaaaaagtgaaaacagttttatacaacatatttttaaaaaatattttcannnttttaattttaaaaataaaaaactgattaaaaaatattaccaccttaatttataatttatcgtgtatataagaaagaaaaaaaacaagagcaaaattgatgcttaccaagtttttttctataaatatatatttttttgtttatttttaggaaaaatatataatttatgaagagctgtttattttacctccaagtctcgtgggacaatcatcattttcttttgggaatttaggaaaagataacgtgtaaatacaaccgccactgagaaacctttttaagttgatttatttatttattggggttggcaaaactgagaaaccagcagagtgtagagccatcgcatttaaatatataattttatcttcaattccaatccagtccaccacttaacaatcaccaaacaaaaatggcttctaccccttccactgccaatttttctactcctttccatgcctctttccaaaccaagcctatccaaaagtcttgcaattctactttatggccttccatggaactttcggtaccgtcagccaaattgttaattggttcctctaaatcaggctttttccgttctgggtttttttcgcaatcatccaacctttctgggattttcggaaagtctcgatcttcgggtgtttttgcaagagcagctacggataagactctctatgacttctctgttaaggttcaatcttgctcccatcacctcttctatgttcacttttttgtttgatttatgattgcatcgttctcttttaggaggttttatttatatccatgagtggtttatatttcttagtatatgtaaatgttattggttggataaccaaaaaatgacttgaatgcaggacattgaagggaaggaggttcctcttagcaaattcaagggaaaagttcttttgattgtcaatgtggcttctagatggtattcacttctttaaatttcttttcattatgttttgtcgctttgtgatttaacatggtaaattccttgaatgccagtggtttaacaactgcaaattattcggagctatcacacttgtatgaaaagtataagactcaaggtacgctactctatttagtagctagtaatgtttttctattcccttaatttgagggtctaccatggcacatggaagccttaaaaaaacttatgaatcgtgatgattataattcattactcatcatacgatcttttgtttgttaatgtagcatatcctaagtttgagctacctaatttaatatgtactagcatttgatattagagcaaaagatgtgaacacaaggcatttgtaattgaaattgaagatcattaagttcatgatacctatatgcagctttgaaattcatgctcaatagattattcatgttatgcttcttcatattctaggtgttcctggggttcattttcttagggccacttggtaaataaggaaacaagtttctcttttctcaaactttatgtggttcagcagggctcctatttgttaaacacgcttcttttttcccccagaataaactcttaactatctttatacaacctcattgtaggacactagatatagcttctcttgcaatcagtttactttatgtggttcagcagggttcctatttgttaaacaggcttcttttattttttttttccctggaataaactcttgattttctttgcacaacctcattgtaggactcgagatactagctttcccttgcaatcagtttggtggtcaagaacctggatcaaatccagaaatcaagcagttcgcttgtacaaggttcaaagccgaattcccaatttttgataaggtgtgtatatgaagtgtttatcgataaagtattgtttggttcaggtggttgcatgaaagactaataattttcgcaataggttgatgtaaatggaccacagacagctccagtttataagtttctgaaatctagtgccggaggctttctaggggatgtaataaagtggaatttcgagaagtttttggtggataaaaatggcgtagttgttgagagatatgcaccaacgacatctccttttcagatcgaggtattagttgccttttagtctcatttacattttgtcaacttagaaaaatatctttgagattcagacaatgcttgaagtaattagctaaagttttaagtgaatgctcctctcgcattttagtttcgaatttgctagaagggttgggaaaccctttttacaatgacttacatcttcaattcagatgtataagatcaattagagtgcctcagtacgttgtttatcacagattagaaacgaagttgggaatctaatatggttgttttgaacattttaggcctgtcttaactttccttttcctcttctcaaaaattataacaagaataaataattatttttttcctaaaaaaataaatgcagaaggacatacagaagctacttgcagcatgaactcagttgtacaagtaatcgtcacaacaggagaactgttctagggttaaatgatctctaagatcatacacgagcgagcggccgagcctttctcgttcttaaggttcagctatgtaaaaatatatgatgtgtttgcaactaaatatttgaacataattgtagttagagtagtagtatttatagttacaatgttcttactacgagaattataattactattgaacttttccaaatatgaggaagaagtctctttcgtctgaagtttgttgtttgtttcacacccagaatttttgttctatgcgagctaaattgttattaaacaaaaagtaataaattgtgtctactttgaacaaaatttatataatattgggggggttcaattattataaatattatttatggggtttttttttctttctatttagtgtatactgattaaattttaaaaaatatataaatttttaatgtaatttccttacaaaaaattattttttgatgcattttttttttcgtcttggtctctagccctcatacttgtattacatatggggtctgtccctagtttcacccatagttgtaaataggtgttgtgctgaccattaaaagataagtaccgtgttgtcttaatattttaaaagataagtttgtcacgactcgtaagttaatatttttgtaccgtacttggatttgtgtcgcactttacttaggtcggtttatttttcataaatgagttagaccgttttcttataaaggtcaaatttgggtttaattttttcactattttttttttacaattaatgagttaatcactaaattatatgtattttttataatttcaattgtttttatataattttttaataatactttacatataatcatattaaaaaaattaattagaataattaaaattggaatatttattagtaaatatatgtattattattattattataagaattttttatgttatgttttcaagttaatttattcgtgtttacatgttgtatttttgggtttgtcgagtcgtgtcatgtttaaacttatttttttgtgtcatgtcgtgtcgtgcaaatttacagtatcgtgttgtgtcatgttcaagtccatattttttcgtactggtttcgtgtcatgtcaaaaagctcaacccgtatttacaactctagtttcacccattcggtttcattttccatgcttggaaatgatgtaagactcaacctactactcgttctcatcaacttaatatttgttcatcttttttttttctaaaaataggccaaattgtcatttatactgaaaaacaacaacaaatgtttcgtaatcagagcatattgttctttaactaaagaaagacagtcgtttgaatcgaatacaaatatgatacttacatatgtggtaagtgacttttgataggtgggactcatcttaaataaaactgattgattgatattactgttggaacttattttaccaggtcttaattcactgacatgtatgttcgattataaatttataatctaacatcttaaaatataaaaatcttaaaatgataaataaacatgtaaaaatatatatataaaaaaaaaaaaaaacccttacattggttgtagtagaattaaatatctcattccgttcagtactctaacccttgttcctttttgttgtggagtagtaacaagtactgaacccaaatcttctttgaattgacaaaacaccttttacacagtcttccacaatggtctgagtaccatcttgaatagtgtgggttgatactcaactcactttcgctaaaatcaatgagaaggaaaggttagtagacttaacctggagtgcggtattaggcgaggggatcccctctcctcgtatcttttaatctggggtgtagaaattctttcgtgtatcctcgagaatgccccaaatgctggcattattagaagaatcaagttgagcaggagtggccctcgactttcccatcttttgtttacaaatgatctaattttggtaggtagagccataatggaggaggctacgggcttttagcaatgtctggagaaattctgtgagtggtcgggtcaacgcattaataaattgaaaacatgcattttcttcagcaagaataccagtgatggaatgaaacgtggtattcaacaggctcttgggctcaatatgggaatgggtaacattaactacctaggtcgccctttgttccgcaatcgcaataaacatactgattttaacttcattctggataaccttgtatcaaagctgcatgggtggaagttgaaatctttatctaaagcgggtcgtgccactgataaaatcgatcgagctatctttacaagtgtatgcgattcaaaccacaaagttgtccaagaaacttgcagctaaaatagatgggattgttagagatttttggtggggttgtgatcaaattggggtatctatctaaaggtttgggatcagttgtgtctccctaaatctagagggggacttggttttcgaaggacactggaaatgaatcagcccttcatggctaaatggggttgggctctcactaccgaggaccagtcactgtgttgtaaggtttcaagtgctaagtaccttaaaggtagacctttcttgaagtgttcgtccaaaaatttagacgcatggttctgcaagaatgctgtgaagtctaaagaaatccttatgaaaagagcatgtaaactcatatcagatggaaaggatacagacatttgggatgatccctagttaattcacggttaggactttaatccccatccaataagaaggcgactgagggattggagaaagttacagatttattaacagtcaatggcgattgggatatttccaatttgaccgagagacaggaagttgcattctcaaaggtggtaggcctgggggtcaaggtagtgataagtggatttggactaaagaacctaatggtcgcttttctactaacctatctttatcaggccttggcgcgtgctcctatttgcaatattgctcccgccctatggaataaactttggaatgctagtgtattggagtgtcacaaagtcctttggtggagtattctttcaaatgcattacatattcgggctgcacttgctaaaaggatgattattgaagatgcgtcttgtcctatttgtggtcagggagagaaaacaatggaacacctgttcctctattgtaactttgctttccacctcttgagatcctccccctggggtgtgatgccagtgatagactctggggcccgtatgtgggattgggtcaatttcttgtggagcctaaaggaaaagggagagaacgttcaagaattgttcctgtatgcttcgattgtcgtggacaccatatggaaaacccgaaatgataaggttcataataatactttatgtaacattaaacaatggattgactctatttctatatgtttcacagactacagttcctgtttgtttccttcgtcggtgatggttgcgactcctacctggtccccacccctagacgattgggttaagatcaattgtgacgttagagttagtaatgactcaacgtgtgtggtggctctggctagagaccacaaggagtcgattttgtgggtggctagcaataacctccctttctctgatccactcattagagaagcggcgacctgcttgttagccctggaatcagcgatcaattagaaagcattcatttgtgatagtggagagtgattctgaaacagtaatcaacacgttgaaggggaatagttccgtttggggcattggtaactgttgctccaaaattcgcccaaaatacgtggaccagtcaagaggggacacgtgga

SEQ ID NO: 15198 - DNA, 7851 bp, Cannabis sativa
  modified_base (28)..(30): a, c, t, g, unknown or other
aacccatgagagagagagagagagagannnagagagagagagagagaaggcaagaaccagttctctaagtattaagctcttattgaccatgagactctaaaatttacacttagtaacttttgggggtctatatttgcccccttaggtgagaagaaacatcttttgggtaatgagagaccccttttggtgaggggagactctcttgggtggggagtgatagggagcaactatcttgggcaaggaacaaccccctcgaatgaggagagacacctgccaagtgctctgtttatattttgatcataattttctcaatattactctgatttagatgatttaagatattttagaaagataggaaaaagaacaacttgtatgttttgctttgaactaaattctgaatttaaagatgtctaagcccactaacaagtcaggactcataacttttagctatcaattatttttccatttctaccaataagtgtcaaaagtacttaaaatgacttaaattaagtgattagcctccaaaaacatattgttaagtagtgtcttcatgattagagactattccacttggaataactttgatattacacattgtaaattgaattgcagggtcaacaataacatataaatatatatataaacattttcaatctatacatatgtccaagttggtattagtcaaagtcttcagaaccaaaaaaaaataaaagaaggattaagtttctctcacgggatatcccttaaaaaaccatcttttactcgaaaaagtactgtcatttgccacaccacatatcattaaccatacaaccaaaccaacaacctaattaagagcttagccacctttactacgtactttttccaactttatgtgaaacctaataaagacaccaacaaacaaacagacatgcaatccaatcaaatcaaatatcatatatgaatcttgatatgtataaaattaaaaactcatcactactgtttcatattacattcttaagagaaaaaaaaatggacaaaagtccaataacccaagcttcaagttctcatcaaactcattatgttgatgttcatgaaatcttgcctaacgttaaagaaaaagaaataacttctagtactatggttgagaaagcaaccgggaataacaatactaataagcgtgtgaataggcctattcgagttagagatataaggaggaacccaaggagtaattttagtagacaagtttcacttgagaccggttttgcggtgcttaacaaagaattatctaaagctaaagatgagaggatggggccatcacttcctagaagtggaaggagctttggaggttttgatttggcgaaccagattggaattgaaggaagaaagagagattttagtatgttcaaaactaaatccactcttagtaagcagaactctttgttgccattaaggaaagatcagaaagatattgatcaatctcataagattgaaggctcagttgaagagcgtgatgagtctgttaatgaaagtgttccagttgggaggtactatgctgcacttacaggacctgagctcgaccaagtcaaggtaataatattattattaacatgcacatttcttgttacaattcagtaaattatagtttgtacatgatatggataaaaaaaaagttttacttgacaatttctgaatagttgaaaaatcgagtaattgtaatcatatttagcaacttattaagagaaaaacatcaaccatgtggtgaagtgtagttgtagggatgtgcttctaaggtaaccctgtttgttatgtcagggattgtcttagtctaagtctaggatttgctgttgatgtatctaagtcgttcgttagtgataagaatccatgttaggtgatacgtgatcgaaagtttttacttgacaatgtctgactagctgtgaaaatcaataaccgtgtgggaatgtgttttttaggcacccttctttgttgggtaaggagattgaatctcactaagcccccacttaatgtggagaaccacatgattctctcctactttgttaaaaagaaagagaagtagttggtagctgtgagaattgcataacaacagagatttgagtatttaatgcctatatttgtgtttggcaggaaaatgaggacattcttctacccaaagatgagaaatggccatttctacttcgatttccaattgggtgttatggtatatgtctaggcctaagcagccaagctgttttatggagagctttggcagcaagcccggctatcaaatttctccacataagccctttcataaaccttgccatatggctcttagccctagctgttgtggtctcagtctctttcacttacattctcaaatgcatattctactttgaagctgttaaaagagaatacttccacccagttcgagtaaacttcttttttgctccatgggtggtaggcatgttcttagccattagtatccctccaatgttatcccctaaaacacttcaccctgccatttggtgcattttcatggggccttacttctttcttgagataaaaatctatggacagtggctttcagggggcaagagaaggctatgcaaagttgtaaacccctcgactcatttatccgtggtgggaaatttcgtcggagctatactagcttcgaaggtcgggtggaatgagcctgccaagttcttgtgggcagttggtttcgctcattatcttgtggtgtttgtcactttgtatcagaggttgccaacaagtgaggctttgcctaaggagctacacccggtctactcaatgtttatagctgctccctcagctgccagtcttgcttggcgaaccatctatggagagtttgatggttgttccaggacctgctttttcatagctctgtttctctacttttcactagttgtacggatcaaattcttcacagggtttaggtaataattaagctttacttctcatatgaaacttacactcactaatcatttacatatcagttatcagttattggctcaaaaattgactacactcttctgccccaatggtttggactagtaacaaaatgtaaatggtcgataagcattttttgtttgcaggttttcagtggcatggtggtcttacaccttcccaatgacgactgcttcagtagctaccatcaagtatgcagaagacgtaccttcgattccaagcaagggcctcgcaataaccctttctttcgtgtccactgcaatggtttcagtgttaattgtttccactattcttcatgcctttgtttggcgcacattgtttccaaatgacttggcaattgcaataacaaacaaaagacatcacaaagacaagaaacccttcaaaaaagcttatgatattaaacgctggactaagcatgctctcaccaaacatgggaacaagaattttggaggagatactgttgattcccaaagcaaccagatgaaataaagctaccagaagaaagtagtcttacaccctgttatttggtgttggtttaatacaccaaataaaataagaaatttgtgaaaacaatcccaggtaattgctagttattttgcaactctcacattagtgtaggagctactaagttttaacgtttctgtgttagtttgaaggagtcgattgcattaaacttacaaattgtaatttttatatcattatcctgtgaacaaaacacagattagaaaagaaatggctacaaatcttctattttgtagaagaaaaaaacttaagaggagcaaggactgtacttttgtatatttctgaactgagctaactctgttttttttctctttttgctggagaactgaaccaactctgattaatttcatgttaagatggtagaaagaaaaagattatggaacaagctatgagggtaaggtggcctttcaatggctgtacaacaccggcctttcaacatattattgaattttaactgaaacctacaactttggaactttggaaaatacaaaaaactagttccaactatgtatgtctaaggtaaggcaatgtggacttccatcaatttccatgtacaacgaaatgtatcgcttttatgtattgtattccagtcttttgtccagcagctatagagcaaaattgaaatctgattctgatccctttgaccctcagcggatgccaaagctcctgtgtgtaattatcatgattgttttgttttaacttagaaagaaaagaaatgagcgtattaaagatttgtgtgcaatatttttattcaaatgcataccttgtgtgcaatttatcaccaatgtcagagatgcaaccattagttccacatgggatctgctttcgactaaagtttgaaggtttttcgttcacgggatctgttgctacctgtagaatatgagaccatatgcaccacataagataaaaggctaaaataacacatgcataactagacaaaagaacatagattgaacaaactgtgaggctgggaaagtgaaaggagtcgagatttcaaatatttgtgaggaaaacttataggctggaaggtaccttatgttctgtcttgaaagtgtcaaatctattttcttttgagcccttgtgccaaaaaaatacgattaactcagtacggtgcaaagtgaaatgataaaatatgatgtctaagaaaaattaagtgaagcaatgataacctttccagataaaaaattggaccaaggcacttttaactgagatccattatttggctggagttcagatgtcagagaaagctggcaattaaacaagcaaacaaattaaaaaatactgtccatattaatgttatatgacaaaaacatagataccaaataacagagggacatggaaaaaatggatttatcaagtttaccttactaaaaagatctattggtggtggattatgctgaattcttttctctgtatggaagttaaattcctatatgtctcaaaacatgataccagttcagaaacttctttcaataagaaatcaaataaagagtgattagaaagagataaatagctttgaactaccatgggtactgttgtttctcgcttgttgttccgaaaaataccaaggtctcctttactagaaaatatctgcattgtataaaagaaaataatttagtaattgctaaaagcaagaaaagaatatcaacaaatgttgtaacatattacctttttattaagaggaagagctttgaatctatgtatttcatctccatcttgtttttgaacttcgcaagtgattggtctaagcaacgcaaatatgaaagtattattttcttgtctggcaaacaattgcacaacatagatcgaacatgcccatttaatttgtaaattattctttataactctcttattaccttctgaaatcccttctcccattttctacaacactggaactactgattttgtcaggcccctgcaatgaattaattacattataaagtttgtcattgttgcttccacaaatttttactcgtcactttgtcaaactaataaagaggaacttcttttactttaaagtgtagtaaatgcaatattagttttaagactgagtagagaatgaccttgtcaaattcattgcaatgattagacacagaattggaagatgccttttgcatagccctgtccattgtcttcaggcgaaactcctaaaatccatgagattaggaatgtgagtatcaacttcaatacatagagtagcttagtagctaatgctagtccttcgaatgtgaaaagtcatttgaacaagaagcagataacaattatcaagcgcttacgtgaaactctggcaattttggggtactccgtttcggaagtggcaaagaaggagcttcaaagatctgcagttaaagatgttaaatatgctaacaaggaaaagcataaaatattcacagattcaaattcaattagactgcaagtacaaacttttttgttcaagggccgcgctttaaatctacgaacagctggtgccacttggtcaatttctgtttcactcctaggcctgataccgaaacatgtatcaatttaaccacacactacagagcactctgcaccacaacatacacatacggtaataaacatactgaccttgtcctttgtgctctgtgttctgttacaaattcaggctctcttggtatagtaagcctcaacttggcatgtgcaacatttttatcagtggtttcatcctgcaagacaatgcatatatgcatttaataagcttcgcttatacttcgacaatgctaaaaggctgcatctcggtcttaatgtttaaataagtgaaagcgtagatcaaatttcacaggaaagaaaatacaggagctaccgtttatgtaggataacttttaacaaacttacctttttaggagccttgtgaacaaaattagtttgctgctttccatcagtgacctaaaattagaaagaaaaaaaaatgtgacctaacccaaaccttaattttacaacttatgcatcacagcaaggtttacttcatcaaacagccataaaaaaaatccatacacttggcacagatgctaatgagacactccatacctttcgtaggtgacctccctctaacttttgtctcttgggagcctgattttctactccagaggaactatttaagctcttctctttgttttgaaggtgcagcattttgtatctaaaaagcaacaataccaagttattaaagaaattgacctttcattgtttcataatcataaacacccagagaatttaaggaatagaatgcagctataatcacattgatttgaaggaagtacctggaactaccaacttgagcaggtctattttgcttagccagttgacttgctgttggcttcattaaagtggagctcctattgcaagatgctttgaccgaagggatagttttaccttttggtttgttacttgataagtgattgcataatcctgcaaagcaaaaacatacaaatttcattatgttttgacatttaagattgtgaggtagacttctcagtatttctcgacgacttgggtaattaaactcatggcagataaatatcatgaaagagctgatatgtacaattataaacatggtgctaaaaatcagtactttcaccaagattgtaaattgggtttagtaaaaataaaataacaacttaaatgtaatgaacacttttgaatatcagctagctttaatatggtgcgttagccccagagcattaactagatcacctgaagataacccatgtggttgattcaaaactttctgtaaattaccaaagatccctcttttcaatgcttcgtaatctgttacgtaaaaaaaatgtcagaaatcaaaattgggattttttcagctaagtttttgaaatcatacacattacctccattagatacatcatttgcacaaatttcatgaccttcaccaacatgataaccgccatggagtgaagaactcggattctctctatctgattttggtgaaacgtttacatttcccaggaaaacatcctctctgagaaccaacttcgccacaaaagctagaacagcaaaaagatttaaaaaataaaaattaaaaatgcaggaacaccaagcattacgccaagaaaaagtagtcaaatttttagtcaatatatacattgaaggtaaatgatcacataagagcaataatcaacgcaatggggaaaaagcaagaagctttaaagactcacgagaaggagggtagctcttagcggactcgaaccacaactcagcttcacaagcctcggccagagtctcctcccgagtgaaatcaaagaaccgtacagcatcaaactcgtactcgaggtcgatttcaacagcttcaaacactggttcagcctcaacctccatatcttcctccatctccattctcacaaa

SEQ ID NO: 15199 - DNA, 3332 bp, Cannabis sativa
ttatttacacttttacccttctatttttcggttattataactttgcccagttttcttcaaattattttctgtttaacccctctttgagaaattttgcctatttctttcttctatttattattttattttatttttgtagatactgtctaaatttatatttaactcttctagggtttgtttggcttgttgtataagggcttgtttgatatattgtatgtgtattatgtataatattgtgttggattgtattattattagtattatttatataatatttttgtttgatattggcttgtagtatttagtatcaagtccaggtctagttccaagtttaggtatagagttcttgtgagttcggggctgagttcaggcccgaggccgaatctggttctggttctgattcttgcttcaggtcaagggtctaggttcaggccaagactcggaactgggtctaagtccagcttcggcaatcggcctacaatcatttctagatattagaatataatttaatacggataatttattatctattaaataatatgatattgcatataatttatggttgtaattgttaatactattgttggggaaatctaacatactataagaatgaatattattgtataaatgtagaatataaataataaatttaaaaaaatagaaaaagaatatattattgtagcttgttttcagtaattttttaaaaattaaaaattaatttttttaaaaaaaatgtaacttgtgacttgtgagtggtcttaatctcatgaaaaatggctcacaaaacaagaaaaagacaagattgcgacttctgataataaaatatctttttaatacttttattcttagccgcctactgttttcaaacgacattaatttcataatttgaccaagtttacccctaaaaacgacaagaaaaaaaattgtaataataatcagaaaaacgacagcaacctcaaaacgaatgaacagtaaacgacagcatagaatattcttcctgtataataaacaacaaaaactcgtaaaaacgtacaagtctcataaaaacgacgcaaaacatgaaaaacgacaattacacttcctttgtttaggaataaaaatcatatatatatatatatatattccatatatatatattccctttgttatgttatcaataattttatttagggccaaacataagaatttcgttgcacaccgtgtctaaacacgggtttaagaattctgatgaacttcggtgcattagtacttcaatcgtactttttaattatgtggtcaataaaactcttaaagtaagttattttaaaccaaaacgagagagaaaaagagaaagtgaagttaaaaggtaaacttggaacatttttcttgggagaaatgttacggagcactgtaatatgctaaacagtatacactacaagaagtgatatactgttattaatgcattttaatatttgatcttacatattttaatttaataaataatatgggaaaccgttaaccaattataagtaacacgtcggtgtggtgttaaaggtgcttaatagcaatgctattttattgcactctcatccaaatattcttctatatacaaaggagaagagaagagaatcaaccataaagtttaatcacatctaatccttgattaaagtcaaacaaaatctaaaaaatgtaaatatcatattctctacgtaactcaaatctaaaaaatgctaaacaagaaagatcttgtacactaagtttagaaagaaaagaaaagaaaaagagtgcagagaataaagaataaaatctaccataaaagcttgaactaataaggataaggtggagacaaagctgaaacatcaatccatgaaggtctctttgcattgtaataaaagtgtgcaatcatttgaaccagttcatccgccgttcgaatctctgcaacaaacgacatgtagtttttaagtacagacagattgaaaccgaacgagtgagtgagtgagttttgtaatgttttaactttcttacctttctctctgtacagaatcctatttcccctcaagaataaaatctgaggacattctttaacatttagagcatatgccaagtctctttcgatattcatgtctatcttcactgactgtcgtaaacaaaagaaaaagaaatggcacaaatggaatggattggattagattggaatcaaaataacaaactttggaatccagtgaaggtgggggaagtaagaagtttgaaatacccgtggtggtaatcgatctttggcctcccaataaacctttactgctttctcgagctctttcaaagccttccaattatcggtagccctgcaagaagaataacatgtaatgcaaacaaaccaaaagctttgacataaatttgaaccctttatggtttttcatagctccaaaatctgatcaacaatcaccaaattaagtctttttaaatccctttttgttttcagtcaaagcaatatactaaagagaattcaagatcaaatagtttacaaagctgtctttacagactaaatcaatatcaactactataaacacatgcttcaaagacaactgtggaatttattcctactaaatcgccaactaatataactgttcctgttgtaaacagttaagttagttaattgtccttaccaactacattatagtagatgtctgtataaggacatgtagatgaataagattcagagaacaagagtgagaaagtgtgagctgagatcatagagagcagagcgaaagagaatggggtccaaagggttttgtaaagagaaatacacttatgaacaattgtgtatgctcggttggttgagtgttaaagagaatccaccatcgtaacctgtgattgaagaactcatagagacaaagtgaaaacttgtaacttcatcaactcaaccttaaaaccctcaaattgatcaactcgtataggagactcatcaatcaactgtgaaaatatggttacaagtcaccatgctagttggtactaacttggacaagtgagataagataagccatgcttgtaactcacttgtgttctgttttcttaattacttgtaatctctgaaacttgatccgataatgaagatgattaaggctgctattcaaccgagatatatagcattgcacatggctcgaactcgttaaaatcttggtgttctttctttagttttcttactggtttattgttctgttattgtgttcatgaatgtgtttgtgggttagtgaacttcttgagctgttagaatggttcgatcacaacatcaaccaattgatataatcattaaaaaccaactaccagtgagtgagttgtgagacaatttatgtgtttga

SEQ ID NO: 15200 - DNA, 6390 bp, Cannabis sativa
tcactgagagccctttcagcttcacaagtctcaaaaaaaatggggtaagaataagtttgcctttgattttaaagcagataaaactgtgaatacagataatctctaatcttataataatcctcgcataagggcccttcaataacaatttgctgcgtaccaggaccaccaccctacatttcaaatatgatttatcaagtcaagcatcttggattacaaactagaaacaaaccattttttcctcagagaaatgctaaagaggaccttaaaggtgcctaacactatacctttatttaatatgcttcaattaattttaaaatgaaacatattaaatctattactaaattataccaaaaccgatatgctatgtcctaaggtaaactattcatatttaacaaaatagaattcaattgggtgagacaataactgaccttatggctggcatccccaacctttcgcagtgtcacatattcaccgcatcgtagagcacccccgccagcaaattcagcctgtgaagcatataaatagtagcaaggcattattcgatgaagcataaatgatattaagaccagatacattatgcagtctgtgattgcaaagcaaagatcggtgtctatttttcagtttggcaggacatttatttattaggggatgtgggaggtaaaatacagatatcttattttagcgacaaatgaaaattgggtacctgaacaccattatcggcaagaaactgcttgaaatttgccattttcaaatcacctacaaggactgatttatgtggcggtggtggtgccgttgagaggggaagtaaagacagtgtgtcattttctgccttcccaacttcagaatcaacccaagctatttcatattctccgagctgtgtttgcagatcagtaacgtcaagaaaaattacaaatggattatgtgagaaacaaaattctgaggctttggtgctcaccttcttaaacaacacattactcataagcttttctgacagttgtacctgtttttcaacataacgtaagccaaattaattgtaatttcagaaatgacagactaagaaggggaaaaaaattacatagaacaataccttataagcacataaatcagaggtgacatcaattgtttcttcaagttgaggagcataaacatgaggacaaacttgcttcatgcagtgttgcttcaaatgttctgtggcttctgctgttccatggaccagaacctccaagaagtaacacagaacataagattatgtacaataaatcaaatatccacataaaattgctgaaagattaaaaatagtcatatataaatacaaatatatttttatatatattgacttataaaacttattccctaagagaaatactctaagaaatgctgggacctttgccttgagagcattcagaattaacacgcaaaagaaatttaaaaatttatttaaatattttgttactagtgtcatgttatttggacaaagaaaccattataggatgaaaggtagggccatgttgcataaaaaattgagaaatgttcaggaagagatttagtatcacaaataaacatcatgaaatatttatgtgcctgcataacaggtacatgcatggcttcacaagctaagatggtgcaatactgtgagagtatacatttaagacacatagaacactaaattcagttctacaataaaattccaattccactcgaccaaagatgtagcaatacaaatccagtattgatgacatttgacacatgagaagacaaaaaaaaacataatgtaataaaaatggggaaaatacagaacaggaaatattcttacaagctttagaggagccatatgggacaggatcgacttgatggatcttgcatcagaacggccctcaaaatccatatacagcaatgaacatttgactgacacctgaatcagtaacacaatttcttatttaacatcatcacaaaagtcaaatgctattcagtaatacaaaaagttcaacttacagtcaattcgttagatacaacttttgatggcttcgtgtcaagtatcaaactagcagaggcatcatcaagcttgccctccatatcaccacccatctgcggtgacaaaacctaaagttttaagtataaaagcttaacatcatagcaagaatcaaatattccaaatggtggctactcacaagcattcctgcttggtccatgtcttcatccttgattacataatcatcagggttaataatttcaccaaaatcatcccactcagaagtattttcaaaaaagggaaaaattggagcaacactggtggaaggtggaacaaatccatcaatcaatatatcccggtatccactgccacgtggacctgccactgtgatgatacattatacaatcagaacaatataatattatgaaaacgatataaactgaaggtatcataatctaagtgaaatgattcatcgtaatcggaaatatgacaaacatgcttactgtacaaagaaaactggcatactcatttattttaatcatgaaagaaaactacttgcaaacacattagagtttttattttattttttaaacacagacaagaataaagcatggactccaagaagggtcaatgagcaacacacaaaatttgtgcacccaaaccagacagatgaactttcatgccatacaagaagctgacttgcacaataaaagcagaattatcattctaagtgcattattttaaaaaatagattattttgtttaagacaaatatattatgtaacatgtaaattcaccttgaactagatgttgcaatatgaaacactaaacagtaccttactaatcaaagttataataatgtacaaaataatcaacattccataagaaattaaattatttctgacaattaagaaaatcacataaataaacaaagcattcaaatacacaggttctacaagttaaaattaatttgaatatgcactcaaagaatgaaacttcatatgtttaaaatttaaaatttaaatgacttctattaattttcgtgtcgaatgagttagtttaaaatcaagagggttgacctctctttggactcaattttccatccatttcaactcaattttgacctgttccttattttacaagaagtcacattgttctttcataaattgaactacctttaccaagaatcacccatcgaacaaactagctcaaacagatgacacatgttcacaactttatacataccatctggcaaaggatgagtattgctggcatcaacgaccattggatcactcacattaacatcaggtccaatagaagcttttgattcctcctctttaataaggctagcttttagagcttcctctctttttattcggttttgttcttcttcataggcaattagttcctccccaactaaagggaccctcttggataaagtgactttaactgcttttggaggtggatctgcttgaagcatgcgagccaaagtgccaaactacataaatggtaaaggtacaaaacttttaggcataaacaaaaaagatgacccagtaagtttacgagtacatctcttaagatgggagacataatatagtacattaaaataaataacaaattatgtattaatctaatgccacagcattctgatttcctcagaataaataaataaataaataaaaagtatctagttcattttatttaaaaaagaaaactaagttaatgtgaagttgattactcatcaaaatagtaccgcataagctaatttggaaactgcttcaactgaatttctaagattttgcactacaaattcaaataactgccaagccaagaatgcttgatttgaagagttctaatcctacaaaagtacctggcctctctctgtaaaaagcatgagattccgcgcatcatttgcccagtcaacaaatatatcatgggagaagcctgcttccaaactggccattgatgctagaaccacctatattgcatgtataagtcaaggtaaatgaaaaataagcatggtgcgcaaagcatttggcgagtctaacctttggaccatctggaacagtatcaagctcattcttgttaactaaaagtgtgacattcctgcaagcatttccatgtgtgtctcgtaagtaattatcaactaaggtgaataaacttcattactaaatgatctaaactaatcagatcacttacttcagaagaaaggcattgtcacgtgtcttttcaaaagactttgcaatagaatcactcatccattcaaggaaacttttgacatagtcaatggtgcttgatgaaacatatgttaagaagtatatgggatagttcagattttcctctgcccagcactgaaaatagttatgtagatattatgtcaccactagaatgtaacaaagagaagaaatctaagtcatagatacagaaaataacaaactaaataagaaaagtgctagcaatgttgcctcaactgactaaccgattccaaaatttgaataagttccaaaactcgcccggcagtatcaacaggtagtaacacttttccatctgcccttagaatcttctttatggtatctagtacaagaatgacaaaactacgttcatagctagaatccaagtatgtttgtaacaatgtaatcagcattaattcacagcaagcattccaaattggagaatgaaacaaaaattaaactatgtatacctgtaaattctttgtccatttggcgtctgtaaggctggttgttcaaagcattataggcatctgttattaaaacggcagggcgcacaaaagaggatggatttattccattcaaatgcctgacaaaaatcatagcaataagcaacttttctgataatcttatgcaataaaaaattcatgtaggggagcaaaatgagttacttttctttccgatggttgaagtcaacagcatatataacgtcctccccatccttagtaatcttccacacagtaccacccaacaaatgcccagccacatgaggtgatataacaatcccttctcccttacctaatggaaaaatatacaaaacccaatacacccttttattcaatttcaacatcttctcctctctcctttttctttaatcctaccaacaaattaacacacacatacaaagaaagggtaaaaagaaaactaaccagaaaggtgatgattttgggcataggtaagtcgggtaacattctggaaagcagaatcaatatcatccaaagtaaacaaatcgaactcagatacttgctgcacaagaaagaaattagcattaaacacataggtagtactctaaagtaatgttcccattaaataaaaagattacttattaagctaaaagaaaggcataaaataaaaattaagacaaaaattgccaccttccgtgagagaaattgatcatacatagtgagaagacctaatctataaacgggctcagtggaaaaaacttcagctgaaagcccaaattgtttcattgcatatggaagcgcccccagatgaagtgtatctgggtgagatagcagaactgcatcaatggttgaagctaccctgagcataaaaggaggaaaaatcagcacaggcgtttgaagttacaaataagaaacgaaagtatacatacatatatatgtatatatgtatatgtaaatgtatagagagagagagagagagagacttggagagaggttgaagaatagaaggttcgaaatggtcgttccagccacagtcgatgaggagattgaaaccgtcgattgaaaccaagtacgacaatgggctctcgctgtagacaccgcaaagcggcgttatctgaactgaagtccccattgtttctctcttcggctcgagttcgagctcttctccctctctctctttctccctgcctgtgcaaatgaaaatcagtcttttggagagggaaagggaattgcactaaaacgatgtcgtatcaacactcaagcgtactttacttcttctgtttttcgccaactcctcttgcaaatataccctcaaccttaggtcaaatgcacaatttccccctctcttctttttttttaaaaaaataaaataaaataacatttcattgataaaatgtagtagatcgtaaagataagttggaaaatcatccattccaactagtttactatctattttaagtgtatatagctaaaacccatgagcagccatattgaccgaacgacgaacataaattaaaaacgccccataaaacctagatagtaaacatagatatcatccaacaaaaattcgaaatcattgcacataaaagatcttctaaaaaaagccatcaccacaataagacaatctgattctatagtgctcagaggaatatcgaggcccaaagaccaatctagcgcccctaaactaacttgctactgcttttgcgtggacaactgaaagctttcctaca

SEQ ID NO: 15201 - DNA, 6823 bp, Cannabis sativa
  modified_base (3952)..(3957): a, c, t, g, unknown or other
aataaattgatacaaatatattacaaagtctttttttttcaaatataatacaaattttacatctctcattggaaatattcttgcaaactcatataattaaaaaaacattaaaattttattcagagttatatatgcatattaataacaaaaaatattcacattaaggtgtcaagcatcacaaaaggtaacataattattggtgcattttaatattaactatcacaaattttaatttaataaatgatttaaaaaaatattggccaatcattagtacaatattagtataatattgagcaccttaaagtgcaacaatagtacaaacaattatttataaaaaaataatacaaaaattatttatataaaacatataattaaagctaatgaaaaaatgtatatattaataatgaaaatattaaaagacatattaaggtgacaagcatttcaaaaaaatagtatcctggttactagtgcatttttatattagttctcacttttaagtttaataaatgattttgaaactgttaaccaattattatgtatcaaattagtatgatattaagtttcttaaagtgcaacacaactacaaaaattatttatccaaaaaaaaatatacaaagatcatttatatataaaaaaaaaaaaaagaaaaaaaaaatatatattaatcgattatttagtaacacattagtatgttattgagcacatataccaataacaagtaaaaaaaatcatttactaaaaaaatatattaaaaataaaccacacaaaagatgacttccattcttattatacagtagatagattatatttgatgcaataccagtaacaaaagaagacaaacccacaaaattaaacaaaccgatgcaaataaataaataaataataaatgaaacaattcaaattcctaaagtaacaaaaccagttatgtcatgaaaaaatccaaaactatttccaaagtatatatagaagagaaatcaatggtaaaaatgaaaaataaccgaccaaaaatgcaagctaaataacctatccatcttttcaagtaagccaagacactgctaatactattattaacaacaaaagattgatcttgatcctatcaaaaaagtatctaattgtaatggaaggaccttacaaagctgattccaaaattcctttcagccctgcaaagtttcaacagtattcacatccttcaataaaataggcgtggttatttacaccatgaggttaataattaggaatcatcatagaattcctcccagaactcttctcagatcagttttctgttcggcagtaagtcttgaaggatattgaacatcaaatttgattctcaagttgcctttctttcccggttcttttgagatcggcattccctcattttggacaaccatttcagcacctggcttgatgatttcggtcaatgggatcataagatttcttccgtccagggtggtgaggtcaaggacttttcctgttagagcctctaaaagagttatttcctgattgagcacaagatcattaccatcccttttgtatacagcatgcggtttttcatccaccacaaaaattaaatcagcaggaatgactccgggctcctggttacccttatcagggaaagttatctttgtgcctttcttccatccaggctttatttcaattgtcagtatctcctccaccgtgcgagacttactgcaagatcgagccagagtaaataaattttgaaaggaagaatcattcagcaattcaatacaagtgaaactaaggagatttaccaaatattgaaaatgaataaataaaaataaaagaaagctacaaaaaagccctcttctatgttcttgccttcttttacataggctgcatgctaaaaaactagcaagtttgagtaaaatacattgtcttttcaatgacaagaggaggcctaatttagcttaaaactttgaatataagaaaaatgtcatatatgttgatggacagttacttcttttttaaaataatagcaaatgctgtgaccctaatcatggaatagcagatctaaaacaaaaaaattactttaaacaatcctgtcaatgtttaaataagaataatcagacagatatcttattcagcttctgatcttacaaactagacaaataacactagcaataagtaataaaactggacattgacctaacgaggaaacatttaatatctctggacattgaatgactaaataatccacacacagatgaacagcaaaatcctggaggccttagtatcgaatatcaaacacttcgtgttaaagaataatagtcaaatcaactcaaggaggggaaaagggtgtataggatgatagtcaatactattaaacttacactattaaaaaaaaaaagaatataactttaccctgtattataaggttaaaaaataccactttccttgatttggcaccttcaaacggtagctgcttacctatagccattttaattcaatctatcttatatttataaatacttaggggagccttggcaatgcaaatttcagaatctttgggacacaagctaagcatttggtgaaagcatttcacatgtggtcgctgggttcagccaaaattaactcagcattcagaaaatatggaaattttggtttaccaacctgaactacacccagtaggatgtaaaacccatataaaataatccagtcaacagaggatagataactgaacagattctccaatatagtgacatagccacaactaatctaactaaactctcatgatttactaattctaatcatacttttcaaaattggtcaaggcgaggtggttcaaaacaaatctcaggctacgcctctagtgtcaccattgaggcatatatctcacactgatgaggcacacgcctctgatgtgaagcgtactgaggcacatgcctcagcttaattgtgtgctagggctgttttattttgggttcactagaatctttaagctgtttttcagggtagtttttaggcttttaaattaattaagtggccttcagtttgcacctttttttagcagatttttaataaataaagtaggcaagataatgagaccctattttcaaattcaagtcagctcttaggcaagtgatgtttctttttgagaggtaaatcatttcacttcttcactaatttttactcttcaaaaagggttcaaggtattgttagaatgcggaagttgtattgttagaattggaaagtgtagtggattaagcagaataggatgagtgtatcataaaatgcatggtgttccatcttaaaacaacaatgagaggagtagctagcccatgggtcttatatataacattatctttccacccattagcaaagtgggactctcaaacaggtattaagcgaaagaaaacactcatgaaccttgattcaaattcagcttctcatgaaacttttacatataaatgaacgaagaaagacaattcaggaaatttcagtaaccctccaaaggatctctaaaagaatacccaatcttctcacgttctccttgaaatagtaaaggctgggctaaaaagtcctgactgaagtcaagaacttggcagagacagctttaaaccttttataaataactacgagtaccaacacaggccaacaacggcagcaacaacaatagcaaaaagcggcaccaacaaagaagactactacccttcagacttcaggagtgatatatattggtacagaaaacatctaagttgtaacaacatagaaagaaaatccaaaaggctagatagtaaaagaggttcaaggagagctacacctacaattatctaataaacactaataataatgcacatagaaatgacataaaaagaaagtatacttacgtatgcaaattgtacttggaaccaagtaaaaatgcctcacaaaatagaaaaacgttatgatttgaagtagtgcaataccaatattatgtatttatatatatatatannnnnntatatatataaatatatatataacccattctagaattgaaatgaaattcagcattttgcattataattagctccgacatcaaaagcaagagaatgagaaggtgcgaatttagacgttacccaaatgaatcgtagacgtttcttgaaatcttcatcttcttcttgatacctttacaaagatcctccaaactacaaggcaacagattctccaccgcattggccttccgctgagccccagacccaccactgccatgaacggaaaaatctgaagtaccattggtggccctaaagaacccatccctataacccctccccctactcgaactcctcccagaacccgagcttgccgactccgatccaaagatctcagcgtatatatcctcagcgtcccgggggttgaacctgaaggaggagctggggtggttatggttgttctgccggaaatgggaggcgcgtgaagaagacgatggcgtaaacgagttggacgaagaagcaggtggcggaggagggaattggccggacttgagagcctcctcgccgtaaagatcgtagatctggcgcttgagggggtcgctgaggacgtcgtaagcttctgagattcgcttaaactttgcctccgcctccgaccgcttcgtcgccggattcttgtctgggtgccatatcatggccaatctcttgtaagccttcttcaggtcatcctcgctggcgttccgattcaccttcagtatgttgtagtaatcaacccccatttcttctcctctctgtctctgtctctcctgtttctctctctatatgtatatatattacatatctgtcaatatatatgtcgcattataaaaataagataaactaaaataaaaattaaaaaaaaatctctaaaaataaataatgtgatgaatcttatttttggtgaatcggtgatagtaaaattgatgttaatagtaatacaataaaaaaaaaaaaaaatacattataacaacaatgaaccttatttataattaagattttctttttatattttagtaatttactactatcttagtctaaggtgattttttatttattattattgtagacatctatttacataatataatagttatatgaaaaaaagaaattaaaaaattaataaatgatttgccgttaacttataaccaaacgactccctaataataatttatcttgtaattctgaatcaaccgccgcatttctccttaatccatcttgacgttttttttttcttttctttttaaataaatcaatctttacgtcttctccaatccaatttattatatataaaaaaatataatactataattaatcgtcatctaatttatttcacaacctagtttttgagttttatatcaaagtaaaaaaatcattttatttttcgttcataaaatgattcagtcaaacatttccaacctgtctcggtttcatggcattcaacaacttttcaattcaaattttattaacgttatgtggcttcagttcagtctcatactcattcattttcacacccaataattacaaaattaaggaacaaaattaatcttttttaaaacaaagtcaaacatatatataattttatttttgcctttaaactctaatgacggtacggtctctaagcaaagcctcgaccgctcttcgaccagagaccaaagcaccatcaaacgtggcactcgttaagtggtctccgcataagtacaaaccggatcctaccttaggatctttcattagattagttggagggctctgattgggctgagcatatttaatcctgtaagtcttcaagtgcttccaattccttaccgttgatgttgacgaagttgatcccttaaaccactcggagagctctcggacaacgtcagccgttagatcctcatcggagactccatcaaaggtcccgatgagtgatacggagattaaagccttgtctggtgggccatacgatggtgccacattagtggcgaagaacatgttattcacgattccttcgcccgatccgtttataaagagaaccgggtcccgaaccgggatttctccccgatcagctgtgaaatacaaacacaccgtgctccgactcggtttgttttgggccgggtttggcccattgtctcgcaaaagcttatcggcttcgggtttgtctacagccactataactcccagctcacttctcaatatttctcccgtttgtaatattaccgccggcgaatcgaatccctcggaatcgatggagatggctctggaattgaagcgaatcgagtcggacggcagttttgcggctaattgtttggggatttctccgatgcctttggcgggaattgtgttatctccgagggctaggctcttgaagatgaaatcgaacaatctggaagtggtttcgagatcgcgatcgaagaaaattcctccaaagaatggtcggaagaatcttccgatgatggattcagaaaatccgatgcttctcagaagctccatcgtagatacctcattcgcagtcataatttcatcgtctgatttcgtcaggaccccaagtcttgtcgacgcaatgcgcaatttgtcaagaattgaaccaatagggttcgttagggactggagggagtccacgaagtgccgaatgggatcagcgactgtgtggaattcgccgttgtagtaaactctagctccggagtagaatttctggagatttaacgcttcgtaatcgagaagcttcttggcttcaggatatgatgtgatgaagatttgaaacccgcggtcgaggatgaatccgtcgacgtaatcggaccggactcggccgccgacctcatctgaagcttctagtaaaaggaaggggacgttttcggagctgagtcgagtggcagccgcga

SEQ ID NO: 15202 - DNA, 3298 bp, Cannabis sativa
  modified_base (34)..(59): a, c, t, g, unknown or other
tttattccattccattcctattctcattcccatnnnnnnnnnnnnnnnnnnnnnnnnnntcctcccaaccaaacgcctctaacactaataataattaactaatgaactaaaatacaaagaaataacgcacaaatgatttcgacacaattattttccaaaaataataaaataaaaacaaaagagccacgtcagtgacgaaaaagctgcatgtaagacaagtgtacagcaaaggcaagacgattggtgaagggtattttcgtaaaatcatatatagtttttatttttttatgagatgggttagaaaagagcccgaacgaaacgaaccctaacaaattctctccaatttccgccagcccggatctttcgcgaccttgtttcagacatattttcttccgcgcagagccaaaagtctctctcccttagttttattattttattttaattttaatattttaatttctcactctacttttattttttattttctcaaaaactatttcagtgaaatgagctgaaaccgcttcatcttcatcttcttctttcccctatataaatcactcgttaccttctcattcatttcttcttcttcttctttctttctctgaacattttaaggcttttatttgttcttttttgaagactgtaactccccaaacaaacaaacaaacaaacaagctctttcacctattgcatgcgcactacttacatttactatattacaccttcgaatctcaaaaatggcttccaatggtagacttgtctaaaatataattatatatatatttattcaacgttttttttttcttttccttcatcctgagtgaggaagttttagtaacggtttaaggtaaatgacggttttggcttttttttttctttcttccttttgattttttgtttgtttcctgagaaaatctgttgtgcaataaatgatatatatgtttgtttattcggatttagtggaaagaagagaaggcaaaacaaagaatagtagtgtgacattaaagactagtgacgaagaagttgaggtgtgtgtgagagagagaatagtacaagtaccaagtaatggctccggggacgaataactggctttcgttttctctttctccattggaaatgttgaggtcctctgataataatcagtctccattcatggcttatgatacttcctctactgcttctccgcaatatttactcgatagtttctacactaatggtaatttacagtatatgtcttgctttattattattattattattttgagaaaagggtaatgatcaatgtggaaaaaacaaaaatcttgtgtgagattgagtgtgacgttgaaagcctattttggtttaatggaacattcaaataatcttaccgagtcacgtgattatccctcccaagctttttcagctttctgtttggttactgagaaaactgatgtcactgaccagcatgaaatgtttcttcttttattcattttttttttattttcgtgggtagtaaatacacaagtttgggaagattatttgtgaaactttcgtatgattacttcagctgcatgtgcgagtctatgcacagttgcatttgggactttggtccgaatttttacctatttttattttcctttttcatgtattcatttgttttccttttcattttctcgggaaggaacaggaacccaaattaatggagtttcaagtctttattgaccgacttaacttaccttttcttcttctgttttactcagtttttatttatgtaattactttttatttcagcctggtcgaaccagaaatcccaagtgttttttccagatggtgaagatcatcaaggcaagcataatggccattctgcaagcattgctgaatcaccggttctgaccagcttcatagatccacgtacccaaaaccaccacccagttccaaaactcgaagactttcttggagactcatcgtctttggttcggtactccgatagccaaacagagacccaggactcgtccctcacccaaatctacgaccacagctcggcctatttcaacgatcaacatcaagatcttaaagccgttactgcatttcaagcattctctactaactcgggctcagaagtagacgactcagcctcaatcccaagagctcagctgagttgcagcgagttcacgggtactcattctattgagtcctccggaaacgagttggccttctcaagctgtcctaccggttctttatctcttgctgttgctactcagacctctgagaaggccattgttcccgctgctactgattctacaaaaaagatttctgatacgtttggccagcgaacatcaatttacagaggtgtcacaaggtatttactatcttctacatttgttttcattattattttcccagaaattattttcagtatctaatattgcccagaaattaaagtcatgtcttcttttaagaaacgcctgataattgtccttttgtaattgttttaattaattgaaaagttgaaagcctgattcattaagcagtctctgcattgtttagtgtttattttcttaccaatagtactatgttttgattattttctagatatatgcacgcacctgagagacttgttgtttattgtattttagtaaaaaatgtctaagcataattatcaccaatgtattatagtttcatttttgattaaatataataatttcacgcacgaacgatccaagtttggaagaaaatgttcctttgagttgtaccagtttttactaactttctgaactgttgcagacataggtggacgggtagatatgaagcgcatctatgggataacagctgtagaagagagggtcaggccaggaaaggtcgtcaaggttcgtatatatacataaatacaaatttctctatttattatctatctatcttttgcctaaattctttgcataaatggaatatttgaactcctaaaggatttgaatattcgtaaagaaacttatgaaaaaagctgaaaagaaacttgcatgcaattaaaatgcattaatggatggcgctctttggttgtgtggggtagatttactcttttttttttttacatgagtcttttatgattgattgacgtctatacatgtacaaatggtactttacttttatttttctgttctgaatttctttcttttcttttctcatcaattgatttgatcagatgtgccgccattttgtatttgtgggttttctttactttgttttctttgcttcagtgattttcctctctctactctttctctttctctctctcaaacacagagactacgctcctatctctctc

SEQ ID NO: 15203 - DNA, 6948 bp, Cannabis sativa
aaaaaaaagtatagtttttttatagtgtaaatttttggtataataataaaattttttaattatttaagcatataaattcaaatttccctttatagatcaatacatgaaatagaaactaacagctactaactgttagtaaaatcaagttagtttctctctaacttgttgaggtgacacattataaagtcacacaaaattaacaaaaattttgtattaataggcaataataactaatttataatataattatatatattatcaacaaagaattaatggttacattttaaaacaagttaaaagaagagttagaatgtaaagaaaaaattatgcactaattttgtaaagatttaaaattcaatgctattaatggtgggtaatttaatacacactaatttagtatctctttaatctttagagcaaaataatataaaatatagtgtaaaaatttcacatggtacactttgaagatgctccaagtgtgacataatcaacataagtttcaagacaggttttgaaatatcataaaaaataatcaaaaaaggggagaaaaaaattgctttcacatattatataaattataagaaatttagctaataaattcctaaagaatcattctagatgatattttatttattttagcataaaaaaaataattgtgtgtgttatagctatttagaactacttataaatatttaaaaatttcaaatagttttcaatgctaaaaatagagtttaaacatttatttactacgtataagaaataacagtcgtgcgtgcaatataatatgtaaatcttatattaggcattataaattacttggaattttttaaaaatttacagatagtcttaaataaaataattataacatacacgattatgaaaaaaaaaaactaaaaagtttttttgagtaccgaaacaaatacacagtctaataaaatactcatttaacagagtgtactgtaaacttacctaaaggcctaaactttatatgtatatgtgcactttcctttgatttaccaattatatatacataacactttacatgtataggtgtaggtcgttttcattttcagttgtccaccatgaataatgtagatgaagcaccaataacacaaaatgaaaataaataaataagcaaaatcaccatgaatgtaggcactacataaggataagcctaaagtgggggaaagagtcagagatatggatactctttgtcatatatatacatacacataatgtaaaaataaaacataaaataagggtgtaaaaggaagaaaaaaaaacagagagttggagtataattaatgataatataccatataatatatgataatatataaatgtaatgtacttataggggtgacatagtatggccccacacttgataaatagtttatgttatcttattttatttttatgttaatgatgtacatacgaggtctacggtgtttaagaggttgaaattgacaaccctttgtttagttaagtcaaattattaaattggtttagactaatttaaaaaggttgctttatgaattaaatatatgaattaaaagggttttatttggatgatcacactctgccttggcattggcaacatggttcagatccatgaacacaggcacctttgcatttcccttacttggaacaaaaaaagaaaaagaaaagaaaagctggccattgttggatcactagattttaattttcacctttgtccttaacacaccccctcccccttccccacctaaaaaaatacaattattgataatgaagtttctctgttaaaggtatgcacaatggtaacattatttttctttcggctgaaataaaattttagaagcacaacattgtttaattactgagttttgataggatccggtacattaaaatttgtatgattacacttattatttttacttgtactgtttttactatatttcttatattatagtagaaattttttatataataatgtatacattttattattttaaaaaaaattatgaataatacatctgattaatttagttcagttagtatcataaattatttagagtttctcataaaataatggaatgtgtagtataagtggaatatatactattatatttatatatgtatatataaagaaatgagatattacaattttttgataaatttgaacaaatataaatacacaagcaaacatctgaagattcaaactcttctcatgtcacataaatgagcaacagtatacacgcacactcctttttggcacaattataataaaaaaaaaaaacaagtcttagtttaattgattattatatagaatggtattatgttaataatgggtgtgtgaatgcactacctgtcacgtggatttatgctttgtcatgcttcttcaccaatacataacagctgcactaaaccaaaagagtcttgctttattatttctttaaacaaaccattaaaatcagtgttaagagttgtttcatctaaccacctaagactgtcaatcaaatcatatcttattaaaactttttctttacttttttctcttttaagtcccaatttagcttttgttacagtgacagagacaagttacttgtaactaccatgaacttttacttgagagatgaacaacttcttcacagccttctgcataaaagtcatattcctttgctttatcaccctttgacaaattaccaaaatgaaactaacaccaacacagagacagagagagggggagagatctatatgaaaatgaattttattatactcaaacaggtggccctgtgttgagcttacaaagaaaaaggtgaccaaacaagggagagtataagaaaaaaagattttcattgttttttcttttgataaatagacatttagccttattcacttctacaaggaaaccttggcctcaagactgtattgttgccaatacccattggccatgggacttattgaaatggaaaagagtaatttcctcttgcagatgacaatgctataggcaaatttccattagaggttaatctaagctactaaagttgcttaatccgtggaagcaataaactaagaatcactcgtgtaaaccacaacagtaatcagtcgcaactaacctccaacaagttgtactggggtcagtccagcgaatccaccaatttcaccatatttaacaattcaaaatatttgtaattgccaaggcaggaagtcggatacgaagttgcttctaaataaaccatctaggattgaagatatcaaccaacactacttttacattagctccccagacttctctcgtcatgtggacagtattgttctattccgtctctctgaaactcgtaagatgtgcaggaatcatcttgaaaatcagactcctctatatcatttttactgggaatttttcccagcagatccatatcagtttcaccataagtaccaggcgaatccttaacgcccacccttgtaccattatctattatgtcccctctatcctcttcatccgtcacagtactagaaaccacaacagcactatctttacaaccataaatctcatttgcatcctccaagtcttcatggcagtcttccaaatagtcttgctgataattaactgaagcctcttgatcagcaggagactctacaacagagtcctcaccaccctcaagatctccaagatcactttgttgccactcatcattgtcactatcaatgtttagcggatcaaacctgttttgtccagcacgctttcgaagcgtgaagacattaaaataatagctcacaaggtccttgatcgttcgagaaggaaaagccatagagagatgatcccaaaagttcttacctaacgagaaagggtttgcaagaataacatcatggaaaatatgtccttcttcttcagtccatcgcttggcgacctcctcacccatatcacaaagacccaactcctcaaataaacttggtccaatattttcccttaatttttctctagcttcaataacatgttgtctcacacatctgatagaaccctcatcaatgcacacacagtcatttttacttgctctatcttgtgagaatgcatccgaaaagggcatggagatgatacaagtacccatcttctcctcatcttcatgaaccataaggtccaggctagatccacatactgaattttgagtagtagtttgataatctgacaactttgaaccctgttgatcccattctggaacataaacttgatgctctggacctatgggaactgacctttgaggagaataatcaactggagatgcatgaatgtcatctgattgaaataaacccctcagtcgctctccatgttcaaagtaatctggaaatagtgatacatgagcagctgtatccaaccttgtatctccatcaatgacactgttgttgaaccacaaataatgagaaatgctacttgaaacatcattatcaggttctttcgtctgctttgagacctcaataatcaaatcacttgaaaatcttcctttgtcttgacatatattaaaactgtcatcaccttcaccatatcatcacaatggaatattttagtcaatatctccatttaattgctaagctaagtactcttaagcagcaacataatgttttcagccatcttgatgaaaataaataaaaacagctattcaagactctgagcaaatttactaagacaaagcacaaatttgacgaacgtccaattatagcagaagataccccaccataaggactgtccataacaatgactcagccattgattctacctaactgtaaacaattgaatggtttatttatacctgagaaagatttttggtgagcattctgagatggaacaatatctacaactggagcaagctcattaacacattctaattgtcttgggtgcttggaagcaacttcacaagaatcctcatcaataaagggccgcttgtttatcatttttttttggtttcccgccagtaagagttggctatatttaaaccagtggagcataaatatacaagccacataaaaagttttaaacatctaacgattgcatgtgaaccaacaagcaaagcaaacaatgtctacctgaagtaaaacaatgatagaaaaaaaaaaaaagtaactaggcaatcagggttcaaagtcaaataataaataattgttactcccattatagtttgaacataaattcatgtaacaccaatctttccacatatataacacaaaactcttgcaaattattgaggatataaaattcaggaaatatatgtacattttaaagtaaccaaatttaaagtaaatgcagcaccgagttcttggactagcggtggagactctgtaacaaaaggtggagggttgaggttccacaataagttcctctatgggtatttttggccggttgtgttgggttagagattgtatatagcaagggcccattaacatgtcgtgtgatatatgacaaacctaactattatttaaaagaaggaaagaaaaaagtaaaaataaaagagaattggataatagctaaatcattatctttgtagaattccagcctagaactctatacaaaacagagagaatcacttgagaaaactcaaacaaccaaacaaagttttaactttcactctgtatttaattttgattagtaggctcaaaaacgaaagtacagtacctgttgagagtgagataattgccttatccggcggccgatgagtgaaacggacgtcctcctctccgatctccgatctccgttagtaatatttctagggtaccgctgatgaagaaagccaaaaggccgagagagagagagaaccaacaaagcgaagatgttgtccaatgactatggaaggatgaaattgaatgaaacccactctgctttatcattgggctttttattgggcttgggctaacaaacattactaacaccatctcaaatccaatgcttatgatatactttggtataagaatcttacaaatacccatttttttgttattttatatttttactgttataatttttttatatatttttactgtattaagttttaaaaaatattgtgttttagtaaaataaaaaaacaactagaacaacttaacaaacaaaatgaaaattactataaaacaacacagaaacaactatagaacaacataaaaatatcaaaacattaacctaattgcaatgcgcaaaataatatcaactcctcaacatgtttttatattacgaaattttattatttgcttagttttgatagcttaatttatctttctatactattacattattttttttcatagaatttattgtttttttttttgacaattcatagaatttattgttacaacttcgtactttcaactttttttcttctctcttcatggaccaaattacacattattaatggtgttagagtttgaatctacattaatatggtgcataatttgtttctttttttatttttgcattctgaccttcatatttcatgaaagtccaattgatcactaagagggtggatgtcaatggtctatgccctgtttgtggtctccatgatgaaataataatgcatgctcttgtctactgtcctattgcaactcaagactaaaatacttaaaactatatcatgaaataagactaaaatactcaaaaccatatcacagagacaagacttatttgaatagcaaaagttgaatcgcaatagcaaaagacaactctgaccaagctacaaagttttcatgtaaatagcttaatctttagattttaagattaacatccaataaccgattcaatccaattagaatctaacttttattattcaatccaatcctattacacttggatatccaattttttgtaaatagattgaattaaatcggttcaattgaattgattggatattgtccactttgcatataaaagatgtggaaggaaaagggcatcaaagtagtaactcatgcttttaagaggatcctattgataga

SEQ ID NO: 15204 - DNA, 9680 bp, Cannabis sativa
tgttagttagggtgttacaacggtgtgagatttattggattaatattacgagaagtttcaagaataccctgatagtcatcaagggatatttctttctttcatgtaatctatatttcagatttaatgtatatatatgtggtgatccttggagctatggtacaatgataattaaataattattatattgttggatacctgatttattaccataaaatcaacagttggggctgaggcctctgggagtcacttagtacttcccacttggaagaatccaaagaaagagatggttcacttgaagacaagggcaaatcgtagagagtgttgggttatctttgaatataattagagtaggtcgtcgtctactcggttatcacctccccataattcaattgggttcatctacaaaagaagaaagacaaaaaggtgagtcactgaatagcatagaaatgcactttcaagaaaaaacattccaatactctaaccagagaaatgaaagagatctaacttaaagaaacccatctcctcgatataatttgggaaagattttccagggttctagaaacccaaaataaaaagaaaaaacccctaaaaacctcaaaaagtggaataagagagcgagatgaagaaaatacacacataaagactcaacacggatcgaatcaaccctaatagttggcatttgggtttgtttcaatcaactaaattcaagaatctgaattcttatagtgaataaaagcaagcatgcattttagtatggttcatagagcaataaacaaggaattataaaagtgtaagggggagtaataaacaaggaattataaaagtgtaagggggagtaacttactcactcttttgctggttggttaaaacttcttagtgaaaacggtctgatcaaagatgaataaggcagattattgtatccttactctaaaaatctttaaatggttaaaaaattgcaataggtgtttttgatcctatttatggggtcattgaggtgtataatggtcatcaaatttaaaatatcatgttttaccccaaaagtgaaaggttaatcattataggaatttgtgtaacagtcagtgtacgatctttaaggcgcggtttccaaggaaaagcaattgatgtaaagaattgtagagacagggagagatttgcacacctcgggcagaactgtcgtcatatccatgcacacacgtggatacaaatgcgtgttacctagctgtgcaatgtgaaagcctaggaagtccccatacgagcaaaagttcccacgtagacttggaggcaaattttatcccaaactttgtactaataacgtggcactttgcaagctgacacgtggcaacgaaattcaaccctgggtagaatataataccaatttgtaccgaccaggacagatgatgccaaaatacccgaataggctcaggatctcacctcgcaccaaacaatgcaagccacttgcataacacgattttagggtattttcctcaaatagtttccacaataataggaccaatttcaaatccttactttcatgtgatttacttaattacataagaaaatcttgagattcatattcaaatacacaccgatctttctcttattatttcaggactaaatgtattccttctcccctataaatagtgaggccaattcactattggagtgaccttctttttacgcactttcaagagaaaaaacactttgcaatatacttgtaacttttttgagagatattaagaaattcacttagttggatcttgtgatcttaatattctttcataaataataaaataaaaaaggagtagactattatcaaactaagggattgaacctccataaatttttttgtgttgtttatgtttttagattgttaaacatacatattgtattttttaaaaaaatttaaaaaataaatatttacaattagcacaaaaataaaataaaaaaaatcactattatttaaaagtgagaacttattgttgtgaaaaaattaaaaatttcaagactaatttgtcaaaaaaattgaattttaagtaagaatttgccaaaacttatttatttagggaccttacatgtaaaccttcaaatcactctcttactcatttgttttgtcgttttctgacaaagagcttcgtggactgttactcaatcagctcgctcaagcggattgacaaaattgactctacttagctcgtctcggctcggctcattataaaattacgtgggaaacgcaaacgcgtacttactaattaacactaatatttacgaaaacacacttatctagtagcttattagttaataaacactaaactttatttatgtatatgaaaaaaaaaaaaaaaacagcacgagcacaaagttatttttaattttgattttgaataatataaatataaattcggaaatgccaggctgagaggttcagagctaagctccaataactctctcctccactctttctctctctagatttttgtcactctgctagctgaagcaaatctcacacattttacgagaaacctaaaacttggacggaagagatcgtcgggagtagcagaagctcaagtggttcattctcgagctctattctccggcgatgtgtaactcacgcgctctagtttcacttactcttttttttagcttggttgtagcttcggtctctgctcagggatctggttccaaaagtccatggcaaacacttagcggtattgtattttcatagctctctgtattttgtgctttctttgttttatttatgttatatgctgtacttcaaggattgattgtgctttgatgagaagctttgtttgaatgctgagaaaccagtggaaagttgaaatagagttctggtttttggggttttcacgttttataaggcaatcacaagctgttgtgctgtgtcgaccgagtgcggttttcattagaattggtttatttagctctggagtgataatagaatgaaaaattgggagtgtttgatatttcttcatgcattttaatttcccggttttcattttccatggcttgatggagatatttcttgtgaatttctttcgtcttgccctgagagctggaaatagtgcatgtttgaagtgacatttctgagctgtactgatttggttgatctgcagaagacagcaacttatttttggtgggtttaaatatttcaaaccttttgggctgattgaaatctgtagctgaatttgttattttgctgttttggtcggcagccgggtttgtttttttttttttggtggtgagaaaactaaggaagaaagtgtgcaacgtagctgatcaatttaaggttcatctgcatgttttggtacttgtttctttgtgatattttgtttcatgagctcacctttgatcttattttatttttagggaaatcacctctggtcatagcccgtggcgggttttctgggatatttcctgattccagctatgctgcttacagtttagcattgattactagcttacctgatgccgtcttatggtgtgatgtgcaactcacaaaagatgctgctggaatttgtgcttcagatgtcaaattagacaatagtactgatatttcagatggcttcaataagagggataaagaatatgtcattgatgggaagcctaccagaggatggttttcggtggacttcactctcaaagagctagcaaatgtctacagtaagcataaactattgttgaattgtatcttatgctagtctaaccctatataatttgcatgtcgtatcattagcaaaagtcacagatgaactctgtgaacttggcatgtgttctaagatttgaagagaaaaaggagaaaaataaagcacaaaactcgaaagtgtaccaaacctgcaaatgggatttaatatggaaaagtaattttaagtggtgatcttcataactatatttccatgcttataatcgcaatttttgatatgtttgcccgtggcggtcatgataatatgtttgtatccactcatttatatttgaatattagatgctacacaaaagaagtttcatttggattgctttattaaaaatgtcattttctttcctatttctttataagaaaatgaaaatctggaatcattgtgttgcaaagggagaatttagatctttattaagattttattccccacaccatctcactggttgagaattgagattattgtaattattattgctatttattttttctaatttcttccattcaaaccatttaaaatttcctgatattacgatcagtttataattaatattgctacaccgtctaactctttgccttcacattgataatggatgcttttgttgtagttgaggtcttatttttttttcgataaaagattttattttattgtaattgctccattactcttggatagcacaactcgattgaatggtctagtttctatttgttgattgtgggtctttgtgaaactcttctaacttatgcttttgttgtgttatctttgcagtccgtcaaggagtctattctcgcaccaataagttcgatggaaatttattttcaattctcacagttgatgagatggctaaacaattgaaaccacgaggcttatggctgaatattcaggtacgttaggcaacgcatgttggcttatttcaaccagcttttcagcacatttgatttgtcaactttaagcatatctatacatataaatatattcaatctggtttccttatcagtttgaaccgtcccatgttttctgttttttcagcacgatgcattcttcacgcaacataatttaagtatgagaaactatgtactctctttatctaaaggagtatacatcaattatatctcatcgccagaggtgggtttcctgaagagtattgaagcaagactcaatacaaaggtcacaaagctggtatttcggtttctaggaaaagatgagattgagccttcaatgaaccagacctatggttctctcttgaaggatcttacaaaaatcaagacatttgcctctggaattatggtccctaaagattacatatggcccatggatgcaaaatcttatttggaaccacatacttctattgtcttggatgctcacaaagcagggttggaaatatatgcatcagagtttgtgaatgactttcctctaagctacaactatagttatgatccagtagctgagtacctgaacttcattgacaatggcgaattcagtgttgatggtgtgctaactgattttccaattactccatcggcagccataggtagtttatttttctctatcataagaatattggcttaccaagtgataaattctcttcatggctggttgtaggaggtaagaaatttggtatagtttgactagagatatgaagtttaactggttacctattccataatgggaggaatatcagaaaactattaggtttaaaccttattttgtttatctatggaacatgatatttttttttcttttttatctcaagatgctcacttctcaataacactgcagattgctttgctcacataggcaaaaatgccaaagaacaaggtatagcactgtatttgtttcttgttaaattctgatttgtcattttttatttcatttctaacctgttttttgcctcttgcttcagaaaagcctttggttatctcaaaatgtggggccagtggagactatcctggttgtactgacaaggcttattccaaggcaattgatgatggtgcagatgtgattgattgtccagtccagatgtcaaaggatgggataccattttgcttaagcactataaatttaatagatagcacagatgcggctcaatctgatttcagcaaccgtataataagcattccacagattatggctagcactggaatatttgcattcaacatgacatgggatgaaattcaaacattaaaacgtaagttcaaaattattctcatgtgcttactcatttaactgtggtgtttttgtaattttatttttggtgagtaattcccaacttttaatattcatgttaaggattatgggagacaaatagtgtgattttaaaagcgactccaggcaatataactttacgtctttgtaatcattttactggtggaattcatttaagatactcgttttgtttatcactgaagtcacctgaaaatgtttgttttcttcagttggagtattcatatcagtaggacagggtttgctagatatttgcttaagttgggtcttcctattttattcttaaatatttatgtagtatattgctgtagtattttttgacagtaattgatggacaagatctaatcttaagaaattatctgaaacttctgtactaatttattttctcattacatgtagctgttatatcaagcccctattcatcgtacacacttttccggaatccaagaagcatgaatgatggaaaattaatgtcattgtctgattttctagacttgacaaagaaatcaagctctcttactggcatcttgatcagcatagacgtgagttttttgggctatgctgatgagttttcaggatgaatggttttctaaagcatatttaaacataatggaaaataaaaatgggagatgaaaatattatttaacaagaaagattattaaatttcctgacaatgtttttttttctgtttttgtcattactttctttcagcatgcggcctatcttgcagaagagcagggcttaagtgtgactgatgcagtgactaaagccctgagcaaagctggcttcaacaatcaaacagctttaaaggttatgattcagtctactaatagttctgttctaacaaagtttcaagggaacaagaattatgaacttgtatacaagattgaagaggaaatccgaagtcttgatgatgattccttgaaggacatcaagacatttgctcactcggtggttgttaagaaggcctctgtattcccagataatttgttatttttgactggttctacagatgttgtgagtaagcttcagattacaaaaattcctgtttacgttgaaaccttcagcaatgagtttgtatctcaagcatgggacttcttttctgatgcaactgtcgaaataaattcctatgtcacgggagccaatgttgatggtgtaatcaccgactttcctaaaacagctgctagatacaaaagtaagtacatagttcaatgctaatttatatttcctctttccattatttgattgattgcaaatccatgtgtattgtgtaatgctcttttgactagcagcctttatgctagtcagtttatttatttattctttctttaaatctttttatacctgaatctctgtaaccattttgccttaattcaatatcaaaggcaaaattatcatagattagagaaaattcggggaaaagtaaaagtaactactgctgttttctatacaaataaaggttagcaggaaaaaaataaaataaatagaagaatggaaaattataatatcattctttttggttagtatttgggaagaatagagctaacagatggtgcttgaaaatattgcaggaaaccgatgtttgggtctaaaggaaacacctgcttacatgagccccgttgagcctggcagtcttatggaactcatcactgctccttatatgccaccatctgaggcaccaaacccagtcttgacattggatgatgtgtcagagccgccgttgcctcctgtctcaccaaccagttcaatttctgcaccgaactctacagcagcggcaccagtatctcgcaatgcacagcctaaaattgctccagggtcatatctgttgagcttagctatgctcctttctgctcttctgttctgaagccatattggtccatagctttgaactctctttcagcacatgtatttcccatagcatttccttgctaaatgcttggattggagattttggctgctagaaaatatggctgatccattctttttgtctcctctttcccctctcttactgaatgttggtgatttcccctgttgatgttgtagttatgttcattcttcttccaaatgtaattttagggatacaaactatttgagagatacatgtgagattgaatattttagttagcattttcttccttttcaattgtttcaagacatgtttataagtattctttagcgtgtaatataaggtgaatattgagtcctaaacatgaagcattttacatcttcatcgtgctcttttttcgatttgttttatcttattattaaatcttaaaaagttcacttgtaaaaccatgttagaaattgttatttggattaaattcccctctcccacgacgcgagacgggatttgcgaggaaaacttgtggtatttaaaggatcttgcaatattaggtaaaagtgttcttgtagtatcgaggaagacacacgatattaaaagaaaaggcaagaatacatcaatcaacgaaaataaaccgtcaagcatattcaagtatcattaaaacaagtgttatagttattttataaacattataccaattgtggttgtaaattgtagcagtctcattatgatcgaattattataacctttacctactctctataaatcggtgaatcttctccattcaaagaaggatgtgcaaattatattaaaattacaaagatgaaacctttttcaaaagtgaactagacaggctgagttcaaaacttctactgaaccactataatttctgtgtctatcctattacaatcttacatactcccatatatgttattctatattctatgaaatatttgatattctaagtgagtactcacatgtttatttttgaggatctttgaatactcacatattttttatattgtttaaatttatccgacaataataattataaattaaagtaaattaaaatcgtatttattatatttttttaattttaataatgcatactacataaaattcaaactctcaaagattcatttgatttttttactattctatgaatagagataattttttctcattcttctataaaatacttcaagaatgttgtttaaattattatcactacttgattgtatatttagaatttttcacatcatgttaaactttaaaagtgccaaatctcaccgctatgtctaaaagaataaatgtgacctgttaagaaattaacatataattattttacatacatcaaaatattgtcactgttattgaagaattgtgtcatttgaattactattattaaattgtcaagtttctataaaacgatttgcaacgatttttatagttttgggagaaattttgcaaccaaaagcaactttaagagggaaaataattttaattatatatatacgggtgattagttaatagttacgttaaaaatgtaactacgattgttacattaatcttgattattggatggttatacttaattaaaaaattaatatattagatgtaacttgaaactacctttcatttattattatgttttggtttgatataaaatactaattaagattaatttatttaattataattactaattaatttttacaattacttattaaataggttctttgagcaattaatattttttttttgcattcaaattattaatatatttacaataaaagctcctaataattcaaaaaatttaaacatatgaccttaattaaaaaaaattaaagacaataaaaattaataatttttttaacgcattacaaaaaaataagggttaatttcacaaa

SEQ ID NO: 15205 - DNA, 5642 bp, Cannabis sativa
tattcctttttgttcataaaatgacaggaactgattcaaatccgttctctcttgacgcattagctgtgtttatgtttcgagtgcttcaacgtgctaatcatccagtatgttgtcatgctccttgagctacccttcttttcttcagattattgctatattttttgatctaagtgcgtttttgattcttcagggaaatttggacaaggcatctccaaatgctggatatgtgctgcttatgttttatcacctttatgagggaaaggtaagatttcatttttttctccttgtttttttctcttgcatctgcaatgtcaatgtagaacctgtagttgatgttctatgctatttaattgacatttttcagaatcgaaaagagtttgacggtgaactaattgagagatttggctcaataatcaagatgccattgctgaaatctgataggtaattttagttccgataatgatttttcccttaattctctaattgaaagatggtattttgcgagttatttgcaggtgaaatatgatttcaaattgtcgtactacaattatattactttttatgtgtcctttgtattactggaagaactgagtttagggagaaatatgaggattcctagtagaggaaagaaagcactagagatatgcagaggtgtcgagactaataataaaagtatgtagaggtgctgagactagagatatgcagcttcttttcagagatcagcttagtttccacaaaaggagcttcacatgagatcaatttgctctgtaaagagcaatagtctgtaattcacatgtttctgtcttcagtcaggaaaattcaagcataaatctcgatgtgatgctaattgtgtatttccgatttgctagaaccttatttacagaatgattttgtttacttatcacatttcaactgaatatttcatatatgctggaaccatatatagtcttgttgtctttgcttctcacatttcaactgcacagttccaatttgctggaaccttataattttatttacttgtcaattctttatacactattactaaaatcatataaaaaataaaaatttctattaccccatttgttcttgtattaacctttattttttgtttccttctttccataaacaagagggttcttttatgttagaaagtaaaaatgtagcaccatgttttcaaatctttttgctatttctgcatctgcaccacacaacttgagcaatattttgatgtgtcctatgcaggagccccctacctgattctgtaaagtctattctagaggaagggataaatctttacaatcttcactctaacagacatgggaggtaccatagtttcattacatgtttgatgatttcatcgtcattatatgtttagtttggcttacacagtcccaaaatactatatcttatctactgaaggaaatataatgtctagtacgtgcatttgttttaacttatgcattgatcaatatgtgtgcagtcactttggaagaatcattaatgtagaatattacaattgaagattgctattgtaaaccaaatcttttgagagagtttttttgaatctatagcatttcttgtcggagtttctaatatcttatgtatttgttatactagattttctttcggaaactttgttaaatatgatatagtatattggactctgtagtgaagcatgatcaaacaacatggtagctattcttatgttcaatgagaaaagacttattgaaatagaagaaaaacaattcatcgtttcaagtgcctctgtgcttgtttcgttgtgtctgcgagcatttgaattttggattaaaatgtagaggaaattattgatcattatagcactagaaatttgtcttggaaaaaaaaaaaaaacactacagtgaattgttttagtaccccaaatggttcttttgtgtctgcagcccgtgttatgtcattgcttctatatttgtttctttgctttatttggtggcatagtggtggctaatgttggtgagttttatttagattggaatctacaaaaggcacttatgtaaaagaatgggcaaaatgggagaagcgattgcgggaagttttacttggcaatgctgaataccttaattcaattcaggtcagtatctatctctcattttctgttaaattgatagaagatcattcactgagttcaacccatttgatttagcaacagtagtagtgatgaccattgcctaaataaatcttcattccttgttaattctcaggttccatttgacattgctgtcaaggaggttttggaacaactgagaaagatatcaaaaggtgaatttaagacgccagattccggtaagaggacatttggaaacattgtttatgcagctgtcagtctgcctgttccggaaatgaaaactctactcgataatgtaagtgaaaattcgtctgctaaattttcgcattgagaactttggttgaagtgaagtttattttatttttccttttgaggttcttctcttgcattttaaatgaaacgttattagccaacctttctgggctgtgtcttggccttgttgtagggcatcttacataggaatagatttgatacgagagttccgttgttacttgttactatcaagtttcgaattgtttttatatctaatcttctactttctagttctgatcctgaatttatgaagaagaataagaaagttgatctcagtgtttctacaatgcctgattccatgcgacatctttgtttttctttttccaacagatattagaaaagcatcccgaggcgaaagctattctcggaaacaaccttttgaagaacctaatgaaggctcatgttactctggctcataagagaagtcacggtgtaactgccgttgctaactatggcatcttcctcaacaaggaagtccctgtaaaatttagtgccttacttttcaccgacaatatggctgcgttcgaagctaaccttggctctgtcgaaggcgagcaggtaatctcgaaaaaccagtggccccatgttacaatatggactgctgagggtgttctcgccaaggaggccaacacattacctgaactgctctcacagggaaaggctacctgcatccatatcgacccgcctgtcaccatttcgggcacattgaatttctattgattttttattcctttcctttcaaagtgtactgaatgagagctttttttacagggaaaaattttgatagcagaagaatctttaagttgagaaatgtttgtatgtacatacaatacaggcaataaaatggcagtgataatatattacaagtcactcaaagtgctaatgtgttgaacattcacagggtgtgattaaagtgaataatctgttgcataaaatttttaactcaagattaaagcattttgtttgatgaaagctattaaacacatgggggtcattttgatagtgaaattgaatttcattggtaaattttcaagaaaatgtcatttcattcgtaaaaataaagaggaaattatattgtatacccacttcactttatttgttttaatttttatttttgtttttatattttttaagatatacttacttttataaatggtgttgctattagacctgttaagtcaatgcaaattatatgctagacttaagtagagagtgaaagtatattgaacaacttactcataaaaatgaatatattttaataaaatataatatgaaagtatttttaattaatgcatacaaaaacaaactatttttcaacttatctcacaacaaaatttaaagacatcttgtaattataaaaatttcctttttttttttgtttaaaattgaagaaaataaaacaagggtaaatatcttttcgaaaaagtttatcaaaatcaagaagattaattttagtagattctgaaaaacaaagagtcaccactaatatttgcttttgaccaattttaggaaaatgtaggtgactaatcctttgctaaaaggctacaaaacactattcaaaacgtgggaagggaaaaggaacaaaactaagtgaaaattttccaaaatttcataatcatcagcataaaagtgcttcatttgtgaactttgatactttcaacttcaacatccatagtgatgagttgcacttttaagcacttgaattacaccatttttctcactttatcattctgaatgatgcacttgagctcgcgccacagctaatgaaggtaagatagccaccgtctcgccatcaagagcaagaaggtcaccattcttgaagcaccttgcactgaattttgcactgttcaacacacagcaaagacaaaatgagatgagtacttagacatgaatcccaaaatggtatttgaaaaattatctttggcagcttaggatggaacttacagatatttgttattgatttttcttaaggtaaaagctttcatctcagctacaatcacttctccaatatagaccggtaacttgaaatgtaggctctgggaaacatgtatagctccaggctacaattcgcctcggccatgttagcaaagagattagatagtttttataggatcatgttcttaaacatttcacatcaaatcaaacagttcccagaaactttttttcgagtagacagttagaaatatcacaatggggtacaaatggacttttcccttttatgtctacaagaaaataattgaataatctgaacaaacaaatacaatgaaggtaagagatggaaaatctaatggagacatctgagtttttgacttacaaaattagaggataggattcgagaaaacaaggacgaaacaagcatcccgtgaactaatcgatcttcaaatccagcatttcgagcagactcggtatcaaaatgtacagggttatcatcgaaagtaactttagcatatttcactagatcttcattggagaaaattcttgtatgctttaatgaatctccaactttaagcaagcaagatgctgttgatgaaaagcctctcaaagaggcattgtggattgagagtagactcctttttatcataactgcaaggacttgaaagctaaccttagcccaatattctcaaactaaaaaaattaaattgaaaaacatcaacatcatagtaaattaattacttatccgttgtgaagaagctcaaacataatattttaagagcataaaagcatgaatggttggtactcaaaaactagtagtatgtgctctcacttgtgagctatggcataataggattaacatcaaagttgatacaattattaagataaaccacctaaccaataacattgtatttcttttttaattcaattaagattgtacagctcacaattatcataagcacaatttttctgtatgtttatatattatatatatacaaacaaaataataaattactgataactaagaagtgaagactttccaccgcttatttaccattgctatgaattttggtttcacatagacatttcatcaaacacttagaaagcaaactaaaaatagtgtgtgcacaaattctccaagcattaaagaagaaagaaatgtgttgtaaggaaacccaattggcttacttacctgaatccaagcatcagtggactcgtcagtctgatctaacgcagaacctgagaatatcaaaatatttgttattttttgttcattgcttagccaaagtcatat

SEQ ID NO: 15206 - DNA, 3838 bp, Cannabis sativa
gagagagagactaatgaaaaggcatctctgtgtgttgcgtacaaatcaaatgactaaaaaacaatggtatttaatggtgcatgcagtagtctctctctctatatgtgtatatatgtggaaatcagtgtgaagaagatcatttcatttataagaaaagaaaagtcatcaacatccctctttgtctcttcccttcagacaacacataccacatacatatatatatatttattattattgcatctttttctttttacatatatatgatatttcaaatgaataattatttaaaatgatccacacaagaggaaaaaaatagctatatataaatatagtaagcaggtttctttcaagcatgcatgcaattattaatgatgacaatatatattaatgagatcaggagataaaatgagaaatatatatatatataaatacatatatgggacgcacaaattgcagaggaatcttcctcaaaactcttttttgtatgcactaccaaacagtaatcaacaaaggatcaaaccaagaacctaatcatcctcatcatataccaatatatatatatatatatatataaatttatattaatataaggaatatactctctctttttatctttctctaaatatacatatatatattcattattaaggttaatattgtaaatgtgcattaatggttatggaagggcagttcttaattattaattaattgatataagatttatattacttgttctaataataattaattgttgttgcatatatatgagcttattgaataatattgttccacgtggattaaatgtaaaaatattgagctatatataagaacatggactattccactcatcactagtcccttttcaaacatttgagtttactaaaccaattgatacataggaaaacatgaaactagttacttccatcttccaatgctcttttaataactccttaaaccagttgattttcgccaaaatctgaaaaatcttaactctttaccagtcttgagctcaaggtagacagaaagaacaagagggcgatgatcaaattgaccttctgttaaaaaaattgcttcaacatttgtaaaccttatgaatcttttagtcacaacatgaattttttgtgattaaatgtgatttttaatcacaacaaaatgttacttgtgactaaaatacattatttagttacaagttgtcattaatttagttttagtcataataaatattatgactaaaaatacatttagtcacaacaaattgtaacttttgtgactaatacctttagccacggaccttttagtcataacataagaatgatattttataattagtcacaatttttttttacttttaatcacaaattttattgtgactagaaataagattttttttgtagtatttgctgttattaatcatgataactctgcatggagtgaagtaattttacaacaatatatatttagttttgtttaaatgaatgttaatataatttttttttttaaaaaatgaatgttaatataattaagtagaaaagtaagttattattattatcattaatacttaatagtagttagagttgatgaatagtaatatatatagataatagcaatagtaatattaatagtagaagtaggtaggtattactgttgacaaggtaggtggtgcaaccaattaattatgcatgctgccatatatataaattatatatatttctctcaagtctcaactcatatcatcaattaattaatgaagtagaatatgcttgtgggaattggaataataatagtaataatgtatgtatatatatagagagagaatattttagagttaaaagtagaaaatattaaggcatgttaagatgtactttgtacatatatttggcaaatgggtatggtatatgtgcaggagttatactaattactaattaagccagatatatcaaactatatattatatgatatttcttaaaattaattatattattatttacacctctcataaaggtgctaactaagtactgctgctagctttcagtatttctctattattttatatttagaaaataagaagggtacttattattattactgtacatgcatgtatgtgtgtgtgggctctgagatgatttacacaagcaaagtaataaaccaatccatttctttttgtttctctatctctcaattctcatacatataatattgtacatatttttcactctaccccacgcacgtgcgcctctctttgatttacctcttttaaatttaataatatcactcttatatattaattggaaataatttattagggttttaaatcatattttggaatgtagaaatgaattgatggatataagtataattttacgtgttaaatatagatatatcatatatatatataaagagagagagggagagaaaaggcatctgtgtgtgttgcgtacaaatcaaatgactaaaaaacaatggtattaaatattggtacagcgcatccagtagtctctgctactcttctctttcttcaatctctaattaatatcatatacaaatatgaataatagaaaaaaaatagttgtgtgtatacattataagcttttcttccaagcatgcatatatattattagtttgtacgtccgtagtagatgagtatgtatatatacaatgatatggtgagatgagatcaaatgagatagataaatatagcacaaatattgcagaggaatcttcctcaaaaccgaacagtaatcaacaaaggatcaaacgaagaacataatcatcctcatcataccaaaacacacatatatatactcattctttctatatagcttgattgttagactatgaaaatgttataagggctagtaaattgtgagtggtgagaaaaattataaatatgtaatgtgtaactattattgaatatagattgagaaaatagattcaactttgatttaattgggagattgacactgtcttttaataaaagcattaatatacaatcaattgtatcgagatacactttttgagtcagtgctaaacttcaaatgcatttttcgaaacagtatcaatcttcaattaaaccaaagttatattttttcaatctatattcaataagaattacacagctacatatttatagactttctcaccacttataatttactaataaacccctacagcattttcataatctaacgtatatatttcattgttaatggcaggacagacattattatatatatatataagtacctctgattaaatattcttgttgcatgagctctagtacttttattgaaactaaatgtgttattgatattattaatttaattatttttacatggtaaaaaaaacattttgttgtgttgttatctttatatagacttaaatataatatttctgatctattcattgagctaaaaattgtcaacaattgtaagaaaaaaaaaagagaaaaattggagtttggccttaatattataattcctttgagggtttttaaggaacaaccatttattatgataagggtagctaggtcgacctaattattagatatgtatggtcctttctagtatgggcagagatggatccacttgggggcctagggagctattcagcccacaaaatatatttgtatataatttttaaaataaaatatgatttttttactgaatttatgattgttttgtagagttttgtaattttttaaaagtaaaaattatttccaaaaccttaaaaactaggggtgtacgtcgctcggtttagtcgggttatagcatatttttatcaacccaatataaatatcgggttgcgaatatttaatcgtaacccgcccaatcaaaaatta

SEQ ID NO: 15207 - DNA, 12338 bp, Cannabis sativa
ttgattccgctcgtaaactcgtaactcgtaaatttgtaacacttgatcttctcccgccaaatttatctcctgcttgccttcgggctttcctcttcttcttcaggatcatgaatcgcggtcgtggtcgacgaaacccccaaaccaatccctctccggatggtgcctccgccggtcgtactcatcgtcctcatgtgagtttaaaccatgtgcttctgcttcttttacttttttagtatttgaattgtcaaaagtctgaaacttgggttcactctacttttctagggtttgaacattcacattaaatttggctttgtgtcaaaaacctccgaaatctttttgttcttttagatgagaaatgattagggtttctattttaatcattaaatttttaaattttctgttttaagtcttctggtgggcttttactctacatgtgaaatggaaatatgaacaatataatattctttttttccacaataaggagaatcatacttccgttcaatgtagcatttaaaagctcttgtttctgaaccaaattcagaaacccaattataatgtcacttttatattttgttgtttatcgttgaatgcagggatcaagagcgtcttcaagtggaggtaaaggcaagtttatgtatgttgctaaagatcaatcaagatcaagtccagtcgagccaaaggctggtactctggaacaagataagtgtttgattcatactgatgtggtccccaaggagaattgtcctgtattagtttctccttcaagtagaagtaaagataaatttgtctatgttgctaaagatcaggcaagatcaactctaattgagccaattactggtactctggagcaagataagtctttgtttcattctgatatggcccccaaggagaattgtcctctaatattttatccttcaagtcgaaggaaagataaatttgtctatgttgctaaagatcaggcaagatcaagtccaattgagccaatgacctgtactccggagcaagataagtcattgtttcattctgatatggccctcaaggagaatagtcctctattattttctccttcaagtggacgtaaagataaatttgtctatgttgctaaagatcaggcaagatcaagtccaattgatccaatgactggtactacggaacaagataagtctttgtttcattctgatatggcccccaaggagaatagtcctccattattttctccatcaagtggaagtaaagataagtttatccatgttgctaaagatcaggcaagatcaagtccaattgagccaaagactggtactccagaacaggataagtctttttctcattctgatatggcccctaaggagaattctcctccaagctgctctgctgccttaagtcataaaggaactcagattgcacaatctatagtgaatttgacaaatgatagtgtgaaatcaaacgagttaaatatttcttccccggaccttacgccttctgtaaattgtggcaaggttggaacttcatcattgaagggtcccaaacctctagcaagtgataagaagtctgagaattcagagccctcatctgtctctggtgcttttgatatatgcccgcctaaagccaccagttcttctaagttaaaaccttctctatttgcaatgaatcgagagaggcggagtcaagtgaaacagacggatagtaaaagtggatttgtgagaaggcctggaatggttttgctcaagaacttcatttcacttagcgaacaggtgttgctttatttactctatttcttacaagatagcttctggagggacctctatcccttgatttatttgattactaacataaagtctacctcgtaataatgtgtgacatcttttttatgaccacggatttttcttaccttcgtttattacttctatggtgttactgtttcttatgtgtttaggtgaaaatagtgaagcgatgccgtgacttgggattaggccctggaggtttctaccaacctggttaccgtgatggagcaaaactgcatttaaatatgatgtgtcttggcaaaaattgggacccggagtctagccaatatggtgatatccggccaacagatggtgcaaaaccacctttaattcctgatgagttttatcaattagttgagaaagcaatcaaggattctcacgcccttatatgcgaagaaggaaaagttgtgcttgcgaatgctcaaggcattcttcccaatatgaaaccagacatttgtctggtaaacttttattcagcaaatgggcgacttggtcttcatcaggttcctctaatcacactttttactaatatttatattattttctcttgaaattgattatcacaggctttttataaactctaaaatatactgtatatgcatctcgcgacgatgccttctgtgcaggatcgtgatgaatctcctcaaagtatcaaaaagggattgcctgttgtctccttttccattggagattcagcagaattcgcgtacagtgatgaaagggatggcaaggtagacactgtcactctggaatcaggagatgttttgatatttggtggagaatctagaaatgtttttcatggcgtggcttctattaagaaagattccgccccccaaactctattggaggaaactaatctcaggcagggccggctaaatcttactttcagacagtattgaaatatctagctagttgtcattgaagtcatgttagctgatggtggaacaattttgtactctttgtacagtttaatagttttagttcaatgaaattgtgttttgatataatgatattagatgcagttgttaagataggacttgttttgtaatccgtaccttgtccaaggaaattcatttttgttttccacattattttaaggttacttttcatttttgttttcaacactatactaagaagtatttaataaatctaaaaaatcttaaatgtgaacctttggtttgatgttagtctactccccaaaccctctacttcagtaaagatatcattgtttttatcatttgtctaaatatgtagatatggattagtagtatcatgctaaatctgcgggcacgtacattttatattccttaaatttaatacttcattattactctaccaacaagaaaattaatgaataataaatgctcttcattaaattaccaattattatcattattttgtttggaagggatcaattaaaataaaaattatttgttggagtgaaaattcaattcaaatggttcaaaatttgttgtaaaataaataataataaaaaacgcgagagagagaaaaggaaaactcgtttttcagtgacgacagaagagaaaagagaagagagacgaagtgagaggcataaccttctctcctctccaatgccagctctcactgttcacattgccatctcttcacacacccacacctgaggatagcttttccgtccctttcgccgggaaaagagaaccagaaaccaatcaagtctgccaatgggccggaattcgtctcctcctcctccagatggttacgacggtaatgtcaacaccgtttccgtctccggtgctggtaatgatcttggttctcactcgattggttctagctttcttttcaagcggaaccctaatcctatccaccagcgagatcgaggcaagacattgccggatcgcccttcgtcgttgttgttgcggggtgtccgatcgcatcccagtcgtttcaatcgtaaaggttttatgtcgttgtttcctttcaaagggaagtcgacgttttatttggtgataatcttcgctgtattcttgtttgcaatggcgtccatggtgttgcagagctcgatcacgtcggtgtttaggcaaggaagtgatagggggagattgttgagagatggtttgaagctcggaagtacgctcaggttcgtgcctgggaaagtagtacgtggactcgctgaggggaatggtctcgatcatttgcggaatgagccgaggattgctgttcgggcgcctagacttgctcttgtgagtgttaaactgttacttgactttgctttagtttctgaatgaagatctaaattcgattcttaatatgtggtcatgttagtgtttataaatttgaattttggtttatggaagtgtttgatacttgttttgttgataattgatcgtcattctagtgatgggagtgaattgggactagttgtataaactaaaggcttggcaactgtactgaatgcttatgtgcaattgaaatgactcttctgtctctttttctcttggtagagggggaaagatatggcttctctgtatcttatttgaagttttcttaagcgttaggggcattccattgcttccggtgggagttttttcttttttttttttttttttttctttttctcctgaagtcgggttttagatttctggattccatttccgaaatttctctgatggagtccggaccagtactacttcttatgaagttagatatgatttatggttattaattgatagtttgaagcagggaatgactactgtgattaagcatattttcttatattttaagtatagctggcacacttgttataattcacaaatcagaaatatcatgttcaattctacgttacccctcctcactactgagtactgagctagccttagtgctaaacaagggttttagttcaggaagaagttcctttttatttcgatgagagaggcaagtttgatacttcaaagtattgtttcctagtacatcaccgttgcatttgtctgtgttcagctttatttttttgatgaaagagacagtttagaaattgccttaaccttggaacgtggacatacatataaaggtcccgctggatcctggaatccatacttgagtccttcagcatttgaaaatatgtgtagatagagctttcaatggtttatggaaatgtgaacagggagaaggctatgatcatgaaccttccctccttggtctgctcttcttttatctatgtattatgatatctgcaatattattatccaatagtgatctatgttatcgaggtattacattatagctttagcgtatgatcatggttaaattataattttaatgtactttcatgagtataaaatttagcttagattcctaacttttgatatccacatcactttttgtatcctgcagaaatggggatttaatgtgtgtgtttcacattgtattaaattgggattcattttgttgaatgacagatattaggaaacatgaagaaaaatccacaatccctgctgttaataactgtgttaaagagcatgcaaaagcttggttatgtgcttaaggtgaggttttacacatttcatcttttagttatttatcttttataattggtattgtaaatattgctcgtttcctgagaaaaaatgtttcaatgattgtatataaatggtatggcatgatgctgtagtagaagcgatctattttcttattagatattataataaaaaaagggggccaaggagttctttaatatacagtgtttcaatttggtttgaaagcttgtgtctctttataatggctttttgacagatctttgctgtagaggatggaaatgcacggtcaatatgggagcaacttggaggccagatttcaattgtaggttctgagagttatggacacattgattggtcaatgtatgttttcctctactctatcattgtgttttttatttttgatgaagttatttatttattgcttctgggtttcccaacttcactgttgtggcttgaaaacatctatcatttggtcaatcagggaagcttcaattctagagagggtcttctctgtttctttgtttgcatagactgatcagtggtattttattttcatttctctgtagctttgaaggtgttattgttgattcgcttgaagcaaaaggggctatttcaaggtgggttggtttgatagatttttgtagcttccttgacgtttacattttaggttaaattgcttttttttttatttcctttcaaccgactggttagttcttcttgatgtccttgttgacggatcttgttacatttcatatttttcatttccttttatttaatattttaggcgataaatttctttagtacatgagctatttatcttaaatattattttcatatttgagaggaaaaagggagagggatggatattctttcagtgaattagtttaggaatttatcatgacttacattgatagttaagaagtaggaatgagacgagcttataatgaccaaatatgtactttgtgacaatcatcaatattaagtttgttttatttgaagattcagtgatcgttaagttttatatttgcagccttatgcaggaacctttctgttcagtacctttgatatggataattcaagaagatacccttgcaaagcgtctttcgatgtatgaggaaatgggttggatgcacctaatttcttactggagaagtgcttttagcagagctaatgttattgtgtttccagatttcagtctgccggtagatctgctttctttctttttttttaaatgttatgttgcctgttgttccagtacttatttgtattacttttcttaaatttaattgcttcctgcatccctaatcagatgttatatagtgtgctcgactctggaaacttccttgtcattcccggatctccactagatgtttgggctgcagaacgctacattaagagccaatccaaaattcagttaagaaagaataatggatttagcaatgatgatttgttggttcttgtagttggaagttccactttttacaatgagctatcatgggattatgctgtggcaatgcatacaataggacctttgctaataaagtatactagaaggaaagatccaggggggtcatttaagtttgtttttttatgtggtaattccaccgatggatatgatgacttcttacaggtaattatttctataatctgcattaaagataaaatccttttctcttattagttttaaattatcttgcatcagttctaaaatgcttgattctttcttctcttttcaaatggtcaatagtaatgactaggaaaagctctgatgtcccaagaaatacatgtacattgcttggtgaaaattagttccttaggaattattgcatagatgagcatacaaattttgcctcatgtagtttttctgtaacgtaccttgtaaataagcttttttagattttttttttgacctattatgtttgctgaataatgctctaggatgatttgaatggtggatcagtgagataagttttatgttaaatttatgcaaacctggcagtggcaagtaagcttcacaatatttttttgagagaaccttttttaaatagctttttgaattgttgagattattaattttattttattttaactttaaaaaactttaaattttaatggcatcgctcattccccagtgtaatgtttattttgtcaataattgtttgttttcttataaagataaaaaagaaaaggcagtttggtgatgaaaaaggatcagaggatggataatactctttatgaacattgcgattagatatttgtcttctggtgtgttgaattgacaattgacagaagtttctagtccttgctctgggggatacattgatttattgattgaacctttatttaggaagttgccgcacgtctaggacttcaggatggttctttgaggcattttggattgaacagtgacgtgaagagtgtgctgttaatggctgacattgttctttatgattcctcccaacaagttcaaggttttccaccattgcttcttcaagctctgacttttgaaattccagttgtagcacctgatttacctgtcttgaagaaacatgtgagttttattatcaatatatttttactgtttttaatttaagaaaaagagataccatgatttacaagattagggattttctataatttttatttagtttttgaaggaccttctaaattgcaggtagttgatggagttcacgggatattcttttcaaagcataatccagatgctttaatgagggctttctcactccttatttcaaatggaaaactttcgagatttgctcagacagttgcctcctctggcaggcgccttgcaaagaacatgctggcatcagaatgtatactgggttatgcacgacttctagagaatgtgctcaatttcccttctgattctttcctgccaggtccggtgtctcagcttcattctagggtatgggaatgggagttgtttcagaaggaaattgatttgaaatatggtgaaaatctaaaatatgacgagggtggatttttgcttcaaaacttgagcgttgtttatgccattgaaagagagctgataaattctgctaatgtcaagaacatctctgaagatgggactggaaatatggaacaagatatcccacatcaacttgactgggatgttctagaggaaatagagacctctgaagaatatgagaggttggaaacagaggaggtatgctattgttttcactcttgtagtttttggtttactataattctttcccgattccaccacttttcagtcttttactttactatgaaatattttgtccttatccgcagcttgaagaaaggatggatagaaactctggtatatgggatgagatatatcggaatgctcgaaaatctgaaaagcttaagtttgagatcaatgagagggatgagggagaacttgagaggacaggtcagccagtctgcatttatgaaatatacagtggggttgcagcctggccatttttgcaccatggttctttgtaccgtggactaagtcttgtgagtacttcatgtataattatatatttaatatttatgttagtaagtcttgtgagtactttatatataattatatatttaatatttatgttaattttgttcatatccatgtcaacttttttactttccttgtatttttgtacaatctaattgtatgttaaagttaaaggaacttaaaaacattatggaattctaatctatagattggtttagctagagagaggggatctaaaacataaaattactacttacaaggctttatttcaagaatcattttatttaacagtggctgaccccttttttgctctttttgctttggtttgtttcttgcggataccctgtacccctctttcttgtaaatttcgttcttgatatttataatacactctttcttacagaaaaatgtagattaaaaatgcaaaattaccactgagaagtcagagaagttacaagtgacaagcactcatttgtggattttttttttgtaatgtgtttatatgtgttatattgtacttgcataattgagttcttataggcgtgtcttttgtcttctcacccttatcagaacttttcaagttagattaagtcataagtattgaaatttgcactagaagtttgttgttacactacttattgaaattatcctacgatgtatgtggcagtctaccagagcacagagattgagatcagatgatgtaaacgctgttgctaggcttcctattttaaatgaaacctattatagggacattctttgtgaaattggaggaatgtttgctattgcaaaaaaggtggataacattcatgggagaccttggattgggtttcaatcatggcatgctgctggtaggaaggtatttaatttatttaatgaattttacttttgacttttatggaattcccttaatttattccgtctattttttctggtaagtattagaaacttttcaattatgccacaaagatgctgctgaacctgataatgtcatctttatttttcgttgcaataaatgctgctgtaatatttcttttttcattcttgaaataaatgtttacggtttccttttcatttttgagaaagcaggtttcattgtctacagaagctgaaaaagttttggaggaaacgatacaagagaacactagaggagatgtgatatatttttgggcacgtatggacatgaatgaagggtttcaaaatgcacttacgttttggtccatgtgtgacatcttgaatgggggatactgcaggtatgtattttgacgtttggtttaagtagtctttaagtatttgtatagaagagaaataagcgagtaactgcgctactttagtacctgcatcaggaacaatttaattaatgttctgataattttgggctgtgaatgaaccttttctttgcttaaaaatgcttcagaaatgcttttgaagatgcatttcgacatatgtatggcttgccatcacatattgaagctcttcctcccatgcctgaagatggtggtcactggtctgcgctgcatagctgggttatgccgaccccatcattcctggagtttgttatgttttctcggtatgattctgaggctcaagcttgctatttttattcttacaggcattttttcttctttattcagtgatactgaagcttgttgctgaatttgaatggagttaaattgacatatcataaatgaactgcagaatgtttgctgattctcttgatgccttacacaccaataatagcaaaagaaatatttgtttgctgggctcttcagacattgaggtatgtcaaggcatttagttttatattcctggctcgttcctcttctattttaacattcctccattggtttatacgatgaacagaaaaagcattgttactgtcggatcttggaagttcttgtcaatgtttgggcttatcatagtggaaggaaaatggttttaatagatccacactcggggtcattacaagaacaacacccagttgagctacgccaaggacatatgtgggcaaaatacttcaatatttctttgttaaaaagaatggatgaagatttagcagaggctgccgatgatggtgatcgtcctagtgagatgtggttatggccattaactggggaggtgcattggcaaggtatatacgaaagagaaagagaacaaaggtataggttaaagatggacaagaaaagaaaaacaagagagaaattatttgaaaggatgaaatatggatacaagcagaagtcacttggaggatagatagcttacaggtaactaagatggtcaaattctgtttcatcatcacttgagactaaggcaaagttgaagacctgaattctattaacagtcactgaaatctatctttttctactcaggactatttaagtgacttcagggtttagattaattctttctaacagcctcaacgtagtccatattgacagattttttttcttcttgctaaatatacatacttaatgagagcggagagggaagcttcgcagcaattgctgctcgccaccatttgaagtattcattgattgccatcacaaatggaagagtgggtagcagaagattcttgaggagttcaccagcacttgaaaaatatattttttcttctattcagaacaatcagtttagtgagtatatgtattcttttattgatgtatatgttgtttttctttgtcttttgtttagaaaattcaaaagcagttttggttgatataaaggtgattaatactgtaaaaattgattttcttccaaggagaggaaaatctttgcagttttcaatattagcttacacatattggatactaaacaagaagagttttgttttacttttcccaaaagagagattataagttttatgtggcaatggcagttgttttacaaactcgaattagaaaagatgtaaatcatcaagaaagtcgtccatatagtaagctttctagatctggctttgaattatctctaatgtgttgtattctgaaaaatatttgaattatatagtgtggtggtgttgaaaagggcttggatttttattggagttaatatcactcgtagcttggattatcatacagtcagccttttttttttctttgaaacgatcattcagtcagcttaaaccttgttttttttaacaaattaatggtacgagtttttataataaaattatggactcaaattataatttaagagcattgctatttggtattaatgatacttagtaacaagatatcttatgattgattaagaacactccataaaagttgatattaaattatataacatttgaggatgttaaatattaaatattaggcatcattagcatttctgagaagtttattatgcaattgaggatgtcctatgtactttaatttggagatattattttaatttaattaaataaaaagtggtaacataatataaaaaaaatgttaaaggacaccgtttaatattgtgaggtataatgttgaaattcagatcacttattttatttttaataaagattataggctaattagtaatttttctcctgaatttttatcaaat

SEQ ID NO: 15208 - DNA, 4026 bp, Cannabis sativa
tttaagggagagcaatccccaccctcgccgcgccccgtttacatccctaccaccagctaatgctcaacctgttcttcccaataataatctgttacctctgaatctcagattggatcgatcgaattacactgtctagaggtctcttgctcttgctgctgctcgagcgtatgaactggatcgattcatccttggtcagaatcctccaccaccaattcaacttgcaggtaatgttcctaaccctgctcatcaacaatggcttcaacttgaccagttcttgatggattgggtaatgaattctatttctaaaaacatgcttggacatgttgttaattgccaaacatcgactgagtttgagatccggactacgttttcccaactatttgctactcgatccagagccagattgcttcaactctgtagtcttcttcaaaccaccaagaaatgttcacaatcgattgaagaatacattcttaagatgaaacagtaagcaaattccttgtcagcagctggacacctttattagatgatgatctggttttatacattcttggaggccttggatccgagtacgaagctgttgttgttaacctcacctctcgcacagagcctctcactcttcaagaagtacaatttatgcttcaaagccaagaaatgcgtatttagcaactcacctcagattcgcttgtcaatgttcaagccaacatagccgccacaaatttcaacaatgttggtcgaggttctaacagtaattgtggtttcaggggaccatacagagggggtagaggaaattacaataacaaaggaggtagaggaagccgacctatatgtcagttgtgtggaagatctcactgaagttggtccttcctcaaccacaccagatctatctaatgcatggtttcttggcactggtgccacccaccatttgacaaatgacacacaaattctatccacagctgctgactacaagggaaaagccaaggttgttgaaggtaatggttcttctttacctattcatcatataggccatagtttagtctcaattaaatttccttctaaaacattagtcttgcaagatattctccatgttccttctatcaataagaatttacttagcatatctcagtttacaaaagacaataatgtcattcttgaatttaatgttgtgtgttgtctcattaaggacaagataaccaagcaggtccttcttaagggccatctcagtgaaggcctttacaaactcgaagtatctactctacagtccaaagaattgacccaaccagtggtgattccctcacaccaaatcccaaggccgttaatttcgccactacaagtaatcttgtccatgacacatctcagattgccttagtttggcattcaagacttggtcacccctctcaagtagttttaaataaagttatgtctttagttgttccaaataagaaatgtaaacaattctctttttgtgatgcctgccaattaggcaaattacaccatttcaatttcaaaccttctcagaataatacatccatgccctttgaacttgttctttcagatgtatggggtccatccttttacagttctagtgaaggttacaaatattacctaagttttattgatgattatactaagtttgtatgacttttcccaatgaaaactaaatctgaaactactgcttcatttttacagtttaatacctttgttgaaaggttctttcacactaaaataaaaagcattaaaatcgacttagggaaagaatatgaacccctttaccaaacactcagaacattaggcattcttaagagaaattcttgtccccatactcatcaacagcaagggagagttgaaagaaagcataggtatgtggttgacgtgggccttacacttcttgcccaagctaacatgcctttaactttctggtgggaagcctttgcttcagcttcttatctaataaataggcttcccacaccaacaaacaatcttctctccccttatgaaaaactattcagccaaaaaccagattacaatatgctaaacaattttggctgctcatgttttcccttgccgagaccatatgagaatcacaaagttgcctttagatcctctaagtgcttgtttataggatatagcatctccttaaaagggtatcgatgtctacatccaagtggcagggtctatgtggctcaaagtgttacctttaatgaacaagagtttccctattcccaactatttccttccccccaacccaagtcctcaactttacctataataatgagttagcatataacataccgtattctacacttgtccctcccaataacaatatccaagaacctgtgcttgtccatactgaagcctctagctccacaaactcacccccaaaccctgatgatactgtcctccaatatcacagtcctcaagcatccactaatgctagttcatatgctgaaagtaccactgttgtcactgcccatcaacaactaaacactcaccctatgctaaccaggtctaaacatggtatatttaaaccaaaatcatatcttgcaagcactaatgttgagacttaacccaaatctctcaaagatgccttagctagccccatttggaatgcagtcatgtctcatgaagtcattgccttgaaaaagaaaagaacatgggttctggttccccccacatcagacatgaccattgttcacaacaaatgggtttatagagtcaagtacaataaagatgggtaagttggcaggcacaaggctaggcttgtggcaaagggatttcagcagctccctggaatttacttttttgagacatacagcccagtcatcaaaccttgcaccattagaataattttcactctagcaacaacctttcgatgggacattcaataaggtgacattaataatgtctttttgaatggtgacctcaaggaagacagggcttcattgatccagaataccctcaccatgtgtgcaagctgaacaaggctatctatggcctaagacaagcccctcgagcctggtttgacaagctcaaaacttctccacttcaatggggttttcaaaatagcaagtcaaataacagtttgttcttcacaaggaagaatggttagcttcttcttctccttgtttatgtcgatgatatactcaacacaggagaaaaccagactcacatatagcatgttatcacaatcctgcatgatcaatttgcatttaaagtgttaggatctctgagttatttcttaggcttgaagttcattgatccaaagactctatcacccttactcaatagaaatatgcaagggatttgctgaccaacactcagttactggactccaagcctcaaactataccaatgtgctcaacaacaaagctgtcatctaaagtaggcaccccaatgtaaaatcctactacctacagaagtgtaattggagcattgcaatatctcacaatgtccaggcctgacattgccttcactgttaacaagttgagccagttcatgcaatctccaacatctaagcattggagtgcctccaaacgcatccttagatatcttgctggtacattggacaggggttaacttttagagctgctcatagacttgatttgcaggggttcactgatgctgactgggttggctgctatgatgacagaaagtctacttctggttactgcatcttccttggtagaaatctcataagttggtgttcaaagaagcaaaccgattgttgcaaggtcaagcatagaatctgagtatcgtgctcttgcactggccacttctgaagtcatttagattcaatctctgctcactgaattacaactcactgtccctagctgtctaattctctagggtgataacttaggagcaagatctcttacctacaatccagtgttccatgctcgaactaaacacatagagattgacattcactttgttcgagacaaaatcttaactcaagaacttgattagggctgttcatccaatccaatccacacttttttggtcaaacaacatccaatccgcactaagtgc

SEQ ID NO: 15209 - DNA, 6666 bp, Cannabis sativa
  modified_base (6628)..(6639): a, c, t, g, unknown or other
agaaaatgagctactttattatcattcattcagagaaataaaatacattatgttaaagtatattatattgaattataatatttgatatattttatataatcttttgttataaattaaaatttaatataatattattaaaaaaataatatacaacacaatttaatatatattatacaatacaatatgatctaaagtaaggtagtaaaattttaactaaaataaaattttgtaaaagtcaagttgacttacagatttatcaaattttgattttattgatcaacttacatgaagattttttttttttcattattacaacaaatcttacataaacaaggcattgatatattacaaaagcaaaactcaattagaccgtagcaaggcttggcttttttaacttcatctcttaccttaacaatgtgtttgaatgattttctcatgtgtacttataaatacacatataaatggcagaaaaaaagacgatcaaaaaccccaaatagaaggcaaccaagaaagacttgggagatagagcaagaaaaatcaagaccaaaatgagttttatattaccacatgttttacaagccatattaagaaacacattaagcttcgaagagattaagaaacacaaagcttcaaatgaaagaatcaattaaaaccacaaacacaaagtataataatgccacatagaatatttgatgtgaaatctatcaaagtaagctttgtcttatatatccaaattttggcttgacttttgttgatggacatggttgcttatggcacgtttagtcacttggtcaagaacatttctttttatgtcaagttgtgaaaatgtgaagcattattaattaacaactgagtctacaaaattaattgttgagacaatttggacaaagaagtactagctgacattctctaactaattaaaataatcatatattcattcccaacttcctttcttctttaactttccattgccaatggactaataattttttataattaaaaaaaaaaaaagagagagaatatagtacttcatgttttatacacatttattactctgtattttatgctcatttgatactttgtattttaaaattcgaacaatcgaacatatttaaagacatatttggctaagcttctacttatgcttatgcttagagttagaaatataaaataagtataagttttgacttttatcgttttgataactgttatataaagattttttttaataaaaagtattctttaaagtatttgagtttctttcaaaatgacttttaaattaaaaaataacttttaattttttatccaaacgctcataaaagaatttttttaattctaaaagttaaaaaagagcttaaagaagctaaaccaaacatgaccttagtattatgaactcaaattagatcaattgaccaaacttatctaagttatatttaatttagataattaaatttaatttgaaacttatataattaaagacaatttgataaaaatttatctatcaaatgagaatttatagtttgaaaatgccagagttaattttatacttcattttgatgaaacttattttcaatatgactttttaatctttattataatataattataggtgattatcataaagtgaacgaatgaaaacaaaaaatatcatattaaaagaattttggcagaattcaaacattttaatataataataaatattttattttacaaaatttacaaagtgacattttaaatattataaaaatattatccatattattctcgagtatattaaatagaatgaaagtgtttgaaggattcttaaattctctatattagaaaattctaatggttttctcaaaaaaaaaaaaaaaaaatctaatgataaatattttattttacaaaacttataagggaaaatgacataggatgataaccaaaacaattattcttttagctaaattagattgtcgagttttcaaaagttgtaaattattcttttaataataaattagtgagtaaataccattttggatcctgccttttgcaaaagttattaattagattttcttttttgttaaatgacaaaatgaaccttgtattttctaaaatggtaaaaagaagatcctgaatttaatttttgataacttttttttttaatatgacacacttgaaaacaattcctaacatgaatagatatataaaatgtaaatagttttgtcataatacttttagatcggattattattattttattttgacaaataatcagttcagggtcttatttgtatcattttgaaaattacaggacctattttgtcatttaacaaaataaatggtccaatcgataacttttacaaaacacagaatttaaagtggtatttactttaattaaacatcaacttttaatttcgttatccttatccatttattaattagatgtaggaaattctaaattaaactaataatgatgaaattctaacgaagactttttttttgagataaaatcctaaccaagacttaaaacaacacaattaacaaagaaaattaatggacataaatacaataaaccaaaacaacacaaatagttcgacattagaccaatctaatcatgtttttacattcattgtttgaaattttgaattattatcttatccttttataaaatcaatcaatttcaaagtacaacaaaaacaaattgataacactcaattacaagtgtctcactttttctcacactctttcaatttaacttgatacaaatccataaaagacataaaaaaactttacagaatgatagtttaagttagttggctcgagttagttagtaacagaaaacaaagaaaaaatgtggttttgagtttggataatgcaatagtcatttgaaggtttgcaaaaaaatgtcgtttaatagatcctttgtcgttcttcatcaaaatactctcgtttttacatgatagtgtcgttactaatttatccatgaagatactgtcgttttgtacatgatgttgtcgtttattgagttttcgctggtttcgcccaacacacaccatccccgtcttctccttctctctctctctgcaattatgtgttatgacagagatgtacaactctaacgaggaattggaatcaagctattcttaatcagtgctacgaactctactattccgaatagaaacggggttttccaggcttccaaacaccttgtaataaacttacactagcccaagtgaaacgggattccccttccaaagcttaaagtttggacctttgacagaaatgaagaaagctagagccgttacttccattgcgttcttggtaatcctttttctccaaggaaaacaggtacccttttcctccatacatatataaatttagaggttttcttgaaaacaaaattatgtgtacgaggtagcttcaattttaagaactgggtttatgatttttgaggtcaattgttttatttttgtactatattctacaaggatgatatagaaactgggtaacaaagaactttgttatgtgcttgctcaaggaagtaattttttctttttggtgattcccctgaaaaaatgaagtcttgttttgggcagtggagttaattgttaaatgtttgtatagtaattttcagttcagtaaaagtgcctgtggatttctttgtggttactcaaattcataatttggctactttgttagtatgatgcattggaggacagtgtatgatctattgatgtgttatgttttgattactaagctttgtgtacttttcatccaggccaaagaaggatctgacgattcaaggtataattttcttctttaataaagtttatttcttagtaatgtgaggttttgagataaatttggatggtgtaaaggtgcatttgattgtttagagtgcttgactgtctttatgattacttataactgctcttatagtttgaagtataggctgccttatctttttgtatttttttttatgttagagcactaatacatggtaaggaagatgctctagaagtacattgttctagagaaagaagtagagtagcatggaaaatcattgaggatgtaagaaccaaatgctgagtatcattacaggttttcatcatgcaataaacataattatctatatttgtataaatttgtgttttgagtaacagctgttgttgtgtatcatctagtacttgacaccatttgtggaacaagcacactatcagattccaattaagtgtcgacttcaccatgacaatgacatctttagagatcaggaggagcacaaggttcatgtggatacaaatgaatggcagtgttcgtactgtaaaaaaagcttctatgctgaaaagtttctcgaccagcattttgacagcaggcactatgatcttcttaatgttgtatgtagaacagatcatttttctgtcttgactcttccacagtagctaattagcttgttaactaggtgcactatgcatttattttttaaataagaaaaaagttgttatgtgacaaaatctacccttgatttctatactaacactatggacaattgttagagtgatgtgttaggccttaggataaataaaaaaagtatataggtaattttaatgggggtaaagagatggtatatataggcgagtaatagaagggttttggggaggaagcgagtaaaagtagctcttgggagagcactgggtctctcgaatacccagcaacattgtactctttaagttctattatcaatataccagctactattgattgtcctatatttgctactgttatattaaattgatagaaaattcttatcatgatgctgttaacttttgttgaacacagaatggcagcaagtgcttagctgatttatgtggggcactacattgtgaccatgtgacgaataccaagctacgcaaaaccaaatgcaatcctgcagcagttgcaaggaatcgccattactgtgaggtttgcttgctatacttgttgactctaaccacttcgccttgcttgtttgaatctaatggtttgagttgtacagagtctcgccgacaactgtttccccattaaccagggaccctcagcaagtcgccttcatggtaattttctacttataaagagagattttgaaacaatgtctttgtgcttatatactgtcgtttattttttttgtcgtaatagtgcatgtttgaggagctatgaagaccttactttgtcctacttatattgacgttctgatttatcttcagaattctttctgcatcaattttgtgatgctcacacttgctctgggaaattgaaacctttctcaaggggaggcaaggtaaggtttcagtttgctacttctgtaagatcccctccttgaactattatttatgcttctcagactatatgtatgatgcagaaagaaacaagtgtactatacctggctactgcaattctgactttgatgttgctcccgattttctacgtgattgtttttttgcaccaaaggtattacttctctacttcttaaagagatctcatcaacactactaaagtgaaacctttcaaatactaatttgttgtgctacacagagagatgagaatgaggggccaggttcttaaacgcatctcaccaattgggcgaaaagccaaaccttcgtaattggtaccatactagattgtctcttgtgaatttcatttcatagactgtgaatgccattttttacatgctttgatagtatataaattgaaaatgtttttcttctttcttctcggatttaatctagtgtaatgctactaatctatcaatgattttattggggttccatgagcttgtttacatcattcatttttaagaacatgacattcactcagttgagtatatttttatttgcatgtacttaataatttatcagtaaaactactacaatcacattggcaatgattgttgttgatgtcctagttattattttctaacttagagggttctattgtgaaggttatgcccttgaagccacacaattttcgcagccgatcagtataccgatcatactatcagagtccttgaatgaaaccaacctcagctacatcaccagctaaaaactacaggacttacatatctcacacttttaccttagtaaatggttcagattgatactttttatgtaatgggtttgttttgtacatgtataataatatctgtccaatttagttttgtcataaatcatatgattctggtaaatgtacattatgtattttgacaccaaaagtactttagcatctttattctttcttgtacaggatttcataaatatttagatgaaaggtcaattttggcttttttttttatatgataaatgaccagttttaagtggactaaacaaagttgataatttgataaactgatgaacacaaatataatagtttgatgaagatgtttataaatctacaaacttgttcatgtactaatatattacaatgtgtgtcagcaagtaataattaaaaaacaaaaaattgcaataacagctttgttcaaacttcaaatgtctaatcctgtaaccgaagttgaattcattttcttcactcgttaggctgaaacataactgatcttctttagtaacttaggcttacccttttttggctcgtttggaatgccgtattaggtcgtattgtnnnnnnnnnnnntatattgaattggattatatatcatat

SEQ ID NO: 15210 - DNA, 7326 bp, Cannabis sativa
  modified_base (39)..(43): a, c, t, g, unknown or other
tgataagatgaaccgaaacatacacaaatgaatgaaaannnnntctgtttctttattgatgttgaataaaatggattacattaaaatggagttttatttagggcataaaaccgaacagagctagccaagggagagcgagtaagaggtcatgggctagtcgtgacctgtgttgccctgaccaagttcttgactcccacagttggaggtgatgtggcaacttttacttctaagattattgatcaaaattccaacaacatttgtgagctgacggttgagaagtgggcaattgtcgacagtactgatcctgtcatgttggctcacgcaacaaagcgacaggctgccaaggtaagtgttgaatttttatcttttctatcatttttttctcatatcgtagagagaacctcccaagaattcaatgccatggctgtaaaactgaaccaagttcaggccaagaatagagcttcaacttttgagatagaggaaatcaaaatccatgctaaatcctagatagcaaacatcaagaggcaagctaagaactacagggagacttcctttaatgatgctcacaaaaagtacgaggctaagttcaatgagctcgtggggcctattgaaagatcccaccaagagatagtccataaactgaaaaccaaagtgaagtctctctttgaatcatcctaaaagttcaaaaataaaaatgacattcttcaggcttagtggtggccagggacatggaggtcaaggacaaacagattgagatcaacagtctaaaaatttcgacttgtagaggtggaggctaagctcaaagtagcggaggatgagtcagagaagcaaagaggaaaagtgggttgactagagatgaccctgttgcatgagaggacaatatgaaaggctcatgctaatgctaagaaggtcttgagaaaggtttggaagctgaaggaccaaagcttttgtggctactggagcctttgttaggtgagctgcttcgtaccgtcgacaggtgtgggattccatgcaagctatgagcaaagttgtcaaggctacgaaagcttatcttttctagagcatggatttagctttcatagctactctccatccattgtggaagaaagatccttctgtgctgaagcagctgggatcaaacgaggaagagtacttggctaaagtacatgctttagagagtgacacttatttcctgcctgcttcttttagatctggcaatgaggctgaaaaggctggttttgctaaagtcgtagaagtttcttctgagataggggctcaacctaagcaagatcaactcaaatgtcagacccaggaccaaactcaacaatgatgcaacaaccctttttctctcttttccttctttttgttttgggggcctttggatcccttttggtatttatagagatagttaaaaatgtcttaaccacgaggttgtttgcaataactcaacaaatcttcttttgctcttttatgcatgttgttttatcctctgatctgcttgtcttgtagccatttaataggttgtttaggatgctttaagcttctggttccaacaacagaagcttcacaccttaacttttcttaggactagttctaagtcacttttttgctctctgagagtgttaagaagcaagtttgtgttaccgatgttcgtaagttttataggacttaaggccctttcatggcgtattaactttagctagctaatttttatgtagcgtgaaaggaacttgtaactacttctgcgccactattgttgcggaatttagtttatgcctttttggtacataaattaatcgtttcaacgaaatattaaatttacgcgtgattacaaagtggctttctgtcagaaggctgggcttttgggtctagacataacttttttttttttcatactaaacataatattgattttcatacgcaaaaaggcttgctaattaaactagtaagaaaaaaggctaaaaaatgcatcgaaattcaagcaatattttcattcccatgttcttaattaacaaagcaaaatattgcgtagtgaatttacctttctcaaaatgtggtgagaaaatagctgaaaatgttaaaaattttaggcaaagttttctactccaaattttaaggcataaaggtataagcgattgccttaattatggtaaggggacaaattactcttagtttcccgaggttttaatttcaagcatttctcctactcccatatttaattgtaattcatttaacaaaatttaaatagaaaaaatttacataaaatattaaaaggggctctttaaaatttttaagggtacatagctgtatatcctacccccaagtgagctgagaattcgaatgtctccaaattaccggtcacttgtttgcaatgcaacttgaaaccgaaaataaaaggagtatttttgaataattattctgatttcatttcattatgcccgaaggcatacattaagaagaaaaattaaaaaaaaaaacacaattgaacataagcaggtgtttggatctggatactcctaatttattgatagtatcggcgcatgtgatttacattccaagctcatggaatttctggtccatctagtcttttcagttgataagttccattacccacttagtgttggatttcatagggtcctcccagttttgtcctgagatctccactccctgttcctgagaagttgggaatactcttcttaagatgagatctctaacctggaatgtctggctcttaactttggaattgaggtgcctggcgatcttgccttggtacattttaaattagacttacaactattcccagagctctttgattaaatctagagattcttgaagcaaagtgtggttgcgggttgggtcataagtttcttgtatgtgtgaagggatggtgtctcaactaagatgactacctcatattcataagtcattgagtacggagtatgccccgttgaagttctttctggtgttcgatacacccaaaggaccctagggagctcttccagccaatgggctttacaagcttgaagtttttttctccaacatggtctttaaaatcatgtttatggcttccacttgtccatttgcttgtggtctagccacaactgagaagcttttcataatttcgtgctagatacagaagtctgtgaaatgcacactgttaaaccgcttactattatttgatacaatgttatgttggaagtccaaaatggcacactatatttttgatgacaaaatccaaatccttcttggaggttaccatgttcatcggtttggcttctacccacttggcgaagtagtctaaaaaagttatagtgtatttaactcctccttttccaattgcgagggatcccaacaaaaggccacgacctgctcatcaaagtgatctcgattggcggtgcatgtcaaacctttgcataacatttacattgttcacattttcagacgtattcaatgcaatctgtctttatcagtggtcaaaagtacccttgaccaagaatcttttttaaaaggcttaatccaaaagtattgcctctgcagaatcgtcagtgaacttcatggataatggcactaattttggttctagctatgcacctcagatatggtactgacaaccccctgcggtaaagctttctgtccaagatgacatatatgggagcctggtactggatcttccttctagtggctctatcagtcagaagctctctagaagttaggaactggaatatcatacctatccaagagtttgagtgatcaattatggctttttccgcaagtgttttaatacttagagtttgtagatggttgataggtaccactccgtattgcataatttttggatctgttgctaacttcgccagcatttggtcccttggaacttggaaaatgttgtagcttttgaaactttgcagcagttctcttgatcatgtcgggcagccattatctcactcttagcttagtatcctccgaatatttggtttaccactaattgagagtcattgtacactttaatactctaggcccctacttctttagacaagtgtaggccagccaacatagcttcatgttttgcttcattgttggatgaggtaaagtgaatctctcttgtgaagtaagctatttatgaaacagtttctttattgatgatatcatctcagatgctccctgttccagtagcttggtaccaacactggatttagtggcagtcatagcaaactccaacctatttttctctagttctaacgcttctgtgataatataaggtccctccctctctcatagggagtgtttagtgttattttcatggtccatagcttcagaagactcataggacacatcttcactattgctcccttgttcttaatcaatttcggaaacaaagggagatcttcatcactgcccccctctcttgagtcatcttgggaagagggggggattcttcatcactgctttcttgcttgatatcttcttgagaaatagtaggagactcgtcattactatctccctgctcgagttcatcttggatctaaagagaattctatttcaatggagatattaagtattgaatcttcttcaccttcctatattaagtattaatattttctaaatatctaattgcttggttatgacatgtcttccagttgtgacctttttggccatatttgttgcgcctattctgttttttgtttcccatgcacctagagatcaccgtttacttagtatttcagtttcatttaagtgttttcttagttacattctattaattacatccgcttgtgtattagttcatcatatttacaatcaattgagatgaattaccgtctagtttcataatttggttaattgattccttcatcaaattgtctgttgcaaaatatgaggaatgaaattgcgtctttttcctaagagtataaaagtttaagtttgtaagtcaactttatgacaactgtgatgaaactataatgcaacagttatatctgttgcgagcaaactaatacaaattcacaaaacaactaataattcctcatatttaatacaaacaaatattacaacaatcgtattttatatgttcaggtcgcgtattcgataatttcgagccttgcttttataatactatatatcacagtagcaaaaccattattcaaataacgtgcaacttaattgcaactaaaaaatattaaatgtgaatgtgtatctataagaaactatttgtctgtaattttttgccactggtcgataattaattgtaccttaatagtaatatgtagagaaacaactgttagacctccgtaaaccaattttatatcaactaatttagtatattaattaaactaaacatgttataatttttttttaaagagctttgtattatattgacgatatgaaacacttgccaatatgataaaatccattgtatcgtaatcagtttgtaataattgatatgtcaagttttagagagttagtaaaatatttatacaactgtaatgcaacttttatgaaatataaaaaccagaacagtgtttccacgtacgtgactctatctacatgagaatttactattctatttgtgatttaatatgaacaaatttaccattgaaaatttaaaaaataacaaaaatacatcgagataaacattaacctatagtactgatacaatttttttggattatacctaagttggattatttgggaactccatttcaactttttgagatctgcatttcatgaatctaaaaattgaagtcaggacattaatttatgcgaattaaaccggatttctagtttaatttcagttttgtggtattttttctacactttttttttatgaatttaaaacaatcctattttgattgatttcggtcatcttcttaggtgaagtcactggaattaattgtagttctcttctggttgggtttcgttttagttgtgttagattgctagattggtcgattgaagattgtgtgcgtgaggttatttatttagttccgtgctactaaattagtagaaaaagtgatattttgatgatatttagtttatgggttgtattaatatttataagactggccataaatattattgtaatttaattatttttttatatatacatgaagaaactctaaaattaaatctctcttgtttggcgagagagaaagaagttcaaacttcaaaaatttaatctctccatatttgagaggattgtagaaaagacaaatcataattttgttggatacaattatcttataaaaaccattttaaaaaaattatcttttaaaaagtaataaatattataaaatatataagaaaaaagaagaaaaagatgaagagagaaagagaaattgaataagaatttctcagttttttattctaatggggtgaactcctatttatacaaaaatatgactaaaagaatgggaaactaaattaatgtaataaaggaaaatacaaccaaacattaatggtgataattaatctggtgatttggacatctataaataatatttcataataatcccccttagatgtccataaaaaccgtctcattaaaatcttcctgaaaaacttggtcaacagaaaaagagtggagtgtaaactaactccccctcatttaagaattcgtgaagatcttttaatcgaagaattctaatcttgtgaactatcttctcaaatgttgatgttggttgtgaataagtctgcaagagtgacacttgattgaatttattgaacaccaatatgcattctcttcaaatgtataaagaagaatttggtgatgtattttaattctatctccttcaatgtaccctccttttagttgagcgatgcaagtaatattatcttcatagagtactgcttgtgttgatacttctttattgagtgtaatccatatattttttgaatatgttatgtcaatgatctcacttcaacacattctctacttgcttcataaagtgcaagcatgttaatgatttaaagttatctcgttaaaaaacttgctaggaaaatccaatgggacaaaagctgaactaagaaaaaaggagtggaacatgaatatgtctctctctcatacacatatgattcataattattttagtgataatatatctcataagattatatttaaaatatcaccgtatattatctatgatcacatattttctatagctcttccagagtatgtgtggacttctaaattatggatgaagggttcgtggaatatcaatatttatccaacttatttaatcattaatgcatgagtatatacaatattgttcacacaaaaatttaaaattttaagtagatatgaacataacacattaatgataatataaattt

SEQ ID NO: 15211 - DNA, 3460 bp, Cannabis sativa
aacacgtttgtagaacattgaaactacgaaatagataggtagattttggtagctatctcatacgagtatattttttcatattatagttatttttcaaagtaagaatttttggagccagcttgcctgaaattaaaatacatcaataactttttagtcttaattaaagtgtacctgaaatgttacacccttctcggtgatgtcagctaaatgcaataatgatacctgcaaacaacaaacatataatcttcaaaacattgaatgagtacaaaaggcgatacaagataaaactaaacttctagaaaggatcaaagaccaatgatttaaagctgcagcataacaacaaaatgcatcagatatcgaagaataaccatttgaaagccaccagaatcagtaagcaatgctctcggccagttcataaatttgtgtagacctcctagttcatcaatgagctcagaagtagggcgaagtgccaagtgatatgtattccctagtattatctggcaaccaatgtcctcaagctgattagtcgccaaaccttttatagttcctgtaaggaaaaaaaaattgtccaaatgtcaaatgcaacaaatgtagataaacaagagttaaaggtataggggaggcttacataaacaagttatagttactttaatgctgagcacaatttctaaattctaaccaaatattgacaactaacatgtacaatacaaatccaattttcttgtaaacataaataatttcaaaagacaatgttatcacacacattcacattgcctaaatttgccaactgagtagataataattttgagtctaaccttgtgttcccacaggcatgaaaagaggtgtctggcacacatgatgagggagtgttaggttcgcagcacgagcacgattgaacctccctaatatctaagataagaaacacaaaaccaatcaagtccatgattaaaggattgacaattaatggaacaactacaagaactattcatacaactggttaaattatcgacatattggtagaagttgtaggaacaaaactaggaacagcaaagtacagaacactgaattagaaagaaacaaaattctcgtccatctttattttcctattattgttagtcttgatcgtccattaatatttgttgatgtataagctcaacaaaaaacaaaaattaaccaatttacaaactgccaactattttacatacttttccttatatcaaatattcaacccctcagtccaaaattggacataaaaatcagcaatcttagtagttagtttcatctaaacacatccacattacaagcttatgaactcattcatttacttcaaatatttttaatgcctcactcgaccacaatgttaacaaagctaacataaaatagaaaacactcaaaaaattaagaaataaaagagttaacctgaattccaattcttacctcgaaacgaagagccattttttatgagtctgcaataaaccctgaagtcaaaatatatatcaattatgactaaagaaaagattaagtattgaagaacatcttgaataccatatcaagctaaaccaaatgtcagaaccaaacaattattagaaacagaagtttataaattcgaatcattattgaatggtacatgtcgacgcaatatttcatcaacaatagaaacctggaggggaatcttccaagtcttccaaactatagtaacattctaagcctctcaaaaaatcatttttattttatactttcaaatatgcattattttaaaggtaaatatcattaattagtatgttaaaaccaaattatttgagtattgatgaaaacaatgatgatatcatattagatgattctaaccatttgttatgcaatattcaagtctcatatataatacattgaaaaatgcatcagtgcatacatttgagatggacaaaactcaacactatgatgatgaggaggacaacaaaggtataggctctgtggtagaagatcctgataatgaaatgactgtagtggaggattacttcaaaaatgatcttattgatataaattcaacttgggcaagtgtgaaaaataagaaacaaagagacactataaaagatgataatcaggacagaaatggggcccaagagccaagtacacaggatggcaatccaatttgggaaaatgggtatgaaacaaaagtcgattttgttgcagataagtttaccaaataaagtgcctaaaaaaagtgaaaaaacgagaatacaagtgatttatcagaaagattgtccctttgttaactttggtttacattcaaagccctttttgtttcaaaattccaacttttatgtttttaacattcaacaacaagaaatgtcagtcaaatatttgcttacacacacaaacagagcttttttagctttattaagaaaaaaggagcactgggaaccaaagctaacactaataaaaaaaaaaagaaaaatgagctaaaacaaaactcatcaagattagaatttaaggtaagaaaaaaacaatctttaacagcaatataagcaaatactcatcaagaacaccaacctcccttgctattgggattcggctgacagttgcttcgggtttccggcaatcaggcgttgtccaacttgggtagccggcgtggctctccaacttgcctcgctcagacggcgccgacgccggcttcaatttgtggtcggctaagatttatattgaataatgaagaagaacagcaacttcgcattagggtatgtttctttttaacgggaaagcggcaactttaaaaatatatatatatactacttgaacttaaaaggcacgtgggtatttttatttatttattttttatttttttaaaatagttttgtggttggtatttgaactctaaaactcttaattgttaaactaatcaaattattactgttgtaacacatttttttttttttttacaaaaagagattcatctaattcatgattggacaaatcatccatcaaaatagctcgaaaagtagtagagacaagtcctccaccatagccacaacctggggaggaacaagtggcgattgtcaaacaattggctggcttgttcaaaggtggtttaacaaaaacacaagaaatattgttaagatcagacattaaagtacgacaataaaaaataactaaaccaaaaggagacattaaaggggtcgaactatacagagcatcaatgatgattttacaatctgactcaacaacaatttgatctaggcctcgttctttgatcgagctcaaagcttccttcaacccaattgcctccgtcaaaagagaagacacacagccagccaattgtttggaccaatgataaaggacaactccataatgatcacgcatcaaccctccaatcctgaaataaaatacctcagaagtgacagaggcatctacattgactttatttatatcaatactcggaacagaccaatgctccacacaaatacaa

SEQ ID NO: 15212 - DNA, 5552 bp, Cannabis sativa
tgaagctaaacctaaatttgacatatctataacataaataaatataatcacaagttagttataactgagtaactatatacactacaacatttaagtataatagaggcggactaactcatttttttcgttgctaatggttattagcggcgggcatccaacgctaaaaacaggacgctattaataattattagcgccaaatttctagtccgccgctaataagcggtggactctgtgatcctaccactaatttttttggtcaagttcggcttacaaagctgacaaattattagcagcgggatccgccactaatatatttagtttttaaaaaacaaaagataaataaattaaatataattaaaaaaaataaataataaactaataaattatataaaaaattgaatataatttaataaattaaactttttctaatttagtaccaaaataaatacaatatttattactattataatatctcaaattaaactacatatataaaataaacttaatatttgtaatgtttgaattattaacatacttaaactaattagtctataaaatcatcattaaaaatcttaatttacattaagattgggtgatagacatagcggaaaaggaacatatagttgatctgataataatccaagtgtttgtttccgtgattgagcttcattgagtattgaagtaataaaatattgcgaagaagtactcccaagcccaccaaatgacattatagtctttttcaacaaatcaaatatacgagagaggtttcatatatatatatatatatagttagaaatatggattttgatttaattcaattcgcactatttttttttatggtatattcgagtcgcgctaaatataaattttatattttagatccaatccgcataataatttaaatctaatccacaaaataccgattagaacacagttattttaaacataagatacgttatagcatacttaacaccttcgtataattattatatttctgtatgataaatacatgaagaagggaatattttcaataatagctattaataaacacattatcgaagaagcagtatctacgaaagcaaagtcaactaataatatctaaaattgatcattaattaagattgtgagaggagatcgatctataagctgctataaactgtagtaagttagtaactcaacagttaaatattaattattgaaaatcacacacacacacgaattttattatataaatatatttataacaatttgattgactagtataaataaatatatattaaaaaaaaaagaattgaaagctcaattaataagcgatccgttctcggctgcgatgctttcggtttctttggatctttctttgttgtcaccaccgacaatttccaagctctccacacaattaattacctctttctatactgcctacgtatacacaccaaaaacaacattaataaaataatctacaactacgtaaatattttgcatgcatttatgattagagtcaaatggtgcaacatgggattaattgttttggttacgataatataattaagtacgtatttcttctactgataaattaattagctatagctagaagaagagaagtctcattcattaattatatatgagttaatttgtaagggaattaaatgagtggcatgtatttttagcatgaagtgcgccgcaaatatgagcattggggagttttattttatttttggcatcggttttcaaaaatatgtctgtcacatcccattgtgtcacagccaaggcactgatctttattagttaattctttcatattctaatattctatggggtaatgggtttgtaattttttttttaatttttattatatatataagcataggctttggtgttcgtactcaccactcaaccattgccacttttctcttattcactacttctttactactctacattctcctttcaaggaatttctcgttccttggggagaattctataactcaggtatatcatatatatatatatatgctagctagtaggatttattttgtctttttttttttactttgaataatatctatatgtataagtaatatataagtatattagagcaactcttatgcaaatcacaaattaaatgaataatggtatatattgtttctctttttgcaagccctgcaactataaaatattgttttatttacttattatttttggcttcatataaccaaattgtgtgtacgtaatcagaatatacacacacatatgtaatatagtttggcataatattgagttgaaacaataattttgcttttatgaatttacagatacagtacttggattttattatttccttggagaaatatatataaggaaatgatgaaagagaccactttgttgcatatcttgttggttattacattggcttgtctaagttcaattcatgcagaagacccatacagattttatacatgggaagtcacatacggcaaaatttctcctcttggagttcctcagcaggtatattataatttaaattatatataacaaatatacctatatatatataaccaattaattaatgcttggttcacttaattaatttacagggtatcctcattaatgggcaatttccaggcccaactattgattgtgtgaccaatgacaacatcattgtaaatgtcattaacaagctagatgagcctttcctcatcacatggtaataactaattatttatttatttaattttattcaaccaaggacatattttttgaatttatttaattaatatattattatattatattataggaatggaattaaacaaagaaagacttcatggcaagacggagtgcttggaacaaactgtccaattcaaccaaggacaaactggacatataaatttcaaacaaaagatcagattggatcatacttttacttcccttctactaaattgcacagagcttctggtggttttggtggtttcaacattgcacataggtctgtcattgcagtcccatacataatcccaacccaagaatacactgtactcgttggtgattggttcaaagctggccacaaggtatttatttaccattatacatattttgtattattattcttattataatttttatacatgaacaaataattcattcaaaaaaaaaaaaattaatatataattactgcaggcattagcaaagatattggactcaggcaaatctcttcctcttcctgatggtcttctcatcaatgggcgttctaaaaataaggctgtcttctcaggacaaaaaggtacacgctcactcctctcccctctccactacatcttttttttttttaaaagaaatatatagcatattttttttttctaaaaataaagttaaagaaaattcactgctatataaatgaaaaatagaagaacgaaaatagaaatattatgtccaagtgtaacacaatatattaattctgtataaactaagtacactttgctatatatgtactatatatatatgtattttgatttttaccttattccaaattttaatagagctgggtttaatcaactcaatcatgaccaaacaattatagagataaactaattacactttgctatatatgtactatatttatagaaatgattaagtttggtttggttataatattgtataggaaaaacgtacaagttgagggtttcaaatgtggggatagcaacatcaataaactttcgaattcagggtcacaaaatggtactagttgaggttgaaggagcacatacactccaagaggtgtacgagtcaatagacattcacccaggccaatcactagctcttttggtcaccttacgcaacaatgttagagactattacattgtggcctctacacgtttcactaagcccattctcactaccacagcaattctcagatacgctggctcatccaccccacctcaaggcccattaccaatcggcccaacttatcatatccattggtccatgaagcaggcccgaaccatcaggctaaacttgactgccaatgctgctaggcccaatccacaaggctcattccattatgggacgattaaggttgccagaacaatcgttttgggtaactcacaagcccaaattggtggtaaacttcgatacgcagtgaatagtgtgtcttatgttgatccaagcactccattgaaaatggctgattggtacaatattcctggggtatttaccttaaactcgattaaaaatactcctgctacggctcctcctagacttggcacatctgttattggaactacacttcatgattatgttgaaattgttttccaaaataatgagtctaaggttcaatcttggcatttggacggaaatagcttctatgttgttgggtaagtaatttaatttaactaattaattattgtaataatattcaatatctaattattatgttattatataatcagatatgggcctcggcaatgggaacctaagatgaggagacgttacaatttggttgatgggattccaagacacactgtttcggtatttcggtaattttttttttttttttttgactattgataaaggttattatattatgataataataataataattaggttgatgatttaattaattacaggtatatccaaaatgttggactgttatatatgtgtcgttggacaacaaggggatgtggaatttaaggtcagcaatatgggaaagaagatatttagggcaacaattgtatgtgagagtatggaacgatgagaagagcccttacactgagactgacattccagctaatgctatcaaatgtggcaaggctaaaaatcactagttaattcttattatcattgattattattatgattatttaagttgtagccatcctccttttatatttttatttttttttcttctttttaatttataagttataagtgtatgtttgagtttgatgatgatgatcagttacgagggtgtgactgtcaagaaattaaaacaagaatatttatatatattggtgtaattgttactcttcaaggaagaaaatgagaccaaattatgaatatattatttattaagtgtgcagctgcaacaaacattattagttaatatgattaatgagttagattattgaataatttatctattagatcaaaaatttcaaaaaaaaaattacaaaaatatgttaacatagaatttttatttttatttttatggtttgagcttttccatttacaagattatatttttaataaaaataataaatatttttttttgttttataatttatttatagttgtattataattattttgagattaatttttttgattattttatagtttatttataattgttatgaaatttattcatcgttatttttttaattattattttattctttacttaaaaaaatgtatttttatatattttttttttgataaatcagcaatttattattgatccacaacacttttgtacaaccatttacaaagaaagagcgtctttatgttaaaaaccttatgaacaatacacctcactttttttttctttttttttt

SEQ ID NO: 15213 - DNA, 8707 bp, Cannabis sativa
tttttttgtagtgtcatcactgactaaataatagtgcatataattatttcaagcatttaataataacttaataaaaaattcaattagactgtggtctataaatgtaatgttttttactcagattattattacagaacatgattaacagtgatcgaattgataaaataattatattacatttttaacagtccggtggcctgagattcacaatatatataaaaaaaattatatatattgtcacacagcactaacttatatatagtgatagctagtttggccgccaatttgaatctcagtttgaaatttgaaaatttatctataaatataataataatttataattatgtagaattgagtgttggaaatgatcaccaaatatagccacatttatataaaaaaagaaataataaatattatgtatgtgtacaatatttatgtagagctaaacccaagggcacatggatgatgaaaagaatattattaagacttagatttcactactactactactactattactttactttctttctttctttttgtataaggctaatcattaacggtgaaaaccaagcaaaaagagagaagagaattaaaataaattaatttcaataaataaataaataaaagaagctaataagagtgtttaagagcagacagttcacgtggaaagattcatttgtgataattggtttggtatatttggtaaaaacccattcctaccaatcttcctatttcttcttttttattatatgtacatatatatttgtatatatatataaatagagatctggtagatgagcatattcaaggctccaacaaggtatcctatgcaacctcagtttcactaatcttctcattttagatagagaccgcaaaaagatatgtctatttgtggactctcattctatcccactcgcacctggagagagtgatcctcacgctccggcgaagagaacagactaacatgttaaaagaatatacatatatagtactgttgtcatctgtgacaattcacttgaaaaggaatacatatatatatatatatatatattcagttgaaaaagtgagcacatgagttgttcggtggaaaattaagccaattaattctacttataaatattttcataaatgaatttgaaaaatatgatcagaagaagtaataaaggttagaaatgattcatgtttcatcaccaccttctaaatatttttgaaatgttaatgatgtctatattggttagattttttagtagaaaaaccccaacccaactactacactcaaatgccaaataaatatgttaattaaatatcatttaataatttgaatttgagaattgagatcacaatgatcgaacaactttcttcggtttttaatgatttttatttttgaaaagaacatagaattgtataaaatttagttgacaaaataaaataaagaattgtataaaatttagaaaaagtggcagtagtgcatttaatttgggtaaaaataaaaatagggggtataaaataaaacattcaaaataacaattataattaagaaaaaaaggtatagaatgaaacaaaaaaaaacacaatgaaagcattgttcaggtcatgaataatgtggtctcagattcactcctgttggagcgcgcgtgagctaaaaaaacggtggctctacagttaccaatttttgcatctaacgtacaatttacgttactcatcccaatccatataaagtaaaccaacggcctcagattcttccctttttattttatttgctattccagttttatcctctatttcacccccaagtactccaaacgatttgctttacgacacgcagcctaaacaggggtatttttgtcattttatcgaactaactctaggcttactcggttagaaagttcctcaatcttgacacgtggtcatgtctaatttgtccgtttgtgagagctctgccaagttacccaccatagcccaaaagtagatgcttttttatttcttgtaaaaaatcaattttaattaggaaacaaagtaataaatctattttagttatgaaatttattgagtcccgtctcttttacctaattactgaaaatctataaatgttattaaattaattaattaattaagggaaagggagtatttggaagtatggttcaaccataataacatcaataaatcgggtaataatgttaaacagctcaatgcaactaattactaactatatacgaagctttgaggtgtaacccataaaatctgacaagattttttaaactcaaattggaaagacacttgaattgtaataaataaggtacccatatttcattcggtataataattaatatatttctatttagaaattaattttattaaaaaatagttagagcaaacagaccaacgttttctctaataataataatactgacccccacaaaaaaccccagctagctgacaagctgctttctatgtttaaatgggcttttattacgagatttatagatacatataaattaaataaataaataaaaagctaccttctaaaatctactcagacagttaagaaatagaaagtttttcttgtttgtgtaaataaatatttatttatttattttttttaaaggaaagtcattttcgtaagatgaaggttagaataaagaacccatcaacgacctttctgactcttctctctctcttattaccttccaacgcacgccttccaactctctttcactctctcatttgtaacctttttctcattttattacatacccaaaattaaattataaaattttatttatttatttattatatatatagctatacatatattttttttatctacctatctatatattccacaaacccatttaattaattttacacaagctcaatatctattcatcttcatcttcttcctctcctcctcttttctccgtaaccatgtcaagtaccgatctagaattacgccaaggcttatcgtcttcatcgaagatcaacctttctcctatcccaattcagacaccggaaccatccgaaccgcctctactcggaagaatcatccaaattcaaagactaaacgacggccaagacgatgaaaacaataacaagaataagatcaataacaagataaacgacaacaataacagtagtactgatcatcagaaagagatcaaagaaaatgataacgataaagaaaaagaaaacgacgatctttgcgtcacacctacatcagaaaggtacaaaatcccgaagatcgtatcgtgcccgccggcaccgagaaaaccggcgagacgagtcccgtcatgcaagagaaaattgacggagctacaattcttcgatgtgaagaatcgtgaagatgtggatgagtttctcagatcgatctcaacgaataatagtaatggttcgccttcttctacggcggcggcggccaagagatgctgtccatgtaaatgaatcttaattttttttaacgctttttctttcatctaagtattcacacggatttttttcttttttaatttttaaatttttggggtaatttgatatatatattatgtttttctcttttttttggggtataatacactgaatttcgttcattcacccaccattaccaaaaaaaaaaaagtatacatacatgtcttatgtgtgttgcttctctctctctcttcttttctcctcagactcagaatatgtaaaagtgaatgtatatatattctggtcagaaatcaaatatattggagatcgatcttctttcttacatatatatatatgtatatgtgtatgcagtaaaacataattcagataaatttggatcgatctgatcaaattatgtatgtatgaataaataaggtgtaattcagctgtttctttgattgttttcttcttaaatgtacatatatgtattgaaatcaatggtatagatgattaaacatgaatatgtattatatatacacacatttgtattttgatctatctgggtttcataattcatgtatattatatatctatagaacagtagaagctagcttttttttttgtacatgtaccaaagccaagagagagagtatattaattatagttgttaaattttgaattatatggattgataataataattaggatttttattttaggggcggtactataggtgttgttgggttggtagatggggtttggtaatttcttgtttgatcaataataataataataattatgataattagtttgaattgggaaattaaagattggttttttcacaactcaatgatcgtgaggtgaggtagtttagaattagattaattggtgatcagggtagggtgtggtggttaattatttatatatataaaaagaattgtaattatattacttttttttttttatggttgttggttaaattagatcgatggttgatctgtctagtatttttgacatttctcacgtttgagtgatcgacacggcttggccatggataatcttgaatctctcatttctttatgtttagaaagagaaagggagagagaggggttaatttgtactctttgatgatcccaaaattgatgcaatgtggtatgtcataaaaaccacctcaattcaatgtgatagcgttttgtctattttgacattagatctatataaatatacaattaatcaaaaaaaataaaatattagaagagttgtctattttgacaactttattttgtctgtttcttaccctttttttttcttaaattaataaacctacgttaacgataaatttttaaatattttttttaaaaaaaaaattgtggtactaattaagctttatataatatggccatctgttgtgttgagaaatgatcagatcagctggcaaaggttttaattaaatgtacatttatttggaactctttttatcttgcatttataaaattgcatgctgggccgtctctaggccgtccctagcttatatgggatttgaggtgaaattcaaaaaaataaacattttatttgagagataaaataaaattcaaaataaataaataaataaacagttttttagcaaaattattttaggaatcgatcatggattaatcttgtttttaaaattttctttttttaaaattttctttttttttttaaaaaaaaaaaaagaaaaaaatttacacaatatacttaaaataaattttcttttacatttttatgatttttttttttatatttttacaaattttttttatttatattttttattttaagaatcttattgactaatattcaatgttgttttcatgttctagcaacgtgtaaacaaaaattttcttttaaaataatggtctgtaaaaaaattcgtaaaaacgtaaattttagttgtttttgggtattttgaaaataattccaggcctcatggagtgagggccaggggttcgggtaacggctccagccgccctatcctaaggacaaccctcgataactttacattcggctcacatctctccctaggagaattttatttacaccttaaaaatttataaaagcacccgatttaataatttttattttatacaaaaattaaaatatgactatatactagtttttttttttcttaaaaaaaagaaaaatcatccttcctatattcttcaaaaatatacatataaataaaaaaatatgttaaatattaagtcaaaaaaattatatgaaattttattaataaaaaattaaaaataggtatacaaaacttttaaaaaatatgaaaatgaaaataaaataactatcaaatttgatacaaaataatgtaaaaaaataaactaaaaataccagacttacgggtcgtgtcgaccctacttttttaaaaataatggcatgacatgatacgactcaaatttacctgtggcacggcacgacacgactcgtactttgaaaaacacgataaaatatgagtcgtgctagcacgacatacacatatttacacaactacctctaacgaaacactaccttagtgaggaagactaaagtttgtattgtactaccaaactctattgtttttcaattatttttatggagtaatcaaatattttttttttatattatttaattactcgtagtgttctaaattgtatacaatattgtatcatggttgtaatgtccccgcttcaagttttcattgggccttcctcccatggaattatggctcttatacatgggtacgtcactctggctgcttcttggactaaagaccggccctacagaccaacacgagtattttcagcgtgctttgtcctcactcgcatgctccctcagaaaactttccaggaggtcacccatccctaaattatcctaggtcaagcacgcttaactgtggagctatttcgtaaggggctaccggaaaacaagatgcaccttgttgatataagcactatcaatcaatcaatgtatgctctcttcaactgtgtagtcacatacctatacaatctcagaattatcacacttaaccttccttataggtgatgtaagattgcacagcttacccgatatttccccttacagatcacgagactactgactatcacaatggtactttataaattttcttacatattaatttagataatataattttagattatgtattttacaaaaattactgactagatcttttattttgttaaatgataatttcaaccttgagtttttcaaaatggacaaaatagaccttgaattcaattttcgacaatttatttgtttaatataaccaacataaagttaatattctgcccagaataatgcaaaaaatataactagtctaataataacacctcgaggttatattattttattaagttttaatttaacaaaacattaaacttatggtctattttataaaatataggctatgaaaatatatggtccaaaaatcttttaaatcttttgttttggtaaaaagttaagtctacaagtaaaaatagaaaaagaaaaatatggttacattgtgaaatcttttggattcaataatttgaaaaaataaaaaatattaaattgttaattttttatagcttaaaacttaaaattatattcagatttagttttttaaaatattttaccaattaagtatcttgatgtggatctccatcttttaagtttttaaaaacataaaattattttcaaatctcaaaccaatcaaacctttaaatatttagcacacgattttttttcaaaggtctatcataattgtaagtttagatggggtgtggataaaacaatccaattcaatggcaatcgatcgatccatttacaatcgaccaccaaacattaaatatccaattgtgattggattagattgtatgttatttttgaatatctaattgaatcaaatcaaaattggattaggtgtcccaaatctaatacaatatttaatcgaactaattaatatttttatttaatttaaacgagtaattaaattttatattattatacctaacatatatgtatatatgaaaattaatattaattttttttttaactgaatttatccaatctaatctaataaatatttgatcaaaaaatattagatggatttaatccgttcaaaaaaaaaaaaaactatatctaaaatattagataaactaaaattaaaccataatatacatgaaatacattcaattgatagaactgattcaatctaatcgattggatgactgctgaaattaattggatcggataagattataaaatttaacatccaatatataattagatgatatctgaataaacctatgtggtccaataaacctccttaagcatgtgtacatatttatgtgtaagattccttggatttaaccaaataacacaattcaattaatataaatctaactaagtattcacataattaccaaccaaatacattaacgaattaaataatgcaacttaatcaatattaatctaaccaaatattcccttacatactcaaccaaaataacatttataaattaatctttaaataatcatatatgtgtatatattttccttcttaaattcatcaacacacccctaatatagtactgctcgatctataaagctggcttggtactgtgatgaaggcctcatattcggatctggaatcaaatccctcaatctagaaagaacatttctagtatattaaatattaaaattattagctccatactaaaaataaaaattaaacttttattagtggcagtaaatgttatttttattattattattttttttttgactactaaaagtaacaaaacattagtcattgtgataaaaagatttatttactaaatggcaagactattattgctagtataatgattatgcctttcattacaaataataattaagaattatcaccgcactattattaagtctataacgtacgtatttttctttttcttttcttttatagttttcttaaaaaaaaaaaaaggtgaaaaggaattgtaacataattaattatatggctcttgtatataaatttggttgaattgcaatattaattaatgttcttaattaaagctggtatgtgataaattagcatgtctacctataaaatgtggtagctagctagtaagtaaatatctctacgcatcacataaatcatatgatcaaaagtataaattttatattaattttgcttaaaattttccatcaaccatgtaacgtcctcgcttcaagccttcattgggcccttacacccacagactaatggctcttatac

SEQ ID NO: 15214 - DNA, 2992 bp, Cannabis sativa
cataattagctacattttctgtgttcgttaaatttagccaatccgatcgccagtggctcctggtgtcctcatcactggaattgtgccatcagagtcatcaattttcaagagtgcattgcatcctttgcgtctttcctttcgaacagcagctggtggaaactgtaaagttattttcaaaaagggggatgatattcgacaagaccaattagtattgctctgtttcctagtctccttttgtgtcactttcacacatggagacatgttctgaccatgattgtgttgtttggtggtccctataggttgttcaaatggtatctctgatggatcgattgcttaagctagaaaatcttgatttgcacttgactccatataaggtgctagcaactggacaagatgaaggaatgttggaatttattccatctcattctttagcacaggtattaaattctaaagatgctacttattgaatggcattcgtttatcttgtctatattgataagaatatcaactattcaaaattaacatagccattagttttaagaaattcccttgtaggaatgagatgtgcatcatatttaatacactatttctgtacttcgtatttgaaccccaacttcttgactgtgcctagttggctcctcatatttagtacactttttattttctgttggtgtttggttgttcaccccctgttttgcaaggggcttttctcaggaactgaatttccaagccagtagtttctgtttattctcaacaaactaaaaagtatcagttgcggattatgaatcagtaatttatggtcattgtctataacaaagtaaaatgtaccaaaattccgaggagcaagtgataacgacatcaatagttccatactgcagtgttgcaagtgataacgacatcaatagttccataccctgccaaaaagtttgcacgaaacacaattttctttatgtataatatatataaaagcttgtacaaagagcatatatgcataatgcaatatgtgtcacttattaatcgaagtaatttgtttttagagtttgcagtgatggtttgcttatggtaagcttttttcttttcttgtttcagattctctctgaacataggagcattataagctatctgcagaagtttcatccagatgagcatggaccattcggtataacagccacctgtcttgaaacatttataaagagctgtgctggatactctgttatcacatatatactgggcattggtgacaggtaattatgaaaagaaaaagatagtgaatccgacaacacagatatacacttaagtaaattgtgcaaattaaggtttaaatttattaactagagttaaataatatctttgtgcataaataatattggatattttcggtctgctctctactctgcaggcaccttgacaatctcctcctccaggatgatgggcgccttttccatgttgattttgggttcattcttggtcgtgatcctaagccatttcctccacctatgaagctttgcaaagaaatggttgaggctatgggtggagctgaaaggtatttattatgaaatttgaaactcccccttgtgtgtttgtatgtaaacatgtttgctggacaaggtcctgtgagattcataacatattggtagggccaccggccacttattcatgtgagatttcaactaattatttcttttttgttcctcggcagtcaatattatacaaggttcaaatcctattgttgtgaagcatacaacattctccggaaatctagtaatcttatcttgaacttgtttcatttaatggcgggttccaatatccccgatatagcttctgaccctgaaaaaggcattctcaaggtggcctcctcatattttactctctcttatagttattattaaactgttttttttttctctctttgacaaagagtttgctggtgtaatccagcttcaagaaaaattccggctggacttggacgacgaagcctgtattcattttttccaggatctaatcaatgaaagtgtcagtgcattatttcctcaaatggttgagacaattcatcggtgggcacaatactggcgctaatcacctaacacgtattttataggtaatctctagtacaaaggtataactgtaaaatttgttcatgatggactcaaatcatagttgatttcatagatttacatgggccattgtatgcgaacttatttaaacctgtatttgatcacttattacatgttttttttcgtagtaataagagagtataatactagtgttcctaaaatggcttctgtttcagtttctcaaatctgtagaacagagttaaggttgaaagagttcttgtagttctggataaaaagagagatccagcatagttgtgctgagtatacaggggagtgtgtatatatactttcatttctgctgttcattattgccatatagtttagccatattgactttaatgattttattctgtgtatataagttagaatgtttaatgattttatctctttaactttatttatttgtacagaaatactttcagacttgcatataatttacaaaaagccaactgattatttgtactgactggtacaagattatatagactagtttactgttgttggctttaactactgcatgaatggagaagatacgtgtcacattttatatgatttaactatcattcgattccagtttagagagagggaaaaaaaaaagcaatatcattcacttgctaaaaaaaatcatttttcttattttaaaaacaaaaaatagtttttttttttttagttacgatggcaattatcaaacatgcacttagtttttgttttaaaattacatgttggttataaacccagaaatcacttggcttccattcggctttaatattttctttggttaattagtatttgtttcttcctgaattttgacatgtattaaatcgtagttcttaaacttttttggccgttaaaaatttttccgaactattgagattgtt

SEQ ID NO: 15215 - DNA, 8974 bp, Cannabis sativa
aaaaaaaaaaaacaaataaatacacatagctgatcatctaaacagttcgtttataagacaaatctatctcgaacttgggacctcctttttgtcagaataatcaagcattgttaaggtcgataacttactcaatataaccgtcgggaaattggaactgaccgacaagtccacgtcctccaattctggggtgctgaaaaaatgttaacataactgagatgataatcaaaattcaaagggtgctgtaaatcaaatgttttcctagcccagttagtccaccaaactcaaattacatataacctatcttataacttgtttcagtaactgtgtatgtgctttatagaaggaaatttatacccaagtgatgcttggagagatctaaacaaatagaaaggaagttttttcacaaagctaagcaaaatgtttagaataatggaaaaagatagtctagataacataactaaaacttttcttaaaatgactaaacttcaatattgcatatctatattatcaaaatataatgagtttaataggttggaagtttcaaaaatcgtacttgtggtgccaatgaaaggaacttgtatgtatccagagcataccgaaccaaagcttcattctcaccgggatttagagtacatctagcacaagaaatagatagtaccacagcaaatttgtcaatgcttaaaaaatataacaaacataaaatcagataatgaactttggctagcaaataattataagccctgtattttagaaagatggcattgttaagtggaatgaaagatagacatgttagataggttaacactcccattagttcatccatccataaacacattctgaatactttgattttgttaaataaatataataaccaaaacaaaacataaagcacgagtactaacgtggaatagacgatgactccacccgatcgaactaactgaacagcctgatcgaacaatcttctctgatatttgccatggtttcttaaggactccattgtttcctgttccattgacagacaaaataacaccaaagttactgaatttatgcctagacagattttccaatacaaaagtacaataaaagttattgctttattataatttatacctctcccgaaaagagtcgaggtctcaaacctaatgctgaacatggagcatcaagaaggacgcgatcaaagctgttaggagcaaaaccttttgaattttcgcccctaccacctgtgctctgatttcgtccaggcccatttcgcattcttctcagattcttcctgatttcagctttgctaatgtaagttctctcattcgctttttcattgctaactaaaacattgagttaatcagaatttgaatgctggaaggacttgaaattatagtgttttacactaaatctatagaacttgctcatatcacatcaaatttacttaccagtttcctcagctatactttcagcaattaatccatctaaaacagcagatgaatctttctctacttgaatcttcattgaatcagaactttgtacagttacactgtaattatcctctcttatggctaggttagtcgtatcatcagttcccgctagattagttttatcatcacattcattactctgacgaaccgatttcagagcatctaatttatatgttgttatactccgcaagcccatttctgcagccaatttctgaatattgagcacctagaaatagaatgaatataataaatagatacagggtcacaaccttgttgaagaagatgaaaatggaaaacataaagattgttgaaatccccaaagagtgaaacgaagatcattaacgccaccagttataaaccctcgatcaatgacaccagggtttggagaatttataatgccagaatcatctacaaggaacagaaccgagaaatcgtggacaacacttttgtattaacttttgaggctaagaattgttaccttattgtgagatctatcaacagcaataatttctccttcatctttcataagaattgcaatagcagttgttttccctcctggtgctgcacacaggtctattatccgctcaccttttttaggatctaaaaaatacaagataaattaacaaatgagagcattgctaagatatcaacttcatttttcatactaatatcaccctaataagctaattttaaatgaaaactacaaagaagtcatagctgagaaaggtaatggttacctagggcatgagcagcaataatgcttggtagattttgtagaaatatttctccctcaagcacatctgggaaccacaacgaaagcaaaacaaactaataatgcaatagaatttgtatgaaaatgacacaagcttttctcaagtgatacccaaaggggccacagcagatcaaagaaaaagttctatatttgctttgtaacaacagaaaaaaatacactttcctatcttcaaaaattctctaagttatcctagacaggtagcttaaaaatagtccaacacatggttcgctccaaaaaggtttgagattttagtctcacttcacatacatgttgttccacgagtacagtttcagcgaaaaattccccctagatcttatccttgcattatctaataaatagcaacaaatctcaacgcccgcaattaactaaatttccattcagaacatcatcagttggaggaatgtatttgatttttcagtttgttgggtttttggtggattgtttagtccactttcctttgacttgtattctatttcttttatgataacacattttcttaagctgtattagaaatatataattaagaggccagcttttgggataaatgcaatcaatcatgtctttataataaaatatttaccataaaatgaagggagtttgaatactctattacacatttccacagcaactccttgtagcacacggaagattccagtccttgacaacattgcttttcctttgccaatatagagcctatttctttcagaataataaagatctgattttttgtttgccaacaaaccaaacattgaattatcttcataccaaaccgaaaaaaaaaaaaagcacacaggataactgaatgtatacctgtgcatgaaccctgcatgatggtccctcgagttataccagagccccacccaccctcaagaggctgctctatagcaaccgaaactgcaacttcatcgcctttctcaacatgagcgctgcacgccagtactccaggaacatagacctacagattagttaccttttatgaagcagaaaatatgatgttcgaatgtcattacattattaaaaagagaataaaggtagtgactttgaaatgacagtaaataccaaactaatcatatcaagcttgattaactccatgtcataaaattcagtgtcaccaaagccatagtctttaacatcagatgctagcagttctcttaataaaagttttaacacaaatatttcactcctgatttacttaacaatgttgataaattgaggttaaggaaactaacctgagcacctcgaagaactgcctcagcacattttctactcacaactatctcttttggaggcttgccatctacataaccataatcaattacatgtggccctgaccccttcacaaacagaacatagtctaaccctggaaactcacacttcgaaataggacccttttgtaagtttccattaaacatattagtaaactcattaactggtcctgaggctgccttaacagaatcatccaacttctgagactcactggttgaatcaccatttaaataagttttgctaagattcaagttttcagtaccaaattcactctcattttctttcaaaaccgccatcaacttcttgataacaacatccggtgaggacttgagtatgttaacgcgtatacaagagtagcaagatggacgcctgattaaatcaaacaacattgttataaacgaaagaaagaaaaaacaaatgcattccaataataaagataacaaatttaacaagactaaaatcctgaattcatatagaaatattttatacaagaaagtttgaattcaagccactaaaaatgcaatatactgttgatcatgagtttaaagtcaagacatctttctttttcacttattaagatgttggttagtatcaaccaactgctaactgctaagcattcatccgtacaatgaaaggactaatctttttgttattattatgcttaattgcagagaaaacctttaagaagaataagaaagaaaaaaaaaacttgatgtaagaagctatttcctgcattttctcgttaaccaaacggaacaaagagcaaaaatcaacttcaataaagaacgaatgagaaagagtacgttagagctttggagatacgtgcaaaatggtcagctccatatgctgtggagaagtaattttcaacctcaggtttccaccgcagaacaggttcaaaacaatatcgctccgataaatcctccattgccggcggactaaggttccgatcagtcgtgaaggaagaggagaaggaggagctcttgcttcgaatgcttctgaacaagtccctcgctttcctcattcaaagaggggttttttcggctaaagagagaaactttacagtcttgaattgatcgatggcccaatacgtagggaagaaacctcaacttccccaagggtttgggcttctgacaaggcccataaaaggggctctgttgattggtcgtcttcctcatgaattggcgcgctcgtacggtgatgacgtcacaaacaaaaaaggcaaaaaggaagagactttgatttgatcgctcttctttcagtttgggattttattgtattaattcaattccgaaaaaaaatggttggaatgaatgttatgcgagtcttcaccattactggatctaatccagctttgttgaattgttcttcgaggattttatcgagtccggtaaagtcgaccaagttagggtgtttaaaaacatcgacttgctcttatacgacgtcgtctcatcccttcggcaagctcctcttccgtcagctctttgagaaggaatcatccacctacacatacttgctcgccgatgttactcaccctcaaaaaccagctctggtcagttttccttttttcttttttgtttgtttggattctgagaataatgtattatacattcctaatattatgatgtttaggtcaacaatgagtacatttaaatccatgtttttgttttcgaattgggaatgttaaggcaatcaaacgaaaagggatcgtttttattgctttgagtcaatgcaagctttataatttgtagatgaaatatagagttttcctgtaacactgaataggaatttccttttcttttcaagctttataaacactacctttgcttatcttttggtagaataaagtatcaagctttattccattgagagttgaacttaaaaaaaaaggtttactttttcatgttcttggttcattttaattctgcagttgatagacccagttgacaaaacggtggagagggatctttcccttgttaaagagttaggactcaagctaatatatgctatgaacactcatgtccatgctgaccatgtaactggcactggcatcataaaggttttctattgcaacttatttatgtctttatatcattatcaatctcctgttccaaaagcaaagaatcatttttgcagagtaaggtccccggcgtgcattcagtcatttcgaaagcaagcaaatcgaaagctgatcttctaattgaagctggtgataaaatatattttggcgatctgtttttggaggtgagaaatcattgcttatcttttttgaaatattgaatagagaatccatcagtgaatgaaaagaagatgatagaattctgtaaatttcatgagttgaagtgacatgtttgatacaacaaaaacaaaaatattacttgtttcctattttcttagagaagtgatttaaagcatctgccttctgtttggttttactcttgaacatctgtcaagagaagggtttaatatcagtttttatgggcaaaatcttattttctgatgggttggcatcttttgttttcgtttcgggaatatgaagaaaatagaatgtcaacttaagactgcaacgtttttcaaatgctcaatcaatacgtcataaatttgattcttttttgatcctttccattataaaacttgctgcagtttcatccctctgcaaatgaaataaattcatgctggtgacagcttcagctgttttcgtgtcttcttgattgcaggttcgacctactcctggccatacattaggttgtgtgacctatgttacaggagatggacccaatcaaccccaaccaagaatggctttcactggagatgccttattgatacgtggatgcggaagaactgattttcaggtataatgtctatacagatattcttttagttttaagtttgattggtgatcaaatgtcagcttcatttcacttctttgttctgtttgcagggtgggagttcacaagaactctacaagtctgtgcattcacaggcaaggatttcggtttaggaattagtttatatttttacactcaggttccttatgcatgcattggcctaacactcactctcatttggctatggatccagattttctcattgcccaagaatacattgatttatccggctcatgactacaaaggattcactgtaaggaatcaaatcatctccctttgcttgcttctgtactgtataaatatatatatatatatatatatttaaaacagctgcttacttgacatggttgaatttaggttagcactgtaggagaggagatgctctataatcctcggctcactaaagatcaggtgatcctttatttattactctaacccatgatgaggctgaaagaagattagagtaatagtgtcgtgtttgaacaagtgaagagtaaaatgacaacctagtttcaatgtctgaggttcgagtcctcctggatgcgtacatagcaatttaattgttatagtttcttagtcctcaaatattgttgggttaggcggggatcttagtttcaatgaaaaaaaacagacaacctatctcattagaccatagtaattcttcaaaaccaacatcaaatattcaaagtaaaagacaatagatgatgaaagggaggctaggattttattgcaaaattaggggatagataccaacatgatatatgcaagatacaagtgaaaccttaagggcagaatagagaaaaagactgaagtatattacaatacaaagaaagaagaaaacattgttactccaattattttcatgaaatttattggtgtcatctatatgctgatttatcctcttaactgatatcaatggttctttgttatctttattttatttcttaattctttgcactttgatttgcaggatacatttaaacatatcatggaaagtaagtgcagttatctggcttttcaaatatctaacacaatgtcaacttcaaatttcatctcatattcaattcaaccatgtctaatttaataatattacagatctgaaccttccctatccaaagatgattgatgtggctgttcccgcgaacatggtttgcggtctacaagatttgtcttcaaagcctgttgaggctgcatcaaactagatatgatcaggtatagattagtaaattacaacagtccattcataagaatctagtactcataaaagaattgtaaatttgagtttgatatttgtataatgatttcagtttaagataagcttttaataagttataaaacatctcttttgttgctcattcactattgaaagttgatagtaattggttttgtcttagtggatgaataaacaaccatgagttgtgtcatcttttaccttaataatctctatttctgttatcttctcttaagtttaatgcagatgatttcatccttgattaactcaacactgggaaccactcatccaaagaccaaatggtatgcatcaaaagaaaccacacaaaacaaaaatgtcttctcttgctttgtactgctgtaagagattatatagcatgtgtactacaacacaagtcatgtattataataaagggtaaatagcggtaagtacccagagttttaagtttgcaagcgatataaatttaatatttatttttagcggcataatttttagcggcataagtgttcaaggtttgtacaactgtagtttgtacaactgtaattttcttccagtttcttcagtactgattctttatgtgtgtcttgtttaagacaataacagtatgtagtgatgaaattagagaaaaaaaaattacaattttacaaacattaagatttatgctgatttatgccacttataaacttaaaactttagatactcatgagtttggattgtacctctaagctaattaatctcctgtgttcatttcaatagtctatgcttattgcatacaacgtacctttacttatagcctttatgcataaaataaaaatgttaagagcattgcctttgattttaaatcagcaagtttatgttgggcgaaaaatgttcactcatgttgtgttcaatctttactccttaaaaaacgaaaaataacaaaatatggtgtatatttcaataaattcaaaatttcgcctttttttaaaaattaaaaaaaaaatctcattttaacctctttaaaaatggggttaaaagatgattaatgtgacaatttagcaacctaaagattgctcttaaatgacaattttgaattttgtatttttaaaatggcacaaataatagtttagtgattttttttagtataatcaacttgaagctcatttctaataccaaaaatgcaaaaaaataactaacatgtttataatatctccaattgaaattatcattatgttctattttgaagaaaaaaattaaaattaatgtattattttatatcatttaaaaaaatatatatatggtttgaattattatttaacaatataagaaaaatccaataaataatttttat

SEQ ID NO: 15216 - DNA, 6192 bp, Cannabis sativa
  modified_base (1112)..(1118): a, c, t, g, unknown or other
tagacttttttttttactaaaattagataaaatccaacaatcttaatagttcatgggttatttttaacgaccttaaaagttcagtgggcatgattaggtacatttgaagggtaaaaatcctaattaactttaatttaatacacaaaacatcaaattaactatcacctgttgtactcgttggttatcttctagtagctcgattcccttcacatataattaataaaaattaattaatggccacacaccaagaaaaattaaataaaaattaaagaaagagattttttgtgatttttaatcatactataagtcatataggaaattcataccataagtatggactgtatattctatttaaagtcaatgagttttaagaaaaacccatgcatatttaacataatattgtactttctaaactgcaatgcatacacatgataaaaatgtataaaaataaatagtatttagttgcaacaagctagttatagtctctctaatatttttatcaagattattaactatatatttgctcactaattttaagtggtttctactggtttattattttcaaatcacaaagatctttttggattaattcggatattccttagaattttatttgatttcgatatatatacatacatatatatatatatatttatagaattagaatgtgaaagtattgtagggtgtatgagttatgacaaaaagtatgtgatttcatctccacaatgagtatatagtacatacatactcttaaatatatatatatatatatatatatattttatagtattaataatttttcacaaactattaatgcatgtgctgtttaatactttctaatatatttagataatatgaccccattgaaatatttgagaaatatcctatcaaattttcatcttcacatgttttgtgatacataataaatcttactttgattctattttaattaattgctcacaaaaatgaccaacttattcattctctctctctatatatatatatatattctttttagtaattaaaatccagacctattcaatttcaatatccaaacctaactacacaaaaagactgtatgtttgcctatatatatgtatatatatacatannnnnnnatatatatatatatatatccttaacatgcagtcattcaagttgatcttacaaacatattggtaacaatatcttgatgatttacagtactactcaaattctatattcctgcaatatatattcatatagatatatataaacactgagtatatagtaaaaaaatataataaaaatattattttatacatgtttatcaaacactagatatcattaagcatttctcttttagaaatggaaatctcatttcattattttcatctctaatatttgtcattaactaaaattaattgacaaatgactcaattaaaaaaggaaaaataaaagtatttactcatgtgggatggaattatattgatgataagaattgattttgaagaatatatatatatgctgatgataataattatttacttctgagtttatctttatatatggtttttgattttgagttatatatgtataatattatgttttccttatgcaataatacataaaatgaataaatacatgtttctttgcttcatggtctgaatgcccaaaaatgtacctagtttgcatatggaatttgtgtatgagaaactaaagattaaactacattttgagagttctatttatagagttacaatgagaatatgggcaaagaattgaggaagaaagagtggcaaatataaggagttgagaatatatatattatatatatatttatatatataggatattgcttggataaactacgtgtattagagtttaattcaaattaatttagttatctatatatatatatttgttaactcacaatttatttttgggtaattattaattttgaaaaaagaagttttggtgaccaaatttagagagtcttggtgattaagttttaaagtgtcatggtgccaaagatttggaactatataaatatatttttttgtgtttgagagaggtatgtgtgtgagataagaagagtaagatgttaaaagagaagtgagtaaaaaccaaatggtgtattacgatttggtggagagattgagatagtgagtgtttgtaattttaaagttataagtgaatatatctctctttgtgggtttggtactttatcaagccgagtaaaaaaaaattgcttcgtttctttattatatcattgcgcttgaaatttattatttttttcaacaagtggtatcaagagccaaggttcagatctacactgaaaatgtcaaagatgatcatgtaaaccagaagatatgagatcgaactttttgatggaaagaaaaatttcagcttatggcagatcatggtgaaagatgtgttgatacatcaagaactcctgaaggcacttctaggaaagaagattgataaagtttgagaggagctgcagccaaacgcggtacgcactattcgctttagtttggatcttgaattaaaatatagtgtattcaatgaaacatgtccgtctgagttatgaaaaaagttttttttttttttgttgataacagtgggggtgctaaagcaccccaaaacagggaaacaaacaaacaaacagagaactgaaaaaaaacaacacgaacggaaagaaaaaaactacaacaacaaacggaaaaaaaactggtcatagaccaggatcccactcaaccaagtcatcaagaaccgtatcaggcagagcatcagagctaatcctccctgaaaccttgtaacaagttgcccatttggcgatattgtgcgccataaagttgcacctccttggaatatgaataataccccactccttgaacttagaacagtaattgaaaaatcgagctttggcatactgagttatgaaaaaagttaaaaaaatatcaaatagattatatttgaagaaacaattatgagttagagatgattgaaagaagtgatgttagggatcatataaattgatttaataagtgcataactcaattgttaagtgtagatatgtcaaaattgatgaagatgatcaagctatattattttgttagcttcttcaccaaaattgagacactagtgactacacttttggttaaaaaaactattttaattgtggatgaggtatcgactgctcttttggagacatatatatagtatcaagcaatcaagtagtatatctcatgctgatcaagctcgtgtgacaagatcagaatcaagctgtggtaggagtttatcgataggattataatgatagaagagacaatcgcactcattcacgctcttggaggaaagtggagtgctcttgttgttacaaaaaaagacatgttaggtgaaattatgaagaattgaccaagcatcttgaagcaatgaagaatcaacaatgcaaagacacatcagattccacaaatgttgctagtgaaggctttgaaagtgagtctgatgttctctctgtcatagttgataaaaaaaaaattgactcttgaattttagattctgggtgctcattccacatgcatgtgtccgtataaggagtattttgatacttataaggcatatgatgactgtactattttgatgggcaatgattctaactctaaagttgtgtggaatgagaattgttaaactgaagatgtttaatgatgttgtgagaacactgactgatgtaacacatcttctaacattaaggaggggcttaatctctttgagagttttggatactcgtggctatgactattttacaaaagatgatgaagtaactatcaagaaaggtggcttgatagttgtgaaggataagatatagcgaaatttgtataaattattcggaaagactattttaggtggagctttgaagatagagtcaagttacaaaaggcattcagttagtgtgttaaggaatacaacaaggtggagaagactccaattttagttaaaggttgtttgaagaaagaagacatcagtaaaaaattgaagaatgtgaagataaatgctcaagtgaagttcaatgaaagtataacttgatgcatatatattcttattgatagtttgaattgtgggtttagaaaatttaagtcaaggtaaagattgctcgagtttgactcaaattaaattacttatctatatttattaaattacaatttatttttgggtaattattaattgtggaaaaatgagttttggtggaaaagtttagtgagttttggtgactaataattttagagtgtcttgttgtccaagttttgggactctataaatatatatatttttttttgtgtctgagagaggtgtgtgtgagaagaagagtaagatatgaaaagaaaagtgagtgtgagaaagtgggtaagaagcaaaagttgtattgagatttggggaggagagattgagatacatagtgagtgtatgtaattttaaagttataagttaatatatctctctgtggttaccaaaccgagtaaaaaaattttgattcgtttctttatttaactgccattagagtttattatttttctcaatactatatgtgagctaacatcaacctttaaactcaagatatatgagtttccaaggcaagagtgtgcacaaggcaccatataggcattcggctgaatacaaaagattcaccaaacaatgaagatgaaccacctaataatgagggagtaagcttgtggtagatgaaaagagagaataataagtacctatatcactaattatcgcggtcccggccctcaacataaaattactccttataaattttggatctaaaggggtttgtgccacaaaaggtgttcatgcattaattaactttcaaaagatagtgaatatgagaagttcttgtgaatgaaaatgatgaagatcatgaagtacatagcacaaaaaataacttgcttatatgttcccaaaagtctttgatggggagattggggttttgctatacaaagaattttttggaaacaaattaaataattgttaatggtattattattttgttcaaatattgatggagaaccaaaagtatgctacaagatgtatgcataaaagagcctaaggtaggcttagggtaatgtttaaacaaggaaacatattgttgatggcatatagtgagatgagatggcaatgatagtatcacatgactattttcttctctcatattactcaaaattttataggactatatggatataaaataaataaatatatatggttagaatttgaaagtgtggtttaaaaaatagaatgtggtaagatgtatggtaattgaattatgaggtgttctatcttaaaataatagagtaacccacacttttatatatgtaaataaatttcttacacattatccatgtaaaactctataacatcaacttaaatgatgattttgaaactatgtttaattagccataaataggttccctaattgattttgaaaagaaaaaaaaaaacacaattagttttcttttatatgtagttaattgttttcattcataacaaatggaagtttgaaatattttaaaatgttatcattaagtagtttttgctctgataccatataaaattcaaatgctaatatttgtctatcaaatttatatattatacacattaaaagtaaattttacaactaaattattaatataattatattaaaaatatgatgaaattaaaaattattgatggaaagaagaaatgattaataagagtatacacttaaaacatatatataatttgattgcatgaacaatacatgatataaccaaaaaattattaaaaaaaaaatatattttttcctaaccttttgaagaaatgtgatctcttttagattagattgatcctgaaatatataatacataaataataattatttaccaatatatatatataatgaaaatcataaacaaatataaatttaaattataataagaatgtgaatatatataaatgtctaaaagaaagatcatgatcaaacctttatttcattaacacggcttaagctaatatgaactgatttttctagtttctttaattcttcaagacttagttcttgaaggttttctcccataatatgtctgtatgcatttaaattaattagatattaactagttaattatatatatatctaattatttatatccatacatatgtatatatatatat

SEQ ID NO: 15217 - DNA, 8044 bp, Cannabis sativa
aaaaaaaatcctaaacaaccaatttttaagattttttctaagatatggttttgaaataaaatatgtatatttcccaaattatggtaggtaaatgtagtccatatatattttatttaaatttgaatatgtaataagattaataatttttcaaaactagatgattatatgtttaaaaaaaatcgatgattataatattaagataaagaagttcagtaataaaaaaaaaatattaagataaagttaaatgaatcttagccgtccatccccatatttggtaaaacagttattgtcaattacttaaataaaataataataataaaagaaaaaaatccgacggtgcaaaatctattgcttacggatatagaccaaaaaaaactaagagagacccaattcaattcagacaatattttttttttttttaaatatatatatttatataaatttcaataattaaaaaaattaaaaaacgacccatctcctccaaatttcttagcttcgtttcttacaatagagaatcagacaatctgtctctcgtttcgcggtgacgttatctgtgctgattagcctgattttggtgaacaatacgttttgagacgattacggttttgaccttcgtgatttggggctcctatggggttggggaacgatgatgatcttaccactgatgatagcgatggtgtttgtggcgctgctggtggatgtggcaagtcctgtggtgtctccgtctcgtgttcgatttgcctcgaggtcgtcgccgaaagtggagatcgatcttgggctaagcttcattgcgggcatcaatttcatctcggtgagctatatattataatcggcgttggattttatactagagttttaatttggtgggaattcagtttccttttgattacaattgttgagatctggttgcagttttgattgttcatgcatgtatgtacccttttgaattttataattttattattttctaatgggttgcttgttcgattaggatatgggagaaatatgaacgaaatggactttatttgtcatcatcttacttacatttttttccttattgcttatgtatttgtattaatctagctgttaaaatttagaacagtcatgttttggatgaattgcgctatctagatcatttttgggaattatatttttgcatgttgctatattatgctgtgaattgcagatgttttctatttggtttgacaatttgattagattatgacggtttggatttgtttatgaagacccgtagatatgaaatgaatgaagcagttcaagagagtttttgtattgggtgtggaatttcgagaaatttgttgtttgttggatgcatattagtttgtgagattgtgattttggcgaattttaacattttcaatatgcagaagaggtatgcaaagagctattgtaagaaaagtaaatgcaaggaataatgcactcagccccattatactctgtgatcctaggtctttaactctatatatgatagttgaacgagctctacagaacctcattcccgtgcctgctcttcaaataattatattccttagagcacttgtattgagaagccactgttctcataggaatctaaataaattaagctgatcatttctgatcggctcccaaaagtatggtcaaatagtatgtgttgattaattgcaaatgtatgttgtggtataaatcttaaaaattgtattatagtttcaaatgtatgtatcttattatgcaattgaaagatgtttttggacatatttcttcaatctagctcagtttttttttggattgagggttgagctaaaattttgaagacacctatgctatctttacctatagacaattatttgccatttttatttaatattagattagatatttcattttcaatatataatttccctttattcttattacacttacgattaattttcttattcttcttttctcccaatcagattgcattggttcagcatttaacataaagggagctatgcaatgtcccaattgtcggaagattgagaagggccaatggctttattctaatggctctcgttcatatcctccagagtacagcgttgaagattgggcccatgatgaggatctatatgatttaaactactctgaaatggtaaaagaaaaataaaaattctgttggattctcttatatatataaatatatatttttttacggtttagtttttatgtttatttagttggacatttttaaaagtaaatttattttatactttttacaccattttatatcttggaattatagttaaatactagatataaccctaacagtcacttagaattctttcttttttttttgtctgaggtttgaagggattttggaagtgaagtattttgctgcctctattgtttctattttgtatatgacatttttgagggagttttattcttgtccaagtacatgaaccaaactttgaaagtatatttgacttcatttgtaacttattaaataagttccatagctttcactttcagttctattgtatatatattatgtattaaaaaaaaaaatcaaataacacattatcgtctatcttctagccctaggtacttttttgagtttctgcaatttcgcatgttcattcatttacagtaatggtatctggatggagctcttcatttaatgctactttggtttttgcagacctttggtcttcattggtgtccatttggcagcttagcaagacttccttccacatttgagtaagcatgattttatgtattaaagcttaaatctcattttatatcttcttcaacttttatgcaggaaatatgggttgtctttaatttctttttcttttctttcagtgaagaatttttgcatgtctctcgtaattttatgtgctctaacgattaacaaacatctgcttgtgaactatgtaaattaaaatctgaaagaaatcataaataatttgggtcaatcaattgttgcaattagatcaagcaatgtaaggtttctagtaatagtaataaaaggatgcacttatgaatctttttttttatctaatataggcaacttgaaaggttgccattctggcatattggattgctttgactgagcttggtttttgcgttcatgttaatcttccttatcaagctttgataatgcattcttgctaaaactctcatgcttagatttgatgtgtgtttcataatgagccaagtcttatttatccttttgtagcacattaatggcaaatctgtaatatttatattatgataatgcttcatgctaaacctgtcatatgttaacagaaagcatcctcctgttagagggtgtttggcatcataactacttaactgttttatgaaaacaagtagcagcgtctgatattgttttcagaaagcaatttttcaaaaataaagttacaaaaaatagaaaattttgagaacaagaagaggggtgttttctgcttcaaaaactcattatagttttcaatatttttttctttcactttttctcatcgtaattttgcacatcactctctctctctctctctctctctcatcacatctctcatatcattttctctattactctttcatcacttttagtaacatcattttctttctcgttactttatattgagtcactttctctctcatttttttttttatagtttctctttcacattactttatctcattattatcacttttaagaagattgtctcttattaaagaaatttaataattttttaaatcatagtttgtttatttttattttattttttttgaaaacattaaccaaacgtctcatgtttcctgaaaaaagaaaaagaaaaactgttttttgtttctcatatttgaaaatacaatttcaaaaacaaaaacaataccaaacatatccttggtttctgcgatgtgcagtaaacgtataccattatactttgaactattgatgatttaaattcttcagaagttgaaattaagtgatgccctttttggttctgtagttttgtaattaagcatactatttttcatgctttatttattattattttgtttttgcaagtctcttttcctttccacatttttttggatccaagtatgtgatcttactagagtagttattcttcatactaaacttcatctttttttattgcagggatggtgagttctcatcaactgcatgtaagctgactcttctatgcatttatatttttcttgctgtcttcatctctttaaccggtgatgtttcttcacgactagcgaaggcaagcatttgactgaaaaacctaatgttgcaatgcagatcacaatctacttggacaacatgctatttttgctgagcatacagctgtatcctcggctactcatccttgcccatatattacctactttggaccagtacacccgtcatcctcaaattccagtggaagtatttcagatggttctagcttcaacaatcattggcatggcacatcagcacctagtgatttgccagcttcttatgcttttcctgccatggatcttcattatcacagttgggagcaccattcacctcaattttctacaaccggcagtcgtattagtggagctgatcagccatctattccgcctgttggccaaaggccagctaggcccaattctgatgtaccaagatcagtttttgtgcatccattgcttggtcacaggtacactagacaaattaaagtctaattattaactcttttatttggaccaagttatgtgaaaagtgtttaactaactctttctgaagagtaaagacatttatttctgtttgtgtgtgcgcacacgataaatgctaacttcagacatgctttttgcagttctagtgctagagctgggagctcagttacttcttcaatgattcctccttatctaggtagcaatgctcgtaaccgtgaaagagtccaagctctccaagcatattatcaacctcctagcaattcaccaacaatgagggcgcctcccatttcaagctctcgacgatccagcagtcatagaggtatggcccaagcaggcccggcggcatcatcatcagatcaaaccggtggttactactatttcccatccgggtcatcaggtcgtaacttccaagaaggtgaaaatccattgcccagtcgataccaccattcatgggaaagggaacccttgccttcatttacgtcaaaccaggttgagagagatccaggttggggtgcttttcaccacgcggctggtgggtcagattcaaatctaagaccaaatggcttccggcaaaggcatgggtctgagagaacctcttcacagaatcggtcatgagctctcctcattatccttactgggtgaagcaaactatcagtactatgaatgaaaccaaaacattatgtaatgcttttgaaaatggtagatatgcctggtgtttgtcatatcatgacaggcttcaaatacttttggagtggccccaaaaacaatatttttggctgccaccaggtggtgtgaaggactgtgttggcttcctctttagtttctttgccttgggaggatatagaataagacaatttgttggatgggcaaagaagaaaaagaaagcgccatattatcggtcatgtgacccaaaatgttaggtttggtgaagaaaaaaacctaatgctccacaggacagtttaattgatgggtcatttatttatgtttgaaagcatattcgtcaatgcttttgtttccctggtgaacaattgttttcgagtatataagaaatgaggactttttccgatcaaacactttcgttttctttattgttagagaatacatgagtgaatgaatgaatgatatttagcaatcaatgttaggtatgtgcgatcccttgatgggtgttactgaaatggtaatcaataggtatcatccacacgttttaataaagaaaaatgggaattattatcttcataacataataaatggatgtttgggagagagccaatataagggttagtatattgtcgagacattaatggattctgagaagtgaagggcatgagataaaagatatattgccttggatagattttgtttaggattacatattatcttttttttttctaggataaaaaaaagaaaattttcattaggtaaatcagacaaagaatattttctttttacaattttgttaaaagaataacatatagttttttgcttaactaagaattatataacgaagtgctagctaatttttattggtaaacccaaaatattgatcaaaacattaccaaatatcactttagagagatttatcagagatttattggtaaaccggaaaagatctgtttgaaaagaagaggatgagtgaatggttattttccctttctcaaataccaaacactaaacacaaaaaaaaaaaaaaattaaataaataaaaaatgctctgcgagaaacggaatacaaaaggagaccccgatcatgaaagagttatataattccttttattcatttggtgcaaggtcatggtcatcaaaatttcaccttttatattttatcctctgcatctcctccaaagatatattaaaaggtaaaaccaacgaaattaaactatacatacctggtgatggtgatggtgatgaagtgacagtggcattgtcattacacattggagactaagaagctcttcatattaacaattaattttcacatagacaagaaatttatttaatactaaaactaaaaagtatctaacgggatgatttattacgttttgtctattgatatgttttctctgtaagttctctatatcattttattggtttttatttcgtaattggtctttgtggattatggcttctactagccgcgtggctggtgagttagaggagcagtgcggtaacattcaattgaatgagaaagaggatattttttttaagattatgatacagcggctgccccacatgatcgtaattgagttgataataggtggtgtcttgtttgtcgatttttaacaacgagaataattgattttgatgctatgcatgttagataattatatgtaaaacattaagcatatatgatcttttataaaatgccaaataaattgaacatatatgcattatgaacaaaagatcgaaatacctttagctattgattttttaatcttcaattacacacgagctttgatctacaaaagaaaactaaaagtgagttagtgtgggcatttggacttccaatctctctcttactctcttagataaatttactatatttcacaaaatgagtagtgagcatagacaaagacaagactaaggttatcctagccatgaaggtaccgcaatcaaccaaagagttgaaaaactttctcggaaaagtttcatatctacgacgtttgtataccagctttggtagaactcacaagcccgctttaatcattgatgagaaaaggtatgtcttttaattgggacgaaaaataacaaaaaaaatatttcttaaaagatggtagtgacctctaccgtagatgattcagtggaaaattgttacgctgtattagtaaagaaaaagatgaggaagtcatggaagaagtccaccgcagggattgtggtgaacatcaaggggggaggaaactatttgaagaaatcattcgtatagggtattattggccaaccatggaagcagatacaatgggattcacaaaaaagtgtcaaaaatgccaaatttttagagacaaagttcacgcgccagccattcctctccaatctgtaaccactccttggccgtttcacacttgggctatggaccttagaggtccaatttcaccaccttctcaaggaagaatttggatttttgctgcaacagaatgtttcacaaaatggtcagaagcaattcctttgaaaaaagcctctgcagaagctgtggccactttcattctagaacacattatttgtcgctttggtatcccgaaaatgattttctcagataacggcactccatttactggaaaagcaaccaagaaattgttggaagactatcaaatttttcatgggaagtcaactaggtactacccacaagaaaatggcattgctgaggc

SEQ ID NO: 15218 - DNA, 4604 bp, Cannabis sativa
  modified_base (34)..(48): a, c, t, g, unknown or other
aaataattttcataattaaatcataattaactgnnnnnnnnnnnnnnnaactaagcggtctttacaccttttcattcctaatgtcgcacgaccttagaacataacctacatgaggagcaattgtcggactttggactcgatcaattctgcctcggatgtaataaagggattctaaggaaatttagatttgcgagctttacgagccatgatatcaaactccaagtcacctggtagaaaagtaacagtgacttgtgataaaaatagtagctttgctaagggaatatttgctaaattaggcaactcgggtcaaagctgcttttcgcagacaaagacttttaccctctataacttcattcaagaatcgcctatagtaagtggatatctcttcttggttgctcctagtggtgtgttctccaatctttttatcgtttatttcaagtatggtttgggatttttgaatttgaggtttaaaaactatggcctgaaattggagataatctgattctaaaatggattggtgtaagaagttaagtcctgaagaaatttttgttgaaaactcttaatataaagatcccgaacgatgtcaattctgagtttgaagagtgaaatcacttgatactcagaggaaatatgtaagggataatgagggcatgccattttagggagcaaagtggtaaaaggtttttttcaattcagaaatcttcataaatgataatggcagaataagaggaactttgagttttatacccaaataataaaaaatattcgatcataatgatggttgattgaatagatggaaactattgggaaaagaagagtcggtgtaataaattctaaaacaatgtgtaccttgaagttttgaactgccaaaataatgcgtacaatttttaaatggaaaaaaatatgattgtaccccttaagtaattaaaaagtcatttttattgtaaaaaatactttttagagggcaattattttactaatatttcaagtaataatatggtgctgacacgtgtaatgaagttggaatacgaaccagcccaaattatgcaataataaatacatagacagctcaccttgtgaagtacaattggtagaaatattcaaactcaccctcttacagacaatggtgagccatgaataataactacttatgatgagaccagtgagacgaacaaagagctcgcagaatacacagaatacacagcagaatgaaaatatttggaaagtgtagataataaattatccaaagagctcgcaactcattgacccacatactcgtaagtatgttgagaagataagacatcatctttagtatggttcacctcgcacattgtcatatggtgataagcgtctcgcgtatgactcacttaatattaatgggagaatgcgagaagtattacttagcgtatacttagacattgattcatgataaagtgtttaaaggagaattattacattgcgagcaggatgaaacatagtcagcataactatttatagataaagttaaaagagcagttatgagagattatttgtcattatcccatgtaatgtaaatgtgaaatgtgagaattgttcatgtttcacgaacgattacaagcgataggatcccaagggaataaatgtcaccctaaactcctccaaatagggacataatctttggaataggggatgaccaatttgagaaagagaaagaattatacccatctttcattctgtatgcaattcattgtattcggtatacaatttattaattttttaataagatggactcatagattatgaagagttaacttcaaaactacgttaaaaattctcttgtcatttattattgttatcattattatcattgttcatttaattcttgagcatattaattacaaaaaaaatgtatttattaatcaataaaaatctgcgttaacaatgactagctacatggttgcgatttaatagaatttagaccattaagcataattgtaaatcttgatgtaaaatttaatatgtcatttaatgttcatctaataatttattaaaatataaaacaataataaacatacaaaagtaaatataaatttaataataaaataataataattataaaagtcatttaatgcaaatgagcatgctacttaaactttaataataaaatattaaaaataatataatggtaaatataaaattatagtatttattgtgatgtaaattttgcatcatgctatattgtgatctaaatttagatcattgtttgttatgtgagatattagcatcaagatttggcacactattagagtagacttttgacaaagtgagttatattttatatttgcatctcttaatattaaacaaaataatcatgtttaattttgactaagttataattaatttattttttcgttatctataataataaaagtttacaaattgaattgagattttaattaaggcataaaactctaaaagtatgagccttacaatggtctgtttgatgctatctcttcagttattgtgacagcaataatgtgtcgtgattggtgaaatcgaaacaagtgtgtttttgaagcttcatgtggttcaatcaaatcaattaacaatcaaattaaggttagcattaaggcaagagttcaattttgtaatttgtgcaagctcactattagagagaaaaatataatcacttataaataatttttgtgttgtattggttgttgtttaggcggtgtgtattatttagtaattatttgaataaaaattcttcgtttgttaaaagaagggaaatatacatcccatattattttttttcattttttttattattatacggtaatatttatttttatattgtttttttttattttgtttttgtatattgtctaccatgtactatcatgagcatctattcatctatttttattattttttaagtgatagatgtatcatttgattttgtgttgtaactttagtgacagatttctttttttattatttatttttttaattattattatattatattttaagtgatataaaattgtgatttgacttgtgttgtcactttagtgacagacttctttattttttttaattaaaattaatgatgaaaaatgtgacactttaaatattcaatacccgttcgtttcactttaatcctacttctccattattctctcttcctattgatcatgtttttttttttttcactctctgttttctcaagttctctctatctttctccattgatatataagttttttatttgttttcttgttcagttcttcctcttcatcttttttttttaatttttttatttagtttttgaagtttttagtcacgtttttagaaaagataagatttagtgtaatttttttattttgattttccagaattgagcttgcaactatagcctctattgcatctgatgttgaggctgtgctgaagatgattagtttttttaatcattttttattttatttaattttttattcgttttagtgttgttttactattgttttccatgatttatttatttaacgttgatttcattgttcttgctccttcccgctagaattaatagttgttttctgggtgttctcgtattgttgtggtggttctatccgtgggtgtggaagatagagaatacaaatatatttcttcttccttctctatgattgttttgtgatttttttattctgtttcttctataaatacttttgacgagctcactggaaaaagaattttgaggtgtgtggttcttttatgttattctaagtgactatatttggtttattgttttatatttatttttgtgttgttttagttttgttttagtagtttttttattttgattttctaggactgggcttgtaaatatagctgctattgaatctagtgtggaggctgtgcagaagattgttagttctttttaatccttttttctttttattttgtttgatttgttttagtattgttttatagttattttgtcatgattgtttttcttttttttttttttttttgaataatcatgattatttatttgaggtcgatttcattattttttctcaatctcgtcagaattaatggttattttctggttgttctgatgttcctatagtagttctgtccatgggtgtggaagataaaagcctcgttttttttttttttttagtgtttacagtataaaaggaaaaaaaatgaggaaaacaatataaatgtaatgtttaccatgtgacagtaaatttgaaaaatattactcaaaatctagtatttttgtaaaaaccccttaaaactactaattaacattaaattttacatcaaattttataattataaattatataaatatatggcaaaattatttttcgattcaaatagggtaaattggggcataaacacctaatgtttcagattttatacacttaaatacctaatgtttaatttttggaggtaaaaattccttatgttacattttacaccgttactaccacttccgttaacttatcataaatataaatacgtggaaggttcaaatgcattacatttatttattttattttaaatttaatattcttaatatcaaaaactaaatactacttgttaaaaaaaaaaaaaaa

SEQ ID NO: 15219 - DNA, 7912 bp, Cannabis sativa
  modified_base (6278)..(6280): a, c, t, g, unknown or other
ttagatgcattacatgaacatgtagtcaaaacattgtgcaacctggaaaagtttttggctaggaaccgacgccataggggtccatatggcgtcgattcatatggacccttcagcgtcaccctgatcagcgtcggtagcgaattttgcaaaaactgacgctgaaagggcttaaaaactgcctctaaagggggtttttgttgtagtgaagggaaaccaatatcactatatgcactgcacctcaccttaaaagtattcaacaccaacttgagtgataaatataggcatacatatccaaatctcgcaaaaatggctagaaccaatcaacacaacaccatttgttttttttcttttcctttggtccataacagggaagaccttttcccctttaatttcaacatgtatatgcttatgtttatatcaacccaagacacttttactttcaccccatatattggaggaagaagattgagtgaaaaaaaggagctaagattgagggaataaatatttacaacagtttgtataaaatgcaatgtaaattatagtatagattcagctgaggttgagatttgataagataagaaatccaatcagcaagatcatcgggaaagaaccggaggggtgattgtttgggtatgcgtttctagccaactatgtggaagtaaacttcaatagtgtcattgaagtcattacataagattcaaacttgaagagtaacaaaaaaaaggtaaattttcaagtaacgataactaaagcttacccaagaagccaagtaaagtgcttggggttgtaaattttaagagcactgagaagaccccaaattacattgtgtcctccaggagatcgtctcccacaaaaggctattcccaccctattaaaaagacaaaacatttaattaacgatgctgatctttttatttctattttcgctagaaaaatcaaaagtcgtactgttaacaaatagcaaagcataaaccttttagcaaggtgttcagttatgatatgagcatcagctacttttgtagtggccctaagaaagtgagccaatgggtgaccgtaagtgtgagggaaagctcgacttatggtgtgggcatcagttgggtcaaccgatgtagttgtatcaccaaattcaacgtttaatagtcgtaccctggaaacacaatcaaatataacaataaataaataaataaagaatcttagtatcattgcagcatctggtagagaaccaaagactaaatcaatagcagaacaaatctaatgcctctgcctacttcggcatgcaaatagatccaatccaatataataaagattattaatttcttttgttgatttattagggaattaccttgtttgttgtttcagcctcatctactttaattcacttataatgtcttgttgttgttgttcaaagggctaacttgtgggattccaaagacttgtgaaaatatgtataaggcattcatcacaaaagtaaacataggtaaaattccatcgtatgggaatttattatgtaccacagctcctagtagaatttggtgcagaaaatctgttattgatggcgaaacatccctatcatacattccatatttaacattggtatagagagggaaagatcacaactcagtctgtaataaaaaggaaaagtgaaacagtttgaatcactcataattttttgttaaactttccataatcatgaaggtatgaattaatggttatgagatgagactcaatccaattgaatgatgaaatgaaaaattaacttgaaattaatgaaaaatcaaagaacaacgggaagaaatggagatgcgcaaaactcattgaggctgtgcaggagaagatgtggtccgaatttggtcggagtcgaggtcatcgaaataaaacgtcatacaaagcggtagcaaaaagtggtacggggagcagattgcgacttggatggcgaagggactttagtccgtggaagaggaaagaatggagaagaataaatttggaaacgtaaaattgaaaatgaaaagttgatgaattaatatttttgtaaaataaattgtataaaagtgtaaattataagaaaaaaatgtaaaaatagaaaataaattgcaatttcccgtatactagctaatttcccaaaaattgatgtgtttttttattctaaaatagtttattgattttttagaaaaaaaaaatctaaaataataattatgaataataatatattacaataataataataataataatgtgagtgttataaaaataaaaggataacattaataataaataaagacagttaattacaatttaacttaatgatgcgggacattggctaagaggaagggtggatattgggaatttatttcaggattgcttccagtccatgttctgttcttcgaatcctgctatagatgatgagttggagtctctttttgcggagaaagtcactgtgtcagagaacgaagcgattttccgtgtgcctgatgacggagagatcaaggatgtggtgttcaagctgcatccccttaaagccccgggacctgatggatttcctggtattttctttcgaaaatattgggacattgttgggatatctgtctgttggatggtccaacagtttttcataactgggaaaatgcaggagagagtaaatgagaccttcataagtcttgttcctaagactgcgaatgctgctacttttgatcattttagacccataagcctatgtaattttgggtataaaatcatttctcgtatccttacggaccgccttaaaggatgtatggatcagctagtgtctccctttcaatcgacattcattcctggacgttggattgcggagagttccatagtcgctcaggaagtccttcattcaatgaaaagtaagagaggaaaaatgggagtaatggcggttaaaacggacatgagtaaagcttatgatcgtcttgaatggggatttctcgcccgtgttctcaaggcgaatggtttcaatagcaaggtctgtactctcctaatggaatgcgtaacatcagtcaactattctatattgctcaatggggcacctttggctcccttcaatcctaatcggggtcttcgccaaggagatcccctctcaccatttctgttcaccctatgcagcgaagttctttctaaactcatccttcgtgctgaaaggaatgctgatctaaatggtattcgtgtggcaagaaatacctctcctataactcatcttttttatgcagacgactccatattcttttgtagtgccaccgtggaaaatgcaaattctttgttgaattgtcttcataagtatgaaagatggtcgggtcaaagggttagcaacgtcaagagtggtgtggtgttctctcctaacaataggcgccactgtagagaggaaatcaaaggaattttgggctttggtaatttgaatccgaaggagaagtaccttggaaaccccttcttcttcacgaccagcaagaggaaagattttatgttcttgaaggacaaaattcttgggaaattggaagggtggaaggctaaaaacctttcccaagccgggaggacaactttggtcagttcagttctccaaagcatcccaaattattttatgtcttctgtgcaagtccctaccaccttgtgtgaggaattggattgagtggtggctaagttttggtgggctgggaatgtggacaagaagcactattctgcgatgagaagctagaacggtttgtgtcagcctaagtgctgtgggggtcttggttttagaagatttaaagatatgaatttggcgttattggccaaactttgttggatggtaatgaaggcagggacaagccttgcgtgaagttacttagggacaaatattgtaaaagtatggatctgtgggaagtggagaggactgggaaaaattcctgatgcttgagaagtttactccaggcaaagtcaatttgcgtgaagggggcatgccttttaattgcagacggttcttctcaaatttgggataggccgtggcagagaatttgaagaaatcaaagggaattttcaatttcaacacaaccagccgttatggaaagttgtcgatctatttgtgccaggatcgagaagattgaatgagaaggcgattagagactgcttctccaatgatattgcagaggatattctcaggattagaattttggaggagggggaagatgttctattttggaaggctgagggatctggtaaattcactgtcaagagtgcttattggttaagtcaacaacataggttcaatgaaccgcatctgctttggaagaagttgtggaagacagaaattcacccaagattaaagcatttctgttggaaattgttcagtgatttactccccactaaatgcaacttaggatttctacaagttgatcaactgttgcgcgagttgtgccattctgaagtggagacggctgaccatttgttttttcaatgcaattgtgtgagggctatctggttcaggtttggtatcaggattcatgactgtaattgggataatctggtggaatttggtctatggtggtgcaatctgaatgatttgaatcttcaagtgatgattgtggtgttatgcgactcaatctggaagtggcgaaatcgaggacctggacgacatctgcaggagtattaaacttcgaactagggactttgtgtcaaagacattatggtttgatcaagaagaagagaatcgagtggtgattgatgacacgaggactgttatgtctgacttgagtgattctagaaggccgtggtgttgcaaggtagacgcttctgttgctcatggagttgctggttttgctggaattcaggttatcgatgatgatgttggaagttccaaggtgtccctgggctggaacaaagtaaggagtgtgctggagggtgaactgcttgggattgctttagcacttcggatggctaaggagtgtcatgcctctgtggttaaaatagagatggattctctggtggctgccacaacctttgggaatgccaaattaccttatggctgggatacttaccctttgtttcgagattgtttgtgtcagtgtaaggcttttgacaaagtcgttgtttgtcatgtgaacaaggaacacaatgttttagctgatgcaattgctcgctgggcgagagtgcatttggctgaggccagtggacaattaagggatgtatccccctcttgtggttactagtttttctttgctttcaataaagttcagttacttatcaaaaaaaaaaaattacaatttaacttttaatatttaatatttatattagtattttttattagttaataaaaaaatatacacattgaaaaaatatatatctatcaaattatttattaaggatcaatgatatctttataactgtcaacacttataataataaaactaatgtaaattgccttttcattttttttatgtttttgtaatatatagataaatatagattgatatttatgttaattaaaaagtttaaataattaatattacacaagtggaaatattattaagtataaagttataataatatgatgttaaaaattaaattataagcttttttagagcgttctataaaaaattactaaaatataatcactaaacaaatagatttaaaagaaaaaaaaaatataaaatatgttactttatcacattagtacctaatcattctctaaactgttaatatattatatatgaatttctcaagagataaatattgaataataactttatcttttaaattatagagtatatcactacctttaagaattaactaataacatagtcaaatattcaatataaaaaattaaaaatgtgtcattaaataacaaatatacaattttaaaattatgtatttataatttttttaaacggtaaattttacgtgcatcattatcaaaaataattgtaaatagtgttaatatatataaggataaatagcggcataagcacctaaagctttatgtttgtaagcggcataaacccaatatttatttttagcagcacaagtacccaatgtttgtaaaactgtaattttttctaattttgtcagtacagactctgttattgtcctaaacagggcacatataaggcctaaattcttaatcattcagtctaaatagaaatatataatatcagttacttccaaatgttcttttaaaaaatttaaaacagagtctgtactgacaaaactggaagaaaattatagttttacaaatattgggtacttatgccgctaaaaataaatattgagcttatgccgcttacaaacataaannnttgggtacttatgccgctatttatcctatatataatgatatattacatggaaaactacattgacaatgataaatacgatgcttacctccaatatctaatctagatgataatagatatcatcaaattgatacaaaatagtggaagctctcttcaattttcgatagaaacatatatataggtgtaaaattagttatatacattataattgtatctaattaatattagaacaataaaattatgatgcttatttctaatgtcaaatctagatgataatagatatcatcaaattgatacaaagtagtagaaactctcttcgatctttgataaaaaaaatatatatttatatataggtatgatatttgttatatatattataattgtatcaaactaatatatatatatatatatgtgtgcatattacatagtgtatataattgtatataatttacaattttttattgagtgaaaaatataatttacaacaaaaattttaagaaaaataatataaaaatatattgcttacctcctatattcaaaactagatgaataattatattatcaaatattgaataacaatagaatctctttaattttatagaagcatatgtagaggtatatataataggtatgaaattaattattaagtaaattgttacactatgaaatagtgtaggggtttattagtaatttttaaagagtgtgaatcactataaatatgtaattgtgaggttattgtgagatatggaatgggtaaatagaactttagttcaattgggagattggcattgtctcgaagagtgcatttcggatatttgtcctgtctcgaagaggactattatctaagaactggtgctttcattgagagaaattacagtgaaagattcactgcaagaactctcaaccatggaaaatgaagagattgttcaactctcaaatctatggagtcatttttcaagcaaactttggattctcaatttgagaatattagttctatgcttgagcaacactttacagctattaacgataaatttgatcaattatatgtggcggcacaacctactctgagatcaactcctacagatgtggagtaatttgtggatgtcgaagaactcactaaagaccatgtggtacctttagcggtggattcaatggatgattcttcagtcgatcctatcggtatcatcccagatagcttggaagcattgcaaaggttgaatcgcagttcgccggaggtagaggaaaagctctttgctcgaatggagattggagatctgagaatctcgccacctcttaagcgagcaatgagatcatcttgcgtgtatatagaagaaggtgatgttggtgtagtgcttgtggatcgtaaagtggtgctacgagatattgttttcagtgttgatgcaggcacaccatgggaatggttccacatgctactgacagaacggaggttgatctttgatcaaggacgaggagcaaagttgatcgacgatggactgagcaggccggttactggcgggcggagagaggcatggtcgcgccggattgcagaattgcagtggagaggtggtgtaacaccctaactagcataggtgtattacgtgatttttaaacatactatgcagctcgttgctaatc

SEQ ID NO: 15220 - DNA, 3239 bp, Cannabis sativa
tttttatggttttgagctaattctgaaaaatggggtactttttttgggggggtttgtttttgtcatatgaagatttgttgcaatgctgattctaaccttcaaggatgattgtactatatgatgaacacatttagatgtttttacctaagttgatatgtactgaatactgatgtgatcaaagttgttcttacaggttgggaaatttatgagttcttaatcttatatttttgtatatctttttttatgaatgtcagctacagaacttgtaaccagatccattcaagtgatgatggaatcaggttgtgaagaggtatgtcagccctgactttacatgacatggttgatgatctttacagttttacttcacttttgctcttaccatcttttttctgcttacattcttcttaaacaaaccgaaattgattcggtgctgttgtgattttctcaattttatttctattgtaccctctctaaattatctctattgtacctattcgattggattcaccttaagtttgttgtaaattttaatggttccccttacagtgttatcttgggatggggcccttttaatatttgtgcttagactttaaatatacaaaattttgtgatctagttattgatgaaggccattatattgcataattttgtctagtgatactttgtgatgtggaaccatatatgttaagagagaagggaatagatgaaaattatagagagaaacaatctgaataattcatagtcatagataatctgccaaataattaacctcacaaggcttgattatatgttggtaagtaacaagtcctaaattgtttaggaaactaattatttgaggaatttacaagacactaaacctctagatcctaaaaattgagtcgaacctaataatactcatcataattaaatccttattatctctatctttaagttatgtatcatgactgtttatatcagtgattatttggatttgggagtaagttgattcctggatatcaagttcttagtgatgaaatccaatcaaaacaattgtactgatagttttgttctgctttaatgctttgttaaatagatacttccttgcctgaggatatctatgccattctaattcccttttccttctatacccaatatactttatatatgtgtggtaaatttataatcaccactcggtttgaatcatccattttatttttattcttggggttcatgtttgttatgttttctttccggaaaaaggtgacattagaagcagaagtcacgaataaaggagcactggcattatacggtggccttggtttcgttagggcaaagcggctcttccgctattacttgaacggagttgatgctttccgtctgaagttgttgttccctagtcctctattacatccctccctttcaatgatggcagaaagagatgacagccattggcacaataatgatcacattccgatcgaagaatgttctgaagttcattgaaacaagtcactgtcacaactcggtactggtactggtgctgcatacaagagaccaactgatgaggtaaattataatatgttgttgtaattaacaacgtttcttgttgagctgaacagttttttgaaaagctttaacataagtgctaccatttttttgtatctctgaactgaagagcttttagtataacaactttcagaaatcactttcttcccatgaataaccctttgtcagttatcagcatctgagcatcataaaaggggcatgagacttgttttgatgaattggatacattttataacatttctctttttctcgtctcaccatctaagccatgagacacaaaccagagtggaaaagataatgaaaaaaagagtgttgtaagccatcgattgatcgaatttactaactcttggtggactctttagatgttcagattcttagactttagtatagatcaaactagtagcaatgaacatgctctattgttaaatttatgtgaagttattgacattattgatggaccaagtggctgtatattgggtatatgacacccaaacggcaaaaattgaagaactttaaaatatttagaaaaatcaaactaaaaacacactatattaactacattagatgttctaaattatttcattttgaagctagtttccttgagccaaagaacctctagagctcttctatttctatgcttttaaagatgaaaatgttgatgaaagctacaaagaaatttcagaaaagctttctcttcaagtgagataaatgttgtttagaggcaatagttaatgtgaaatagttatatatgtaaaattatagctaagagtaaaataaaaggtcaaaaaatacagtcaatacatgagctaaaatagtttaaaagtttaccttatgaatagtgtttagttaaatgtagctaaaaaaattattggttttagtgtttagctataatttttttattatttttataatatattttgtttatttaccactgtaaaattaaataaatattatgtaatacataatattttattattttgtgtattataaatatatttaaatggtataaagaaaaatataaaggaattaatatatgatgtaatgtaaattttataacagcttttttaaaatagagaagctttaaaaaatttaaagaaccatactaaaaatatgctataatagatggtctaaattctttcattttaaagtttttttaaaataaattattgattaagctagctataaaataaaaataattaattaaaagatgagaaaaaaaacataaaatatgttagcttaccaatattcattaagctagttatatgtagagaattttttaaaaaagtttgagaagcatctgaccagggccaggaaaatttataatagatttggaaaaataggcatttgtatcacacaaaactattttttttttctataagggttcatatatataaatgttttgggtcttgagttcggatgggttctaagcacgggcctagtctaccttagcccaaggctggacctgcagataagtcataaatctctaaaagtttatgtttgatgcagataagtcttcaacttttaaaattggcggtaatagtctcccaaggtctcgtttctcgtaattttgttagtcatctttctaattggagtaatttgcggcaaaacccccttaactatcaatttacttgcaaaaaaccatccaacctcatattttggtgggaaaaccctccaaagtactattctgtttacatttt

SEQ ID NO: 15221 - DNA, 5338 bp, Cannabis sativa
aaaccgacacttacggaatcaagaaagatgtcaaccaattgcgcagcattcatggccacaattccagagtgtttagatgattcaaaacgagcagaggagggatttgggagatgatgattgatattgtctctctgcggaaagatcttataatagttgtcacggtgaagagtacgacggtcaccatcgccatgatcagtggtgggcacagaagaggatgatgccgtggtccacaaaggctcatcaatcctgagaagcttaattagttcatccatggcaagtgctgccgtctcaaccataactcccctttccatctctgtgatacctttgatttggttcatttttgcttgttccatgtttggggtgcttgatgatgggcctgaccttacagcagatggaagtaggtcaaacgaggacccatccgtacttccagggattgtacttaccagcttctctatttctggtaatggtttccccatgtacttggccagaaggttggacaccttttcatgctatcccaaatcaaaataatatataaaaatttagttcaaaaataaatatttcaagcaaaataactaataataaatttgttccaaaaactatgacttaattctttgatttgttaactgaccacactttttatatatgaagagacatatataaaaggaatatatatatatatatatatacctcctctcttaagtggacattttcaacttgaagtctttccaaactgtgttgacgatcttcatcactaaagggcggacctccacaagaagggcagatcacattgctcagtgcctctcgaattgcaatattttcacattggatactttcgttctcagctctaagaacattattatccgccctctcatgctgagcctgatcaaaagtaaataaataatactttttatgtttttgatgtttaattcacgtttggtgcttgaaattttttctcaatttgttgtgatgtacatacactaattttgtaaacaattttgttttttcaattaaaaaataatcaaaataaataaataaaaaaaaatgagggactgaatacaaattcaataggttaattttatattttgcattataaccatatgtttttatatagtttaatttgattcgtttctttctgtgaaaattaagaataaaaattgggcgggtaatgaataagaaatgtattttattggatgatccattggatacccatgaagcttcaaatattataataataaaaagaataacatgtaatgtaatgtaattcaaataaaactaaaaaataatttgaagttgaaataaacattctatttaaacatgcatattgtttatacttcatactttataaattgtaaaagacaaataagtcataaacaaaactaaccacatatattgatgtcaaaagtagtaataaattaaataaaatatcaaattatgagaataataaaaaagattaaggatgaacttttgtagtaactttaatttgattataccaataaatatttaaaaaattatatagaaattatatattgaagtttcatataggatattgggtacgtatcactttgccctaacctgcttgtcccctacttccgcccataacccaacatgcgggtaattcccacccccaataccatacatacccgtcctcaattttcatttatagtaaaaatgttaaaaatagactattggatcaaatcggtcaaaatatatttaatataatttcttacaaaccggtttaaataaatataatattaaaaattaaaagtttcaagtagaaattataaattgtgtaacgaaaacaaaatctacaattttttttttttcaaaacacgaccaaaggatgtagaaatgagtataaaccctataacatatgataatctatacccaacgaattctaataattaatgttgcagttattattaggtcttttgatatataaatgtttattacaatactaattatatctaaccacaagttgtcaataaatttatgtgggaaatttttttaatgcaatattaataaattggcgaaatttatcacacacctttatttgggtccttttgttctgaaaccagaacttaacttgttttgggtctagaccaagctccagccctagttgacgccgttggttttcatctgggtgtgggcattccgtgaaaaatcttcaccattcaaattaacaaaaagcgttatattcaaaaataaatttatattatacacacatatatattacattgatccatatatataaatattatttatcgtgaataataactatttccttaaatgaaatcaatttaccaaacagtcatgatttaacatttcagtaaagaaacaaaaggaacaaaatatcttcatctctatgtgcgtggggactggggaattaattatacttcaaaaatatgttacaataccttttaaatgtatacaaagaaaaactaaaaaaatttgatgtttacctttctagttgggttatttgatagttagtatggcgatgataagtcttcttttggccactgcgagaattagagtcttccccatgttcgttaccggtgcctacaatatgtcccaattccttcccaaactccatgctaactcttttttgcttaaacaactatgatgtgaaatggagtatatatgtcccttggacaaatgcatggtatttataaggctctagctaaaacaaaataataataataataattataataaatataaaatcagtgattttttcttcttttgaggaccctttagatatatgttgtcatattctcatgaatatattgctaacacctgtcatttccatagaaggtcatccagtattcacattagacaacccaataaagaaatatatctgattcatgtgggcattggtctggattttgtttggtttttttcgaaatcttttaccttcttagaccaaatcaatacattcaactaaccatatataacatcacatgaagatatatccagagggcaaaatatttttcaagaatagtagggactcttggagatataatttgaaaagatacaatgttggagaaaaaaaaattaatttagataacatagaatgaaattgttttccattaatgtcctaattagtaataacatatctcattattccaaattaagattatttttagtaggaagtggttgaaaaaaaattaccttatattatctatatcatttgacgtggcaataacataggggcagtaagtaattttggcaaacatacatttattattattactattattattatgtgcttgcacatattacaatagtattataattttatgagcaaagaaaattcacagagaatgcaaagcacatacataactaaatgtgtaaatgtttttttgttttatgcttcattaatttagtaatattctaataatatattacttggtaagcaattataattttgctaggaatagttttatgttatatctacaaaaagaatttgtaaaccatataaattttatatgcattcactcaaaaaatttattttgaattgctgtccatgataaaagacaatctttattgatattgttattaaataaacttctatatattaaaaaaggataatgttgattcggatgaaaataacaaaaaaaatttggagtgcaaagtatattaaatattacttttataaaattgataatctcatatagtttgtaaccacagtataaaaataaatatgtgtctcgtcaatataaattttagatattacattcattcaaacaaaatcttgaattgaattcaagggcagaatcagaattaaatagtaggggtcaatagcgcctaaaattacaataaattttgacgactaaacctttttgtttaaaagtgcatgttgattaatgataataacaaagttcttaatttttacaaatattttatacaatacgttaaaaaaatatgaataaagtaataaaactgaaaatagaatatgagcgttgcttagttaggaactcaatttaatattacaaatactttcttaaagtaaaaaaaaataagaagatgtgtgtctactaatattattaatttaagaatgttctaatttattaactccgctaatattaattaaacaatacactaattattatttattaatcaaaacacgttaaaactaaagtatttaatacaataagttataggaataactgtgatataaatactcaatattaaacaaaaattacacatttataatattaaaaataatataaaatacaatttcacttatgacaaatgtatagcataagttgttattaatttatgttcgacccatctaaaattataagaataatctcttaatagaatttttttttaaaggaaacacatcttaattaccatgaggatgatactaattaatttagatgagctttgagaaaattaggataattttacaattaccgttgaactcattaatttttgtggattgacctgtctacatactttctttgtgaaggattaagccaattgtacttcagaatatgatatatattgcaggttttgaatagaagaattttgttatcacaattttcaacaagtcattgtaatttaagaattcggaaaaattcttagttgaatgatcttttaagatattttgagatttgtattttataccattttgttgtaacacttagcattagcaactaataagttgcctacctatcattttaaaagaatcaagttgaaccaaattttaaatcgtctttgtaatgttttaataattaagaggtgaatgatctcttttataagataccaatgtgtgcacttttgaatttttaggtaaaataataatttttgagattttataaggtaaatgatctctttaaaatttttgaatgatattctatcatttatattgattttagagatctcattgcaagtttatactattttatggttttaaaattttattactttttggtaacaaattaagtttaaaaattactttatttattattattagggtaaatgattttggaccccgtgttttacaaaaattatcaaatggaccctctgttttgttaaatgacaaaatagaccctatattttcaaaaatagtaaaaataggactctgagcttaattttcaataattttatattttaatataaccaactttaagacaatttgtaacgcgaacagatacaaaaaatgtaactagttttgtcataacatctctagattagattattacaaagttttattttgacaaaatatcgattcatggtcttatttgtacaaatttagaaaatacaggatccattttatcatttagcaaaacagaaggtccaattagtaacttttacaaaacacaaggtctaaaat

SEQ ID NO: 15222 - DNA, 8507 bp, Cannabis sativa
  modified_base (5528)..(5538): a, c, t, g, unknown or other
  modified_base (5576)..(5582): a, c, t, g, unknown or other
  modified_base (8077)..(8084): a, c, t, g, unknown or other
ctcaaaacctgtagcttgataaaccctatttgcttaaaaaaaacaaattgctacccaaaacataactttctcccatagctctgttgctgcttcctcattatcttcaataattccattccagtcacaccctaaagaacagcaaggatgcctgctgtccataatgtagaaatcctccttcccccaaatattttacactcttaggaatgcaccactgaatgtcaaattcagtgagcaatttaacccacaattctgtaacaaaatcacactccattcaaaaatatgaaagatattctctccatttctcttaaagcatacacatcatccgggagagaacaattggcatggctacctctgtgaagcgtctcatgaattccaaagctcgtaaccaagcgaacactttgacttttgatggtgcacagctcttccaaactgtgtttggcccacctgtcctatctgaaacccacactctcccatcctccaacacagaatgaatcgagccatttacaaaaatagatttccctccactgtcaactatcatgtctttagtctttgatacacattcttagctgaagaaactgacttttttttttctttcaaaaggagaccagttacatgtccatgaatgagctactcccaaatatattaagcggcctcacacatggcagaggaaaagcgggattacaaacaccaacaatttattgtacaaatacaaataccaactttcaagtattgtgattctttctaaggtctaacaagttgttatctcttcgccaataaactctttttatctctcatttgacaccgacaaatcaagaataaatataactcaaaagattatgccaaataaatcaggatctgaaaaaaattcaaacttaaacaaaaaataaaataatgtcgagcctaatttctaactaactaatttttaaatttctacacaattcatcattgaatatctaggcacaccaaaatcaaactataaatggaatccttgaaagttgaaagccaaccagataagtttgagcagataaatacctcaaattcactacatttgcaagatagagatgagtgtcatgctgaagcagtgcaaagacatcatctgccatcccgacatatgtacagtgtcttacaatgtccagcaaacctagaaagaattttttgacagaaatatgccaataagaagcatccagtaaatccacatgacaaataaataatagacattaatatcatcaatgagctcctgaatgagaaacttactagaatgagaattgccatcaatgtcatcaatgagctcctggatgctagtgagatctgcagtttcctttgggttccttctttgtcttatagatgacctataattggttgggagtttatgaagggtaaagtgtgaagaggtattttatttttgattacttactattttaggaaaaagaaaaaaggaaataaaatctcccaaatcagccactaaaatagcaactacatcaagagcaaaatcagtaataaaacattaatcaattaatcgatgacttaaaggaatagcttatctaaagagagctgttatcttgtcattggaaaacaaataaggtttaatctctatttatttaataaacaacagataagaatgataatactagaagttttgtaatctctatttatttaataaagaacttatattcataagataagaatgataataccagagtagagtgagtgaaaaacacctacaaacattcagaatttttgggggtctaatttgaaagaaatagcagaattttttaagacaatgtaaactcagaagacaacctctgggaaaggattaacttttgggtggcaatttgggtaagaaatcaaaaggttttgaaggattatcattttcagatacaactagaaattgggagaactttatgtatcaattgtaaagatttattttcatgtatatgatgtagaagtttccaccctattttgtgattgtcttgttttgtaaattttttcttgtttttgcttttgtctaaattatatttgtacttgtgttggtgtttgttggtgttggtgttgtaaccactgttttgctctgccacatgtggaggattcccaataaatttgtgaggtaagttatggaaatgtgacctttgtctctttttccaaaaaaataagaaaaacacctacaaacatgttttgtaaatctttatgaatttgtagaatccgattcaattcaagtttagtcactctgcattggtttaatgaacttttaagtcctcctttaagatgttaagtttatcgttcttttgtaacctaaaagaactgttagtctcactttggacaaagcaaatacccatacataatatatatataaatataaattgactgccaggtacctaggtgacttaggaatccagcctaacagcaagcctaccttactgaagtcaaactagaaatcccgtcaagatggctatgggatttggtttgcatgtaggcatgcaaccttccagcaggatctgatgaatctgttctaaccattttatgcactggaacctttggaggttttgatcctattaatcataaaaaaaaggaaaaaaatattgaacaagaataaagaaaaaagaaaaacattgagtattttcaatcagttacaaatgaaagagtagagctagccaagggtatgcaactaaaactaatgaaggcaattgagttaccagatggtgaaggattaatatccgaatcctttagcgaacacacttgaccagatgaagatggctcaattgtctgttatgtgtagagcacgaaagatattccaggaaaggaaagttagagaaaaggcattatttgagaaatagagttgcaaaaatggttgtacagctcattcagaaatgaatattgaattagtatactcaacatgagcacattaataaaaaatgccaatctctatgtaagtcggagtttaaaatctttgatatcaaaaagtcacaaagccacccaatgttcaactttttcaagtagacgatccttgttttcctctctttcaaagatcctttgtttctttcaagccataaagcccaccaaatagctacaactcccatttcccacaagacttttttagcttttattgccggacacatcatggattagtaatccactgcagtaatttgaaaagcagccaacaatctcaagaaattagaccaaatgcccaaggaaagaaagaggaatggaggagcaaatgatttacattttctttacaattcatcaataacacgcacctccttggagaaagcatccaaaacggcctactcctttgaagattttcgtggacactcagaccattgaaacacacaagccacgagctaagcaaaaacacttttggaagccataggacatttccaaaccgtatttgtgtacttcacaaggctagaagagacctcttcccactagtatgttgaaggctgatttgcaaaataatatttcagaggaatctcctaaccatactctccaatcctccatggttttttgccacaatctctaccttatgggttcttaacattaatggcctaaattttgtgttgtttggcaaattgggccctaagaattgtgtttttgtaaataagtcctaattctaacattttcaagggcaaaattggcatttctctatatattatctatatccacaaaattttctaagaaaaacaatgtataatgaaattcaaatgtctacatgcaagaattacgcattttttcaaaaacatcaacagttattaacaaacttgactaatttgtcactattttgaaatctcaaaaacttgattgcaagaaagatataagcgactagattgtcaaatagtaaaaaaactaagtagcactcatgctaaaaacttcaaccttatttccattgaagcctgaaatctcccattcaacaaataaagaattgattgaagggtacgtatcaaaaaactatttgcttatattcacatacaacttaagagccaccatgacaatataaaaaacacaagtaaataataaaattgatccaatgcaaatccaagatttccccaccatttgacatgtgcaacaatccttttaaacttttctcaattttatataaaggacttttggtcaaatacacaaagattcatcacaagctaaaggtcaaaagtatctgaactatcaaaattcactttcatacggatcaaacaaagaagtagaattcggaaatatgcggtttggagcaaaatacaatccaactcacaccacaaagagttcataaccacatggtacagggcaggcaatttcaatggatttgagataatttttaacagctttgtcatgcacgcaaccactcattctatgaaacttgtgggaacaaaagccgaacaaacaaacaaacaaactctattgtctagtttcaattataaagaaaaaatatatatttttaagaaaaaaaaaaagacgaaattcaagaaaaatatatgagctatgattctttaatttgcaaataatctcttgaaaaattaaaaaaaaaaaacaaaaacaaaaacaaaagagaaaagagaaaagaaaagaaaatcataaaatcaaagctaagtaccccgttgcaagactacctgttcttgaaatgtccttgtgtcatttgagttcctcaattttgactcaactagagattgtatcttctcaatgatgacttcttgattcaaaaggcttacctgcataatatccacatatcaacggttagttaaaaatttacaagcaaagcattatggtatctatcaatgttttcacatcgtattagaagagtaaccgagcttgaaggggtgtgtggaattatttcctaaatataaagttgacgagcattgaaaatagtctttcctagattaggaaatcctttccttatatcattgtatcaattatttttacaagttaagacagcagattgtaaagtttgtccgctgattgtaaagttacgtcagcagattgtattatgctatacacaatattattttgcataatgagaaagtattccatttttccaaatctcacatggtaataattctggtactccaggtaattcatcaatttataatgaattgaaagagataaaataatacaaaaataaaagtatggacatgatcataaaactagtaaaacaaaaattattgacaacttcaggtaattcatcatagataataaggtttcaaaataaaaataatgacgtttcagtatagtgtacaactgacacttattctccaaaagcttagagataaaaattgtaagagtaaagaattaatgaataagatgaaatttagaagaaaaaaaaatctgaaagtctatacctctcttttagttgggtgaacattcacatccacatgctctggtggcagtacaatggacatgtatatgaagggttttgatgcttttggcaatgttgcagaataaacaatttcaagagctcttttcaaagcagtccattcaactaatctatctgtgctttaagacaaaattaaactatggtcaaaagaaaacatgcatataatatatatatatannnnnnnnnnnatatatatatatatatctatagagagagagagagagannnnnnnagagagagagagagaatacagaagtttgttgcgaccttaaagtaatgctcattgtaacaattttcacatattcaatttatttcttcaaggaaaactgataattgaaagaggttataactacaatttgagaagactaaatactacatatatataaatatatgataactacccttttggtaacttcatgacttgtagaatttaggtctagatgttggaataactattaaaccaacaacggaactagcagaccagcaaaaaattattgccttctctagaagatattcatttatgaagcatcataaaacaaacttagtttgacaggacaacataagagatgcatgcacatgaagcaactttttcactttacctaattactaatgaatgatatataccatttatgctttccaaaaaaaaatgatatataccatttatgaaaagaaccattgttatcttctttgcaacaaaattgaaattggagatgagtccatccatcttaaaaactgaactagataggtcattgtcagaagcttctattttcataagattttgggcaattgacaccccataaacagatctaatagcatcaacccttgaacgtgtgccaacagaatgaacatctgctctggcagcgccgtgctgatcatttacaaaaaagacgaaaagccattttaaaccgtgtatgttacataacataaatataaattatcagaatgttagtaacccacctttctacatgagaaactaacacttgtatgatgaattgcaaagcggcttaataagtctacaatcttcgagtaatcatcagcagaattttgtagtgtctttctccgagcactcatattatagaatagattttcaacctaacaccacaatgacccaataaaaacaataaacaaattacaatttcatgaaacaaacagtaaagttttaccttgtgcattaaatgggcctcattattttgtacataacaatgatgtaagattttggaggggataaatcaaaacaaaactcaaatagttttctatatgaatcagtgtactaactttctaacagactacaacagaatttatggttcttaccattatctgagttaaaaataccaaacagtaaacttttaccttgtgcattagatgggccttattattttgtacataacaataatgtaagattttggaggggacaaatcaaaacaaaactcaaatattcttctatacaaatcagtgtactaactttctaacagactaaaacagaatttatggttcttacttaccattatctgggttccttttacagcagcacatgctttgggttcatgctccatgactccatccttataagataccctgaaagtgaaaccataaataaaatagaacaaactaaaggaacgaaaatgcaaaattgaactttcaatttttgtcgaaggacatattgtcaaacaggtatcctacaccacctgtaaccatgcaattgcccctttgtaattgtggtaactgtaacgtgtccaacataggtcatactcgccaacgcttctcctcgaaaacccatagacttaatcgactgcaaatcctcgaaagtagacaacttcgaagtcgtatgcctctcgcaaagtatcggcaagtcctcgtactgttaaagttgcaaccatttgaaacaatcagagaatagtactatccattattccgtttggataacgagaaaattgatcaaaataattaaataaataaactgacgcggattccatggccgtcatcagtcacttgtatgagcttcaggccgccgtccttcacgacaacgtttacagaggacgagtgggcgtcgagactgttctcgactaactctttgacggcggagaccgggcgttggatgacctctccggcggcaatccgattaacgacggtttcgtctagacgacggatgttgggagggtctttaaagacacgctcttcttgtaggtcgacttccattgcatcggccattggaaggtttcgcgagaactgtgtagtccttatcgactgtttgttcgaattttatctcccgcgcgctccagcttcgacttcgaaggccaaaggttcaacttggtagcgccatttccgaatgccgccttgtcactaacaaaaagaaaaaaactacttagaatttttggaaatttaaaaaatttatctttgtaattatttttttggaattattacataagaaaattcattttatttataaaaaataccctcctagggtaaaaaaacatttatatattttatgtaattttaattagaaaataccacttacactatcatttcttacacaatcagacgatagttgcagggtggttgctacatggttgcgcggtagttgcataagatgaaaattttaatcagacgatggttgcagggtggttggctgaaggttgcatgagacgaaggtttcaataggacaaaaatttttgggtggttgctaggtggttggccgaaggttacatcagacgaaggtttcaatcagannnnnnnnctgttagcaaaatatttatgcaattgtaatgcaactattgtaaaacattaaaaatcagaacagtgtttccacgtacataattttatctacatgtctctttatgatttaatatgaacaaaaattcaccattagatctttgaaaaacaacaaaaatacaccaggataaacattttactatagtctcgatgtaatttttttttgaattatacttgagctggattgtttaggaactctagttcaacattttgagatctgcctttcatggatctaaaaattgattggaaaattcaaaatccgcacttgtgcggattgaatgttgattgatatgtaaaagtagtcgatccaatgcaatctacacatatttataaaacatttttaaaaattatatatacaattaaaattttaatgtaaacaaaataataa

SEQ ID NO: 15223 - DNA, 13119 bp, Cannabis sativa
atgagatctgatacttaattatacgtgcaatttgatacttaattatacgtgcaattaaatatcgagtctcatgtgcaattaaatatcgagtctcatataatttaatataataatttttagagattgttaataactaataagaagaggattagttttaggcatcactaatactcaattgtaatactaaattataccaatagctctattacattttatgagtattgttattaagtactagtggtgtctagtactttctagatgtgtcactttacgattgactaacaatactctctaaaagctattatattaaactaagactcgatatttaattacacaaataacaataataacacataaaatgatctataagcctttttaacatttcttacattttatagtagttgatagattaagcatttgtgtttaaatatattctcaagttccaatgttgcaatacccaaacagtctttatttactttatgtgaaattaccaaaaaacacatcacacaataaactttcggtgggctaccccataatctaaattcgcatcccgatatcaaatatcattaatacatttaaaaccagaaaattctcaacaacaataaaagaaaccaaagaaaatagaaatcaacaaattttgaaaactttcatacctaaatattttttcgatatataatttcactcattaattattattatcataaaattaataaataaataataataataaaaaaacaacccatagaatcggacttcccactttataatttcaacttggtttggtaccatctcatctcaagataaaacgacacacatatataaaggcacatattacacataaccaaaacccatctcttttatctttacatacccaaaatctaaactcgacccagtcaactcattcatctccctctctctcaatagggtccttttccttatggttatattatatatataggtcgaaaaactccatacccaaaattaaaaccagaccattttctccattattataccccttaacccaccacaacttttcataataataataatataatatgataatatagagataataacctctctccttttcattttagactgagtaccttccctggtccctgaactcgtatatatatatatatataaacagatatatacacctatatatatctctttatatatataacacttaccctgtgacaagatttggggcattttggtttttgtgtataccctaaattaaacaaaaaaaatccccaaaacaccctcatccaaagagtaaagaaaaaaaagaaagtctcatcatattatctaccaacccataaaaaaattcaccccgaaacttctcaccctagtgagaaaaaaaaaaaaaaaaaggtgatcttctccccataactccttcctccttttaaaggtactacattttcacaatctcttctgtaatttggctttagacattcttatataaatctatgtatgtcacatttttctatttttttggttatttatttgtggtattctttttttaatttctttgtggtctttttttgggtgcggacctagcttactctatatgttattaactctttaaacaatttaaagaacaacaacaacaacaaaaacaaaaataaaaatagagaataatattaatatgcttttactcagaaatgaaatgacccttctttgatttcacattctaattggacattgttgttattaattggtgtgtagttacataaatttgaacattatatgtgtgtatctgtactcatatttgggcatgtttagtgttcacgatatgtaacctggtttttgtaagcatctgaaattggggattttggttagggttttcctcatgcttatctgggtaattagttgtatcattaagtaactgtcacaagtttcttttatggggtttttaaattagggtttgttcctttgatttagatcataatctggtttcacgggtagaattgattatggtatgaagtgtacatgttctttttagaaaaaaattaattcttttttatcattttattttgattctaaactaaaacaagattacattttcttagtgtaaactaaaattacccagattttgatttttttttttcttgatttgtaacatttcagtttatatttactttattttttaatcatgtataatatataatatataaatattttaaaacaatttggaattggttatttgaaacaattaataagaatctattccaaatgtaattcaagccttaatgtttctataaaagcgttccgctaatttttttttttttggtaccatctattggcaaattcaactatgtggcaagtacagaaatgatagaaaagaaagaaattgaggaaaaagaaaatattaaaaacaagagagtctacctagtgagtaatgtggccccatgatgcataagttcaagctctttatattataagttattttgtacgaatcttttacacattgtaacatttcttgtgacattagaagtgatcttattttaacctttcatgtaacaaattcaagatatgggcagatcaatttagcaactcatgggcaataaataaacaaaagcaaactttcctaatgattgtgtgtgattttccatattagattttggactctgaaatgataaatgactggttgagctggttattgaaaattcaatatttttgtatggtttgcaatattctaatatgattggattgattgtattgtttttgatgaagttgacaactattaattgatatagataatctttacagttttactgatcacttaaaagttggttactttgacatttaagtattaaatttctataagttagagttggtgtaaattagtcttgtacatttggggagatgaactagtagcttttaatcaagcaacattatttgcttagagatatcgatttttttgtttctttcacaaaaaatcattacaatgtttattagtcattattttatgcattgtcgatttggaggaagtattttgagtacatattctattctcaggccttttttccttgttctgatcattatatgaaattgaattttgtctgaaatgtaaggtggtgggagaaatttcagccatatcataaagcaccatatggcattagaaatataagaataaaatggaagtgatttcatgttccaaagttcagtatcgtggagaatctgattgccctcaacagattttgggtaaagatattagttatgataaagattctaatcttgatgaacatggacaaaaggtacagttgattaaaaatggagtggatgacgtattgcaacgtgtggagaggcctcaaacagaaatgcaggctgtagttcctgcaacggttgatgaaacacgagcttcagaaggcaactgcaatggagtttctcatggttacgatgatggtgatgacaaagacaatggtgataaaaggaatgcaaatgatcagaattactgtgaagacagttgcctagtgtctgataactgtcatcttgttgtggatactatcgaaaatgaattgccaaacaatattagagaaggggattcatcttttatagagcccatgttgctaaaagaggatgaatctgtggccctgtgggtgaaggtattgttttttttttctttccaacattttatttaaatatttagatttttaattttgattctttccctcaataaacaaataaaacatttacatagatattcaaattatattgatttttcaagttttaatctgtaccaaggaactagtttcaacccttccccctccccgcttttctgtatgcttgttatatattgatgttgttgttcttctagagcaataaaattgataaatatctaaagaaattacgattatagaatctatgatgtttgaagaatctttgcactaagttcactaattttaattttcttttttacttcactgtttatccaagtacagtggagagggaagtggcaggcgggaatcagatgtgcgagggctgattggccattgtcgacattgagagcaaaacctactcatgataggaagcagtattttgtcatattttttccacacactaggaattattcttgggcagacatgctacttgttcgctcaatctctgaatatcctcagcctattgcgtataaatcacataaaattggactgaaaatggtaaaagacttgacagttgcacggcgttttatcatgcaaaaactagctgttgctatgcttaatattgttgaccaatttcataccgaggtatgccatcatggtttccttttgtgaatagtgccctcttttttatttttttgataatttctaattactagaattttggctgaatgttcacgctcaggccttgatagaggctgcccgagacgtggttgtctggaaggaatttgctaaggaggcttctcactgtagtggttattctgatcttggaaggatgcttctgaagctgcagaatgtaaacttgccgacttggtgatagttctagaactagggagacaaaaattgaaacttaacagctgattttttttttctcacaattatccatttggttatatttggatggtggacagcagattatatacatttacatatacatgttcaatattattaccttatgtttggtaaagaaagtagggttatatatattactattctgatgaatgttttcctgatatgtctcttagagctattcattttgctcttttccctatttgaagatctgattttctatatgtctagcacctcttcttgtcattttcttcgaaactcatggttcgtgtttcatggggaactttgaatgcaaactgagtataggatttgtattttttggcttttaaaactaaaagtaacttttccttgtgtacttatatagttatatttgttttcttccttgatgagtcagtttttgcttcttttctttatttttttcctccttcctttttcttttcgggttagcagctaaatgaatgtatttttttccctcctttgcagatgatattaaagagctacataaattctcattggctgcagaattcgttcaaaatatgggagcagagatgtcataacgcacttagtgctgaatctgttgaaatgctgaaggaggtatatataataatttagttgcacatcgatggagctctattgttttttgtttttatgggtggtagtgggaaaactttaaatttatatgccatgtccttaaacatcacataacccattagttataataatattgtcagcattttgttacagtaagatgtactacaaattgatgatgaaaggattgatgcactttcatctactattagcaattactgttattttttcatttggtatggtatgaagaattcttagtgaattcaacagacctgtatttttttgaaacatcttaatgtactctataatgtttggctcaagcttttggttatttaatctttttccctcttcactggttcaggagttgtttgattcaattcagtggaatgatgtccattctctaagggatgcgttggtccagcccacgttgggttctgagtggaaaacatggaagcaagaagtcatgaagtggttttcaacatctcatcccttaacaagtggtgtagatcagcaacaagaaagtagtgatggtcctttgaccccaagtctccaagttagcaggaaaaggccgaaacttgaagttcgtcgtgctgagacacatgctttccaggtagaaagtagggagtctaatcaatctggaaacctagaaattgattcttactattttgacaacagagacattataaatggtgctacattagcatcagagccttgtaaaaaggaaaatttgactgaggtagctgtatcaacagactcacctggtaccacttctaataaatggaatgaagttatcactgaaaaggaaaatggtgtggacagacaaaccaaagatattgagatgacacctgttcatctagcaactcctacaaagagtcggcagtgcatagcttatattgaatctaagggaaggcaatgtgtgaggtgggctaatgatagtgatgtttactgctgtgtgcatctgtcttctcgattcactggaaactccggggggacagaaatggctctctctagtgatacacctatgtgtgaaggaacaactgttcttggcactaaatgtaagcatcggtctttacctgggtcaccattttgtaagaaacacgggccaaagagtgatatgaaagcttcaaatttttcggagaattcacttaagagaaagtatgaagagaacgtccctggtcaaaaagccactcactgtcaagatgtagtgttggtaggaggtgttgaaagtccacaaaaagtagattctgtctcagtcatggatagtgagggttttcatggaagaaataacgtaattgagaatgctgagcatcttgttaaagaatatgataatccgaaagtgttgcattgtataggctcctgcttgcccaacaacattataccctgtgtggaaagtccaaagcgtcacttatcatactgcgagaagcaccttccaagctggcttaaacgagcaaggaatggtaaaagtaggattatatcgaaagatgttttcatagatcttttgaaggattgccatgcacaagagcaaaaacttcacttacatcaggcttgcgagattttctacaggcttttcaaaagtatattatccttaagaaatccagtacccaaggaagttcagtttcagtgggctttatctgaagcttctaaagaaaatagagttggtgagctctttatgaaattggttagcactgaaaaagagagactgagaagaatttggggcttcactgctgataatgatgcagaaataccctcctctgtccaggaagaaccagctcaattgccactggtgattgatggtaaccacgatgatgaagaaactattaaatgcaaattttgcttagaggagtttttggatgaccaagcacttggaaaccacataatggatagccataaaaaggaagcacaatggctattcagaggttatgcttgtgctatctgttttgattcttttacgaataagaaagttgtagaaactcatgtgcaggagaggcaccatgtacaatttgttgaacaatgcatgcttctgcagtgtattccttgtggtagccactttgggaacactgaggagctatggtcacatgtgatctcagctcaccctgtagatttcaggctttcaaaagcagctcaacagaccccgcctgctgttgttgagtctccatcaaagcttgagctgtgtgcttcagcctctgtagagactaattctgagaaattaagtgatcccagaaggtttatttgcaggttttgtggcttgaagtttgatttacttcctgatctcggccgccaccatcaagctgctcatatgggaccaagtttagtcagtgcccgacctgcaaagagaggtgtacgatattatgcttatagaatgaagtctgggagactcagccgtcctggatttaagaaaagtttggcagcagcatcatataggatacgaaacagagcaactaataatattaaaaaacgtatccaagcaactaagtcacttaatactggtgggaggagtgtcctgcctcaaggagccgaaactgcaattcttggtaggttggctgaatcgcaatgttcggatgtggcaaaaattttgttttcagagatgcagaaaacaaaaccttgccccagcaactttgacattttatccattgctcgctccacttgctgcaagatcggtcttaaagcttctttaggggtaaaatttaaagtattgccagaacatttgtatctaaaggcagcaaaactttgtagtgaacataacatttatttgaactggcaccaagatggattcatatgtcccaaaggatgcaaagcatctgatgattcattacttctgtctcctgtgagatcccttgcaaatagaattgtaaaccgcaaattgaaatgttcttcagaacctgtggatgacaaatggcaggtggatgagtgccattatgtcataaattcaattgacttgaagcagctatccttgcaaaagggtcgtgtactttgtcatgatataagttttgggcaggaaccgattccggtgacctgcatagctgatgacagtgtatccgattctgataccatccttgagggtagctctgattgtcagcattatagacatatgccttgggagaactttaaatatattacaaagcccttgcttgatcaatccctttctcttgatgcccaggtatttcttcttgcaaagtgtatttttcttggcactcacatataatggttattatgatcactgtgtaatgtcaactggaaatttatgcattaaatctctccctgttgtttcttcaccctatcacccacgaatgcaaacacattctgatactgataacatttgacacataaaatccatttcttatttattgataatttgttgatactatctctagattatattttcttttaatattttgactttttaatgtattttgtttttcttattatctttagagttttcaattaggctgcacctgcccgcatggaacctgcagtcctaaaacttgtgatcatgtttaccttttcgataatgactatgacgatgcaaaagacatttatgggaaatcaatgcgtggtaggttcccatacaatgatagaggtcgaattatcttggaagtaagtactctgatcaccattccacatttaaatttccatcattaatacatttagcttttcccttactatgacttttttttttcttttaatttttcccatttgttcttgggtagatgccctcgtagaaagaagaaaacaagagctgttagtcataatcaagttattattgcatcgtatagttcaaaatcttttgttggatgattgagatccctaaaatcagaaacaaatctcgcactttaatcttctagtaaaaatgcgaacaaccgcccataggttcttacctccgtgtttcctggtaaagactaacactttctctcatttttgttaattttcaggaagggtaccttgtttatgagtgcaatcaaatgtgtagttgccctagaacctgtccgaatagggttttgcagaatggagttagagtgaaacttgaagtttataaaacagagaaaaaggtaaagcaatcagatttgttaatagtttgtttgctggagaaaatctgatttctctacactgatcacagggatgggcagtcagggctggtgaagcaatcttgcgtggcacttttatctgtgaatacattggggaggtgttagacgagcatgaagcaaacatgaggcggaagaggtctcattttcttttctaactgatgcagctttttttccccctttacttaacatgtttgatcaaatttcgccaactttgttggtagttagttacatttacttctcatgttctagctattctcagttatttttcttttcctttttgtctatctaaatttactagacctttggttctgctggcatcaatgtatagaataatcatatttatttgccagagttttcaatatttttctaatcattgtttttcaaaatttgtaatgtaatttaattctttgcccaaaaccgaagtataatatcaacttcttttggagtaagctcaaaatctagaatgaaatctttttttgttgtgataatatttctggcactctttttagtttcattttacactgggtaatctaaaaaatgctggtcttattttatttgagcgattacattttcccatgttctatggttatgggttcattgtggtaaagtcaactgtgcaggcaacctagattttgtttaaattccaagcaagattggtgtggtttaatttaaactacttcttatgctaaaggctaatttttttactggtctttgtttattaggtatggcaaagaaggctgcagctatatatatgaaatcgattctcatgtcaatgatatgagtaggctgatagaatgccaggctcggtatgccatcgatgccacacaatatggaaatgttgcacgattcattaatcacaggtgagaaaggagtaatgaaaggttgccacttgcattgtactagatgttgtaagaaattataatcccttgcgggatcgtactttttttttatcagtatttattcttgccatttttatttttatttggtttagtacatttacagttatcctatactctttgatgagataacggcttttgatagaggtaaaggtggacaattttttgtacacccaagtgtgataaaagctatgaaaatgtttcttctgtattaggcttgttagtcgtagtgcctcgtactcatatcatgaaatctgccatatgttgtagttgcttgccaaatcttgtgagtcaccaagtccttgtggaaagcatggactgtcagcgcgcacacataggtctctatgccaaccaagatgtaagaattgtgcaagattttttcgcaatcttttcccttgaaaatatgacacttgggctattgttactgaaatttgtatctctagactgtgttttagatagtaaatttaccgttttatatatgtttttgtttttataatcttatgagcagatatcattgggtgaagaactaacatatgattatcggtatgccctgctgcctggagaaggatatttatgccaatgtgaaactcccgtttgccgtggccgtctgcattaagccttttatctagatgatcctcattctctctctcactctctatgatgtacaaaaaatttgagttttcaagctggaagatctcacaggttgaagagcaaagttttctggttatattgccatcgaacacagctgagtacaattcaagcactttgctcgatattttcttcaagccatgtttagattgtggcacttggatttttcattatggtcttcccccaagtaaggctacaaccttttcctctggtagattctttcaataattttttctcacatcctcatcttaattcaatgaaaaaagaggacagacctcaagccctccttttataaagacttcacattgaatttgttagtattgaagtcaccctggactaatgaattgtagcttttctccttagtccaatttccctgttagttattatttatttggtaagaaatgctaatttgaccaaggttttgatgtcttcctatttatgcactttgcaatatttttctactttttattaatagcacaagggagttgtgaattgtggggatatcatggaagtaataatgtattccccatggtaagaaagttttgtatttttagtataatttgtacattgtagttaataaaaagttactctatttatttagttacatattgtgaacttgcaagtgaataatgctatcatatagttctttcataaattgtattcttttcctatttttatatgaatgcccttctgaaaatcttatcttgtttagttggtcattattactcattatttggaaaaaaaaaatggtgttttgtgacataagtcatgtatgggaataggatatcgtttcacacttaaaacattcttttttttcttgggttttagcaaatatcagattcaaaatgtacatagaagaattagcccatttggccattatgccaattctttagttgtattaattagttgggagaagcatgggagtaaaggaacactctctgttgcactgaacatagcagataaggaaaataacttaggcagagaataagacacatcacatgggcttgtgggtctttctttttttaactaaattttcaaataaaaacttcaaggcatgccaaccttgatttggcttgttttgcctcacacactcttttctgtactctcttacaaacatgtctgtgtttgtttcttccttagtttcagactgagtctcaatgtatccaaacactttgagctagttgatagattttgtcttcaaattgaatgagaatataataagtgaaaaggactaagaatactaggacattatacaatttaagtatatgcatatgcatgcataagaacatatagttcttttttcattttttcttttaggaataaagttgtattattaaaggagaataataattcaagaaaatgttaattatgtgtgatgggattgtactcttatacttccagcattttgatagatttcttgttgaaactgaatcagtttagactttacacttgtttcacttttaaataaaataataattgtgaatgattgatgtaggaactggttagtggttatggtattttgcaggctggaaactatttaaaagttctcaatagtgagcttttaatatgatttccttcaaagtctactattgggaccctaatgattatatatgttagatatgattattgaggttgtaatttaatgtgcttacatttgttgactcaaatttaagagtaagcattattttactcaattgtcttgaaaattatccagggattagttgtgattgctaagataattggttgataaagcctttttctttttactatttatgataattaaattgcaacaaccccaactttagagttgttacactttatttattaaattattaatcatattcttatcaaaggagtaataataatatcatatgtgggattgaattattacaattatttgttcaactacaagacaacctatcttagtagtaatttctttttgaaaatcaaacaagaaggttttgatatattttggggaaatttgtgactaaagctgtttcaatttgtatgcactttcttgcaaatctaaggtgttggttaaatttcacccaactattcaaataattaaaattatttggacaaataaagatatgccacgtgtacatacggtggcatttatagtagcatttaagggagaaatttaaagaataccaaaaaaataaaatttatgccttttaccctatttttggagattgaaatgtagaggcttagagatgagaccttagcacttgagaagagattcgattagtgggccaagtttacaataaggccacataacagcacacttggtttcttttttggaataattacatcaagtacaatgttttataaaatatttacatttttacgttcaaaaaatgtttttttacatttttacggctttctaaaaaataa

SEQ ID NO: 15224 - DNA, 2281 bp, Cannabis sativa
catttgaagacctaattagtacttttcataaattttatgactttgttatggattatgtgttgtttgttatgaattttatgaaggttttcttctaactttttaggtgtaaacctattttatgatgtttttattcttattgttgagtcatacacctcgatttacgcttcgcaggactaaaggaaaacacctcagtacatgattccattttttaaaaccttgttattgaatgagtactttttgattattcaatacaatattaaatgtaaaagtatttggaggtgtatgatattttaaaaaaaaaaaaaaagattaaatatttttttagaattgctactgtttttcaaaagttaaggacttcattgccaacttctcagggactgaattgccaaaatagagtttagggggcattcaagctaaaatcccacttagaaacccttggtcttatctctcattgtcaacatgcctcttggatcatccaaataacaaattacgaaatagaaatagaataatcctatgtgactcttccgcggtcttaagctaatttatcaaatgttgtatattgagttactaacataatgcagatcatcaaacagttacggtgtataaattggattgtcatgaaaatcatgttatcatcatacccatgaaaaagacaatgacatgacaacatatatagatagatagataaaagcacaactatatttttaacagacagcatattatgctgtaatcaaatgagaaaacagtgagacaaacaaacctttacagatgaaccttttaaatcagatgcttgcttgacaatagatgttttagagattccttcaataaaactaggacctctggtgtttgttgaggccttgactgaacttgcgcaagcatcagtcatggcaacatctggatctgaggcattgctgggtccattatctttcatattattcctctctgaaatatgttccaaggtagaagctatattctgcaaaatccagtcatggacttgagcagcaggaacaggaacagcaggcatatctggatctgaatttgcaaagaatggagcagattggctcaagttgctttcctcagatcccttatcaccaaattgaatcaaaaatccaagatgctcaaacctatccatggtcagaacctacagcagcagcattatatcagaaaactaaaaattacaagggaattattattatcatctttttttctttttgaaaaagagaaattattattatcatcatccattactcatataacagaaaacaataaatcttctatttacttggtagaaaaataaaggaaacgtaaaaaagctcggaacatcattatacaaagagcaggtatagagtaactagaaattcacaaaccagggattcttctccttccccctccacaggttccgctaacagagagagaatatttgccaaatgcttctgcaaataagataactgatgtgcctcttcatcagcctgtgatggcacaaaccgacggctgttgctacgcacaagctgccatgtttgaaaaaccagacctattacacttcgaaatttacttcatggaaaataaaaatgaacgaagcacaagtaataaattgttcaactaaagtttagaatccccaagacatgatatttacataaatcaattcaacaaaccaagttcttagcaatacgaccctagagagatccataattccaagttacaatagcaatatacatagcacattgtcaaaccagccaattactatttaaaaaaattatttatttatttgttaatttattggaagagaaccatttcaaaatttagaaacagagcgtcaatttttcataaaaacacatatatcctatcttcgtaatttggaaaattcttcaaaattaccaaccgaccaagcaaaattcaaaactaataataatagcactgattcaaaaaaaaaacaaatttcaaactaatgcaaacccatcaacgagtaaaacgaaaagcctaaacaaattgaaattacctgcaatggcgagagagccgataagtacccatcgaaagctgaggtggaaggccaaacatcagccacagcagctgagtccttgtgcgtcctgggaagcaatctcttgtaggattgtatgtagaggaacaaaaccagatcatggatatcagccccgacggcgtcaatctcgtccggattggcctttacgagcgggtcggagtcggagtggagaatcgacccgagtgtgtcaaggacgagccgggcgtggtcaatggagatctgaaaagcctcggatatggcggacga

SEQ ID NO: 15225 - DNA, 4574 bp, Cannabis sativa
gaaaattttgttgcactttatccacgtcactgcccagaatgctgaatgtgttgtagtaattacttcagcatttcatcctagtttcagctttaatgcctcatttggtcttgtatcatttcctttcccttggcgctttaactcttttttcctaatagcaaacaaacaacatttaattaaataagtgtaactaaaagataacaatttcacaagactcaaaagctagcatactaaacagaaaattaagataaaaaataatcaaaattaatgaacaacacactttcattactctttttatggtaaatcaagtttaacgccaataaaaataactctatactatatagttatcaactttctcaaaagttcgtcgtgaggaagcatattatcatgttatgcttactgatgttgaattttagaattcccaaacaccaaaaatctctactttgctctcaaactgatacaatcagccatcaaacaacaagtctaatccagatccacaaccaaatcaaaagggtgaaaggcatggtgtgaccactatcaatgtcatggacacactcgctctacttgttgggagatccatgagaaaccagcgaactggaatcctcgccactagaatgattgaaaggtgtaccaaactcagatcatgggtaactcagacactccatcatctaatcatccaccatcattcattaaggaacacattgaacaactattttgacttctaaaatagtcttctaaggaccctccttcttccacatctgaatataataaggcaacatcctctatgacacattctggtaattcatattcagatttatttctctaaaaaattcttcaacaccttggattattgatttaggtgcttcagaccatatgacaagtttacattatttatttgaatcctatcttccttgttctaataagtccagtgtaaaacttactaatggaacattatcttgtattgttggtactggtaccatttgactgtctaaaaatctcattctcaaatttgtcctctatatgccctctttatcatacaatttatctctgttagcaaattccttgctaataactactgtatttctaaatttatgtcaaattcgagagctatatcattagggaggatgattagtagtgctaagcttcatgatgagctttattttcttcaatctaggcttcaaataaaacaccatctaagtacatctggcttattttctatttctgataattttagtaaaaattatgtcatcgctctacatatttgaaaatctaagttttcttattaaaagtatttgtctctagctttatttattaataaaaaatcatggttttcttcattgtaatatatgccaacttgcaaaacatacaagaaactcatttctacaaaagacttgtacaccctcgagtccattctccctcattcgtagtgatattttagggccttcaaaaatagtaccacttgaggaaaatattagtttatgacctttattgatgatcatacaagaatcacttaggtttatcttcttcaacataaatatgatacacattaaatatttaagaatttttactaaatgatttaaacccaattataaacatctatttgtgtcctaagaacagataatgaaataaaatactttaataccactttaggctcttactttgtcaaaatggtattattcaccaaagctcttgtgttttaggggtgaaaatcggtcggttatggtcggtttttataattttataaccgattggtcggtttaccggttttttttattttacgaaaatcgtaaccgatcgtttaaaaattataaccatataaaattgaccgtatggtttttggcagtttttagtggtttctcggtttggcggttttggacggttttcagcagttttgggctgttttggcagttttggacggtttattgcagttgttggcggttttgatagttttttggtttaaccatttttttcaaaaatcaaaactgactgctatgtcaaaaaaactgaaaccgaccgccaaatttggtgatgatgtggaaccaaaaattcggttacggtctggtcggtttcggtttatcggtttttatgaacacccctagatacaacccaatagaacggagttgctgagggaaaaatcaccacctcttagaggtagccagtacactcatgttcaccatgaatgttcctaaatatctttgagaagatgtcgttctcattgttaactatcttattaatagtctccctagtcggccactacagttcaaaactccttattccatccttcaaagttataccctcaaattttcacaaatactattcctgtaaaaacttttagttggacgtcctttgtccatattcatgcccaaggccgcagtaagcttgatgctagggctatcaaaactgtctttcttagatattctctaactcaaaaaggttataaatgttattgtccagtcactaatttttttttctcgtgatgtcactttctttgaacaaacacccattttctcctccacttcacttcagtggagaataatgttcatcaagaaaaagaagctgagtggtcctcatttctcttgcagcaaacctagattgggagttacaccaactagatgtgaaaaattattttctatatgggaaacttgtagaagaggttttgatgagccaactaccaggatttgaagaaatccatattgaaaaaaatgtatgaaggcttcttaagttattatatggcttaaaataatctccttgagcttggttcaattgattctctaaataagtaaaaaatattggctatacacaaggtcaaaccaatcgtacactattcattaaatattcaagggaaggaaatactacaattcttatagtgtatgtcgatgatatcattgtcataggaagtaatactgagaaaatgagacaggtgaaagaaatgatagcaaaggagttttaagtcaaagatctcaaaatattgaagtattttctagggatagaaattgcaatacgcaacaaaggcatttctgtatctcaacaaaaatatactctttatcttctagaagaaactggaattcttggttgcaaattgagtaaaactccaattgaacttggaggtaagacataaatttgtcaaggagatcctgtggataaaggatgatgccaacaactagtagggaagctcatttatctatctcacattagaccagacataacattttttgtaagtctagtaagtccgtacatggaaaatccttgtcaaggtcatctcaacatagtgtatataatattgagataccttaaacaaactctagaaaaggactattcttcaagtaaacaaatgaaaatagtttttacaaatattgactgggtaggatcaattgatgataggaaatccacatcaagttattgtaccctactattgggaaatctagttacttggataagtaaaaaagcaaactattgttgcaagaagtagtgaagaagtagagtttggagctatggcccacaaggtatgtgaagtgatatggctaaaatggatgtttgaagaagtaaagatagatcatgaagcacatataaaactattatgcgacaacaattccatcaatatagcacataatcatgttcatcatgatagaaccaagcatgtagaaattgatcatcggtttatcaaaggaaaagttgatggagggattatcaacattcagtatgtgcctacgaatcaacaactagaaaatatactgactaagggataatcagagcaagtgttctaatttctcgtaaacaagcttggacttatgaacatctatagtcaagcttgaggaggactgttgatagctaacaaataatgtcaaagatatgagtgaaagcagtaaatttattctctcttgatttgtgggattttattctttattatatattgtaaatattgtgtattatacctatatgaaggtcacaaattgtactaatcaaatcaacaagaaataaaaattattacttcattttatcctttaactctgtagtctttggtaattccactacaaaattcgtagttatgtcctctcatttttatttacgagtcttttaagactgacgtaatcttgctgaccatcaatactatgattttacgtaccgacaactaaatatgttgatacatagcattttatccacctcctgctccaaggcttctggacattactagatcgagaggacgcttttttttgttgtactggaggcatatccttgttaatatttaggacatgagtgattacatgcgggctaattccagtcatgtctccatgacaccatgcaaatatatcagctggttctttgatggtgcttatgatttcatttctttcgttgggacccacgcattttcctatgcgaataactttagttgggtcttgatcacaaattcttacttctttaatttattccataggttccaaaaccgttttggattcgccaccaccaccaccataggttccaaatcccgcagaactggaatttcagttgggaactggtctaccggtaagggcaattttgggaaccgtagtttttcccatttttgtgatgcttagggtatt

SEQ ID NO: 15226 - DNA, 13674 bp, Cannabis sativa
  modified_base (1673)..(1690): a, c, t, g, unknown or other
  modified_base (9337)..(9338): a, c, t, g, unknown or other
ataaatcatgtgaaccacgcaacaaaaaagtaatttctgatctttattaattagtaaatctgattatattgaaataggttttatctagggcacaaaacccaataatattttggaattttcattgagagctgaaggaagcagtgatacatctctagattacattcggtaatcatggtactcacccgaaataagtttggtcttcattatactaaccctaatgctaagggaggggatacagaagatctgaataaggtgaccagtcaccacaaggatcatcatcatatagaccaaagtcttgacgatcctaaaatcgaagatgatgaattttgatgatcttgaagatgatcaataggatacaccgaaagatgatcaccaatacatgcttgttgacgatggtgctaaaagaaaggagaattcagacgagtcagatcatgtggtcattatggctaagaagttgcaactaattgaaagcaaattaactcggcaagaggaattttccttacaattgctcgagaaagtgtcgagaatggaagttgtgctaattataatgacttttggaaataaaaccaaaccagtgattctagagaataacaccactagaaaagtcgatcctaaaaattttggaacctatgaaccacataagaataaaaggaaagggaaagtgggtgaaaccttgaagaagccttctcaggctgaacagtagaaaaaacctaaatctgccaaccaatctcaacaggaaaagaaaggaaaccatgcttcagggcaggataaccagactaattctagaggcagagctacacagaaagataagtttgatgccagagttaggaagcctactacctggaaggataagaatttgatcaatgattctagtagtcaaagtaatgatgtcgacgaggtgtattcagtttcaaacaatgatagtggaagtctctccacatatgatcttcgaagaagattaaatgaaaaagaaagagaagtccaaaacatttaaaaccaagcctcatgggaatgatttaaggaatcatatcaatgatcgagtccgcagaagggagtcttcaaatgataaaactcagcgcttagaacgcaaagtataagagttaacaaagctcacagaaaagatctcccgaaggtagaatgaaataatgttcgattcaaaagaaaaagatacaataccatgtgtgaagagaattatagacacactgctgttggagcgcttcaaaatacctcaaatggaattgtatgaaggaaagacgaaccccaaggaccactaatccaaatacaatcacatggtgcaagttgttaaggctagtgatgatcaaaagtgttgttactttacgttgattctaacaaaatccgtagaagactagtggaagaggttatctttgggatcaatctacaacttgagggacctgtaagaaatattcaaaaaccaattcatagcagcaaaggaccttaatttaaatttaaattggatgttaatttaattaattaatcatattttatatcaaatttatttgttatatttttaaaatatctaaatctatttacctattttattgtttaataaaattagttagatatttttttataaataaatttcaaaatatattttatattttaaaaaaaaatataagaattgtattagatttatttatttaataataataatnnnnnnnnnnnnnnnnnnaataataataataataattaggttagtaattctaatacaactttcaacaaacatgcattatatgttactaatacctagtatatatatgtataaacatatattaaaaatgcttttgaaaaaaaaaaatctattaaaaataaatctaaatgcaaatgcaatgggttcaaatatgatcttttcacctctttattacgagttagtcaattataattcacattagttacattataaattacaaatagactaataaattgggatttttctcatcccgaactttttgacatgtgctagattgtgacttctaaatttttcaatccgtaaaatttttttcctgaactattgatattgttaaatttaaggattttcgtcttctaattttctaacgaatgtctaacgggtgattgtctatgtaccaaatcgtacctctcgagcttagaagtgtaccgaattgtgccccccgaacttccgtccacgttagacgcccattagtaaaattaaatagaagtccttgaatctaataatttaatagtttaagaaaattttaaactgtttgaaaaattcggaggacacaatttggtaaatgacaaagttcaaaaaaagggatctttattagccttataatatatgtgcctatgtaacatgaaacttataccagaacttggcttgatattttttgagtcgtagggaaaaataataggtcattgtttgaagaaatataataatttaaaaaatattatagaaatgtatattttgcaaaataaaattttctttttgggcttttgagctggataggccctaggatctaggattgttttggctgaatttaggatcgaccttgatgcatacttaatatcagtatatatatgtagaaagatgctgaggtaggaatattacttttgtccctgtcataatgattttttttatttatggtatctagagatattattgcctaattttttatttatatgacgttgtatattatagttataatagacatctcattctaaataatttacattgtgttgaaggagttagttgttttctttttgtatcttgctgagcagacttttcagttaggaattcggttaagtgttgttaagtcatgcctctcttttgcttgtatacatatacttctctgtacctttttctcaattcaataataatagtaataaaaactctgtttttctttctctctctcgttcaacatggtatcagagctttgggctcttgctcacgatccttcattcccattctctatttaactatggctagcaatcgtctactaccaaggctcaccaacaagctttcaaagaactagtcgccttcaaacacttgttatcaccaaaactcgaccaaaaaaactttctttcatggaaacatcaaatcatggcatctgttcgtggaaatcgcctgcaacagttctttgttaagaactctgctcctcccaaatacgactcagatgctaatcgtctcaacgaaaatctctcccctacatatttagactgggaagctcaagatcaactccttctgtcatggatgctatcctcaatgaacgatcaaatgaatactagaatgatcggttatgaagcctcaactgatgcttaggaagcgcttaaataattcttcacaaatcagaccatctccaagataagtcaacttgaaactcaattacgtaatacaaagaaaaactctatttcaattagtaaatatttgctgaaaatcaagtccgttgttgatatgctcaaagctgttggacatgcttttactgcatctgataatattgaagctatcttcaatggccttgggccagaatacgatatcttttacacatccctcaacatcaggaaagaacgagtcactatttcagaacttgaagccttgttaatggctcaagaagcaagaattgacaaatcatctaacgaactagacatctcctatgctgaagcaaatctggcacaaaatggaggaaatccatcttgtagaggaaatcgtgggggatacaccaatttaaggggaggctttaacaacaattttcctcctcatggagcgtttaaaaatggagatgacaccagttcatcattcaatcaaggtgtctgtggatccttaggtcgtggtaatggaggtcaatggtcaaaccaaaagtaccaatccagaataatttgccaaatatgccacaaatcaagtcattttgttttacagttttttcacagatttgataaatccttccagggtccccctcctctggttcaccctcttcatccatgggtcaaatgcaagcaatggttgtcaccccagatactatgtctaattcgaactggtaccctgatttaggagccacaaatcatttaactccagatgctcaaaacttgttcaatagcactgactaccttggccaggagcaaatttttgttggcaatggctcaagtttgagaattcatcatattggtcaatcctctttttcatctccttatcaacacaaaactcttaacactcaaaaatctcttacatgtaccttcaatcacaaataatctcttaagtctctcaatttgccttagataacaatgtcttctttgaattccatgctaacattattttgttaggaccaggtgatcaagaagacacgtctcattggcaagcttgacaagggcctctatgtgtttgatcatacacaaattggagaccagtctcaccatagatcccccaatcactagctcctctacttgtaattttatcacgttcctttctactcaaaacaatccatctattttttagttgtggcataacagattgggtcacccgtctgcccctattgtacaaaaaataatattcacttgtaacattcaatcaaggaataaaacaatttttttttttatttttgtcatgcttgtttgggaaagtctcataaatttccatttccttattccaatgttatgtacacacaaccactccaaatggtctacatagatctttggggtccagcacctcaaatttatttcaatggctacacatactacacaagttttgtagatgcatacggtaggtacatatagttatatctattaaaaatcaaatatgaggccttttccacctttcaaaattttaaaaagcaagttgaactacaatttaatcttcctattaaagccctgcaatctgatcgtggaattgaatttaaaccctttgataaattttgagtaatgtggaatcattcacactcaatcatgccctcatactcatgagcaaaatggtgtggttgagaggaaacataggcatatagttgagagtggactttcactccttgcacatgcacatatgcctttaaaattctgggatgaggcatttcaaactgatgtatatcttttaaacagagttcctaccccaaaactgaatttttcatctccattttagatgttatttcatacgatccctgactacgcaactctgaaaatattttggtgctcatgctaccataatgttataccttacaataaaaataaactccagttcagatccactaagtgcacatttttggggtatagccttgtgcacagaggctacaagtgcctgcgcaaatatggaagagtatatctatccagagatgtgacatttaatgaatactcttttcattctccctaaatcccactccaactgtctcttctttccctaaacatcccaatatctcaactactcctccactcattccacctaaagaaataactattactccaaattctcaatcttaccaatataatgttagctctctttctagctctcacagtgacaatgcaggtactcccacaggttcattccaaccagcttcatctccatactcaaagtcttcatctattgttacacctgtcacctctgataatgcaactgcttcatttgcctcttttacaaatgctgctcctgctctacctgtggttacaaatcagcataaaatgcagacaagatccaaaagtggcattcataaattaaaagtgtatctcacttctctacttcccactaaagaagctgaagctttattgtccaaaccttggaattctactatgggaattgagattactgcccttaagaaaaataaacctggactgttgtcccgagaccagaaggaagacaagttgtaggctgcaagtgggtgtataaaatcaaggaaaaccttgatggttttgtcaactagcacaaggctcgattagttgctaaaaggtatcatcaacatacaaccaggttttgatttctcataaacttttagtccagtggttaaacctataatcattaggattattctcacattggctataacaaaagggtggacaatgcatcaacttgatgttgacaatgcatttctcaatggatctcttcaagagaaagtttatatgaaacaaccaccaagttttgaagatccctctcagccaaatggtgtctgcaagcttcacaaggccttatatggcctcaagcagacccgaagggcttggtttgataggttagcctctgttctcatgtcctttggattcttctcgtccaaagcagatcactctctcttctgcagacactcaaatggctctcaaacatttgtccttaactatgttgatgatatccttgtaactgacagtgacccctctctcattgaaaccttgataacatatctataccatacctttgccctcaaaaacttgggggaaatcgagtactttttgggcatagaagtgacatacacatcaaaggggcatctctcacaaactaagtacttgaaggttcttctcacaagggaaaagatgcaatttgcaaagcctaactctagactcttctctcaagggagtgatccagttgaaaatccgaagttttacatgtccattgttggaggattacaataccttgttgccacaaggcctaaaattgcttatagtgtcaacaaagtatgccaattcatgcataatcctcttcaatcatattggacaacagaagagaattcttaagtatctctctggcaccattgagtatggtctgcacctaacaaaaccattgcaaaccctaatgacaggcgttccacaagtagtttttgcgtatattttggatccaatcttgttgcttggcaatccaagaagcaacaaacaattttgagatcttcaaccgaagcagaatttctaagcttagcctcaataacaatagaattcacttggatcagatccctgcttcaagaacttaaagttactcttcttcacaacaaatctattctatggcgtgacaacttaagcacagtcatgcttgctactaatcccattctccatgccagaactaaacatatagagtttgacctctactttgtttgaggaaaggtcatagcaaaagagatagaagttagacatatccctacattcaaccaaattgcagactgtttgaccaaggcaatatctagctcacgttttcctatccttcgagacaaacttaaagttgaaagctcttcaactctaagtttaagggggactgttgaaggagttaattgtttttgtttgtatcttgctaaattggtttttcatttagaaattctattaagtgttgttaagtcatgcttttcttttgcttgtatatatatactcttctgtaccttttctcaatttaataataataattgagaaaaaaaaagcacacatgcaattaggattttttttttttttcttttgaaaaatcagagagaaatatatattaaccacaaaacagatttacaacttaacaatccactaaccaattacaatctcttaaaagaacctcctcccaatctctatctttcctattgaatttcttgaagttcaaatatttcaatctattacaaactgtatgaataatccctttaaccatgactctaataattggaatcttgtgatcccaatagctagagtttcgaccttgctagagatagtacaccaaggcagcaattaaataaaaatacagcttaagcctgccttgagaaatcttccctttggtgatccacttcatcatatcttgacatgtcaaaagacttgattggcataccactccagtgagcaatctctaccaacactttcttgctataacaaaacaaaatctacacaatcaatcacgagttggtaccaatgaattatatttggatttttttttaaaaaaaaaaaattgatatatatatataattgtaataatgtacattgttatataaaaggaattagattataatttcattaggaggcaaaaataaattgaaaaaaattgtccttacaataataataaaagtgatacttcttctgcctaaacattttcatatgtattgctatcaatgaattgacgataatgattaaacatcattacaaaaatcattgatttgaaatatatcaatttaagtgtgaaaaggttggtccaacctctttaatccaaggccactagttttagtataattttatcagtagctaggttaaaatgcaagaaaaaggacgggaaatataacaacttttgttttgatgaagtgatagctaatataaaatcttggaggtgggatcctctatcaaaaatgatgacaaaggcttatctttattaagtcatgacattagaaaagtacccagttaatatcttagagctaataaaatggggacctttatatcatattatttaaatatataatatatacataaaagctatagcaaacttatcttttttttttttttttttttaattttatttttggcactataaattgtacaatttttttttaaaaaaaaaaattataaatagcttaaataatacataattatataaaaaaaatatactaaaaagctttcttgaaaaatatcgaaacaaatatagaatgtatcaaaaacaattcttttagagatacatgaaaggcttaaccatttatgacttcctataccgcctctagcggtaagaaattattttagaactcgtttgataggttttataagagtcgtattagattaattattacaatcatagattttaattcaataaaaatcgtattatttgataaataagaaacaatatgcattaattgtattataatctttagaaattgtctgagaccaaggttagggagcccgtgaccaaggtcacgggtcgaggtctgggactagagtccggtgttagggtccaaggttgggtttggagtctgagtccagggccgaagttggagtcatgatcaagtttatggtaaagatatcataattttatacaacctattaatataaatcaatatcaaatcataatattgtattgaataatactaatacaacccaacacaatactatataatataatatattaaagtaatgtttgtgaacatacactacataccaaccaaatattttagcttttttactattaaaattggcaaatttacataacatcatctcaaatggaatgttataaatgtgatgcatattttttagccatattcataaaattgagttttaatggtagtgcataatatggtttaaattttgtacatactaaaagttgttctaaatttagtacaaaatatagtatgagccaaattttacaccacaataaatattatttttttttatttacttttttgttacttattaatataactaataattttattattttttagttatatatttaatatttttatatatatatatnnatttttttaataaaaaattaatttttgttaactattttacacatttctattaaaataaaatttattttacttttagcgtacgattataaaattaaagctaaatatattgattcattttttacagctttcagcacaaaatttactccatcctttaaacatggtctaaattactatgaagacaatataaataatcactcaaaacgatatttaaatgtacatagatagatatcaagtagtttttcttttttcttttttctaaaaaaatagagtcaattttatccaagaagaatgagagatactagagcttattagctttataagtgcgggtccaccttcattcggattttctttccatggccatgcaaattgattattaatgcttaaaattaaaatagtttatttatctaagaatatgggaaaaggccaaattatcttcttctttttatggaggctatttttgctttttatggctatgcaagggacaattatgcctaatatttgagtaatgatatctgcggtaaaattatgaactaaaatactatatattaattagattgtctctattgaaactaaacatatttattttatatagaacccactgttttagaaagatacactgtaatatcttagtgcattatcattattcaaaatattaatctcattttctcatgcctttacccacacacctaaatgcccttccaaagttttggtcagtactttgctttcgatcacattatttaaagctatagtttcaaaaaatttctttttccattaaagatgaaagcctaatttatcgtcttcttgccttttgccttttgcttttctctttccttctccatttaagatcttgtaagaccaagtctaatgcagcacaaaactaaatttttattgaaagaaatccttcagcgtcatgaagtttatataaatatataattagttttctctttagactagctagttccccacacatataatagtaattgcataattttatttcaattacaaacaaaattacatatatttataataaatataccgagagagtacatataaattgttaagaagcaaacacaaatgtgagagactcgagactcgaattcagacccgcgacaagacccatgcccggaccgaggattcagacccaaacccgaacctcagacctaaactcaaacttaggacccagacctagacccatacctagacccataccccaaacatggacccaaacctggggccccaaactcagatctggacttgtacttagggctcaggactcgggacccgaaactcgaatacagacccagaccgcaaatcccgaactcggagatgagacctagacctaggactcgggacccgagactcaaacacagacccaaactcgaactcgaactcaggatctagacccaaacctatgacccgagaccccagaacctaacaaaattaattcattaattaaaaaaaaaagataaatcgagtcagatctgatccaatctgagtatttgatctagcaagacgggacgagatcatcatagaatcagatccgaccccatccactaacactcctagtgaaagcaacttccatatttaaatataatgaaagttgtatcacttcacaaactactatattattcaaagaaaatgtccgtataaaataatcaagtatctaatttgtccattatcaatcttcagcaactagaagaccaatgtcaccacactaacttttacgttttcccatccccaaataaagaacacacacagtcgcgcaaaatttaaggccaatggaaaatgctcacttattaaaacaaaattttcagatcaatccaagtacctaatataaagttaatattaataacatttggttaacagttggattttaaattggactcatctcaacacaagtctgccctgtcttcttctacttcattctcccatagatattttgccatagaccaaactccttacagggccagatagtatgcaaaaccacaaattagaatataaaataaaatagcccactctagtgaaaaagaaaaagcaggcccttttatttttaggtatacccaccgtccaaaactgaaggaaaaaggtagcaataataagagaagtgtgccaaaaatggaaagctcttgatttttggtagtggagtatctatctgtatcttcttcagcaaaatcctgagagaataatatctcaatctgaaatgactgttgtaccactaagaaagctgaaaacttgcttgagatttcctctagatgcccgggcatttactgcaaatttgcaaatcaatactaatcttttcctcatttccaatttggttatgcaattctggctgaaaaacttcccaccatcaaatgttcctattggagtagtacaaaagtcaagatataaactacagtcaataatatttggaaagaaagtttcccttactacaaaaggatttattaagacatcttgagcaaagttgaaagattgctttatatgcaagagaaaactttgtaaaagagaggggaaactaataaaatatgcaacaaatgaaggtaactcatccataaatttatttatatagcagtgaaaaaaaaaggtggcagaagctatgaactagacttcccaatgattttttacaggaaaaaaattaacctttcgaaactgagaaagcaaagaaaaatttagctgtatgttattaatgctaccttcatcatcaaataatgatatcaaaattgccaaaccgacgcatacactaatatcctcccctggaaatggaaacatcatcagacattagaagatataaattgaacaagcattcaataaggataaacatccctgctttgacatcaatattcctagttcaatataatatattacacatgacttaatttaaatgtcgattgaggaaaagaggaagggagcttcacaggctttaccattgtgacaacaaattagaagtttcttccctttgcttagatttaacttcgcaaactttactgcagaaggcagactcttcaacaaggaaaagcgatcaaattttgatgtctgaagaaaaggatgtaaataagtgaaacaacaacaaaaggcaacacaaacaacatagtaaattcctttactttcttccaaaatttaccagtatcggaagatgaaaatatgtttcgggatcttgaagaagggcaggcacagaagtttcattacaatctattatgcaatcaatctttgatagattttcagctacaaaaacaaagtaacagagagttagtcatccgaaaggaagaaaagagtagcgaattgttgaggaattagcccattaaaccagctgccacatcagcacaacaaaactttggtgtccaagatgttagttatgttagttggttctctgtttttcagttcaactaccctaactgcaaaaagctataaaaggacaccttggttcaaacagaaagatactttagcacctagaatactaaacccctacagattcatctctccctagttctaagaactgtccaagaaactgagtgaaggagggttgtaataaggttccttgtgtgtctgatcaagattcctcagtgtgaggttttgtgtaatcggtgttcgacaccattgttgagtgtaattgagttgtaaactctcattgtaatgtgatgatttgatcaataaaactcattcattctagtcattgaaatcgagctaagtatctttaatatttgttcaatttctgttgatggttataacagcaactgaattaattataaaccagaaataaaccagcaattcaagcataaaaacagaactaattataaaccagaaattgcgaagtaaattcacatcacgaataattgagaacaaaaaggaacaaattttgatgaagtaaatgttttgcctcaaaatatgcaaaataaaaagaattagcatctcaagagagttgatttacatatggctatttgcatagaatcaaaagagaattaataaaacatcaggtgtgccaaaaattgttaaaagcccaaatctaaggcaaataaggggtaacccccaaaatgggataaactttctctcaatcctctattttaaaatatataataatgtttctagtgcaatcctacttaagctgatatagcatactaacaaatatgacatcataagagaaataacataaaatatacaacataaaagaaataaccagctagcataagaaattatactaatccagtttattcataactattctcctagatcacatactgagtcatgtataacttcacaaaccaaactaagtattcaaggacacacatgcttgtagtacttacaagaaccacaagaaatgaataaaaagaaatatatatatata

SEQ ID NO: 15227 - DNA, 13133 bp, Cannabis sativa
ttttattcttatttaaccatataggtgtgcttctgttattttttatgtccattatctgggttcagtttttgttaattatactgttatatgcatcaaaaaaagctacggtcaaatttatatgtgctacataccttgtatacttttgatcgcaatatagattgatagtgggaaagtagtagagatatgggaatagaaaaggatcataatcatttccttcccttttatttgttgtgtctaattcaacttttcctcattttatgctattgggactttgatcagaacacacagacacacacatatgctatccaccttattcttcttcttggtttctgatagcaatatatttgtacttattatttgtcttttgtagaggatctgtgaaggggctttctgttttacttgagcctgtatttttgtcacaacgggatgtgcaagaactcttgtggatcagctttctcgccagctctatccattacccttctcatcattgatcttattgaatctggttgatgaaaatggtccagatgaataataaagctcccgtaaccaatgatgagctaactgaactgaatcaccggattcaagatgggaaaaaagaaagaagggagagggttacgagagaacgccaagggctctcagaggaacatgaatctaggatcaatgaagatgtgcaacaacatgtcagcaatggggagattggaacagtacaggctctggagaggagtcattctggccagcggaggtctcagcaacagcctcaaggacatttggttcgctgggagaggttcctagctttcaggtcgctaaaggttttattggtggaaaatgatgactcaactcgccatattgtcagcgcgctactaagaaattgtggctacgaaggtcagtacgtttcagcaacatgaaatgatcattgcatttctcttatgcagaagtatacactctatgttaatggctttatgtttgattattgacggagatgacttttaaagtaaacactgtagtagatcttatgaataaacttgatgttatatgatatgaaaggaaaccatgtttatttgctccactacgagtaataatatccatggtctaatagttgttgtcactaaccataacctagaaagagtggtcttaggattagcctcgctgatccacacctcacctcttgtagagaaggtcaagggttcaatccctcccccgccctccaaagaaagatataacaaacagaaaacgaatcaaaagaataaaaaacaaacaagtaaggtgagcatggcactattattagactaaagcttgttttagtttaatataagtagatcttatttctgaaatgttattttccaccatctaattacacacatttctagactgatcccctgatcttgtggcagcgctctttttctgagttcctatcagaaatgctgaaaactattaaactagtttttgttacttatttattttcttttgttttaacactacattttaacaacagttcctatactctggtgcttcacgtgtctatttgtgctattttgatgttcatatttatagtctagcgggaagttttttagtcatttcgttcatgaagggtcaagtacgatttcttgacctagcttagattttgacatagaaccattcttgaggatactacagtgggttacttagtttgtagagtatgtttatgtgtaccttctaaagataacctggttataagtatgatattctcgaaaagaaaaacatgttgctccagacctgttggcaattgacatcttactttctagctatgataattagacattcagtcgctatatttatgtcatgctttcttcatcatcatttttcatatatgtgttcaagttatggtaagctatttaaatattgttattttatttgaccatgttttatttccaacgcaaactgcttggtataatattacataaatgttagccagaagctttgatttagtttacatcctaaaagtcaaaactagaattttattggttccctcaataaactaacaattattcaatgtattctcatattggcagttacagctgtagaaaatggcagacaagcttggaaagtcttagaagatcttgtgacagatgttgatctcgttttgactgaggtagtcatgccctgtttatctggtattggtcttctaggcaagatcatgagcaaaaaaacatgcaaggacatccctgtaattagtgagtatatttcctttattttggatttaaaataatacttttttctctagtatctttttgtaatttatacttttaactaatacatttattgtgtgtgtttgtgtttgtgttttcacagtgatgtcttctcatgattctaggagtatggtctttaagtgtttatcgaaaggtgccgttgactttttagtgaaacctattcgaaagaatgagctgaaaaacctttggcaacatgtttggagaaaatgccacattgtgagttgcaatctatttgatttattatatcatggaccaattcaccttgaggttcaggtttcttctcatttatgcattttgtttttcattaagcaccaattgtcgaactataccaaagaaaacaaacaaaaaaatggcttcaatctttgcttgataaaaaatatgttttatgtaatgcaaacatcacttaattgacataataccattaaacacagaaatttgctcgagttgtgcattaatttttcatattttcatcagtctagtaatagtggaagtgaaagtggtatatggattgaaaagcctttaaagtcaagaactgtggaacattcagacaacaacagtggcagcaatgatgaggatgatactgacagcattggtctaaatttcaggaatgaaagtgacagtggaacacaggtatttcactaaatttcatgaaagagttttgttttttttttttggtgggaatgaagttttatgtctttgtatttacagaaatattagcgaaatgttagtttccacatgaagttttatgttttatgtatcaagaaactactataattatgttagtttccacacacctagtttggaatttgtctatcacagcacccatatatctatttaccatgtttgcatattactcatttgatcttggtggaggaatattcatgtaagagtttttaatacttttatgtatatgtaagtggagaaggaatgataattagcaagataagaaaacaagaaaaagaatgaaaacttactactgagcttttacagagctcttggacaaagagagcagaagttgacagccctcaggcagtgtcgtgggagcagtttgctgatcttcctgatagcactaatcatcaggtcaatcatccaaggcaagaagcctttggaaacaactgggtacctgaaaatgcaacagtaacaccacgcccacataatgatgagcttggtaggcaaattttcctaacatcttttttttttttaactttcttccattctcgatcattctctaagttatgatttatttaaattgtttagacaaaaaagtcatgggaaaagacttgaaaataggattacctagccttcttgaagacacaagtgaaaaagggctgaccaacatggaaggtactaataaagataaatgttctgaactgaactcaaagaaagatgatcaggagcaggagaaaagggaattagacctcaacaatgaagaaccgagtgcagaaaagacccaagctgttgatctgatgggtgtctccaattatagtattgatcctcacatggaaagtggagttcttgatgtcccaaacgaactctccaaggctgcctgcatgagagataatgccaaccatgagaataaagaaacacctttttttgagctcattttaaagaggccaagagatatccaagatactggaaccagcgcacacgatcgaaatgttttgagacattccgatatttcagctttttcaaggtatagaaatattttgtgttgatataaacatgctcaataacaattaactctaaatttaagaatataactaagtcccattaccatgcaggtataacattgtttcaactgcaaatcaagctccaacagggaacatagggagctgttctcctctagataatagctcagatgcagcaaaaacagaatcaatcccaaatttgcaatctgattcaaatggtacacctcccaaccagggttccaatggtagtagcaacaataatgacatgggatccactacgaataatgcttttaccaaacaagtggcttttgcagagaggcctacaaacaaatccacaatcaaactccaatcaaacactggtttccaacaagtgcaaaatggccaagcttcccttcagactattattcaaggtaaatattcgaatatgatgcctaagtaattaattctaataagacacaagcaaaggccacataccacttcataataacttttcatcgatgttgatttgttttacaaaaactatggcagcagatgcttcacagtgtggttcatccaatgcattgagagcacccatggaaggcaatattagtaatcacagtctcaacaggagtgggtcaggtagtaaccatggtagcaacggacaaaagagaagcaccaatgcttcaaactccagagggaaaaagacagaaagtgagagtgtggttactggaagagggaaaaccattgaaggaagtgaatcggatggaaatcgatttgcacaaagagaagctgctttgaaaagattccgccagaagaggcaagaaagatgctttgagaaaaaggtaaacagaaaatcaccccccttattttctctaagaagtaaatcatggaaacaaacaagtaggcgtctgaaagaaggaagtttcattttcaacactacacatttgaaccatcatctttgggatccagttagtatgaagctttttgggaaaaaaaaaaggaaaagaacagaaaattgtttccctgaaatataaataattgatctgtttcctttgaagttccatattgctgacctgaagcattaatttttactttttcaggtgagatatcagagtagaaaaaaactggcagaacaaagaccccgaattcgaggacaatttattagaaagggaatgaatgaaaacaagggaaaaggcataaattacgaacctgaaccaatttcataacaggagccattagaatccttgatgcagatgtggtgcgtttgcagtagatagttacagagcttttatgattgaatatatgggactgtattaatattgaaggtgtataagtaatatgccaacggctgtgctaggattaagtactacaattctactaaatagaaggtgataaaccctcaaaaagaatagagccttctctcaataaatcactttaagtgggtgtaatattattatttcatgactagatgatcattttaacttgaatggatggttgaagaaactcttttcctgtttacctttcttctttccttcttcttgtgttgtttcttgaaatatcaaacttgcttttgtgtatatatatcattctgaagctttttccagccaatcaagtactgtgcttctctggttatatatatctgcagagagttcagtcgtagagaaacattaacagaaggtttttcaattaaataaactgaaaaactcacgtaccaaagagttttcatagattatgatatggtaacattgtacagagaaaactcaaaagtttggattcaaagatttacagggtggtgatagaaataggagattatttccattgatgagttagagaaatagagaaagaagctgaccagagagtgtgatgggctgaaccatattgggctaaagttgcagtataaaaaggacgagagaaaagaaagaagaaaggcaatgccttttatgacctcttttattttggcttaaaaaagattaaatgatctccattattattattattaaaagaaagaaaatgtattggttaaaatggtattagcaacggcataccaatgtctttttctggaatatgttgttgaatcgttgttgttagtgttcaggtgaaggtgaagggggtggaggttgaggggagggagaagatggtaaaatcaagtataagaaataaatgctgagttggcgttggactattgggtagtgttgaaatgatgttgtggtgagtttggtgtccacgtgtgtaaggctggaaacgaaattcggtcgcgttttacgaagaggtagttgaggccatccattttgatacagaatatcgggtcagcatgaaggggccctttcacttggctaccacacttccacgtgtccctttcctctatgttttgttttccatttccactagtctactactgctggataaatataaatctctctctccttcttccaaaatttattcattcacgtttgcatttgcaccatatttattattattattttaattaataaaaataatagtaattagttaaaatataattttaggtctggtaccaatctttaatcgctataaatttagaaaaaaaaaatctaaattttttatttaaactaagaagataaattccactttcgcagcttttgaagaaatgataattttttttttcttttgtaaggatgaattttctttaaatttctaaatacacatatcttctgaaaataaaataaaagagaagttaaatttggactggaaatttgttgtcggctatgtatttgttttttcatcacaaactaaatactaatatgctcgtgacgaaaaagttgtaagaaaaaagaaagaataataattaagctggactgtatttggcatgacttcaaaagtaggagcttaaaggttttaaccttttatttatttatttatttatttttaacagtgtttttatacttggaagattttatttgaaaagtcagtatgatcaaattattcagaaaataaaaaattaatttaaaattttaataaatgcctataaaaataagataaatctgtggtgaagtaagagttgaataatgaataagtttttttttttcttaaaaaaataacttgtccttcattggataaaacagagaatacaaaacaaataagttcacaagaaaagtagagaactattccaaaccaactcattatctaatccaagacctaacttagtaactttataagccaacatattaaactctatgtgaacatagacgataggttcagactgaacgataaaaagctcttaacaccaattaaacaatcacccaaaagactactggtccacttacaagaaataagcttatcaacaatagatttacaatcagttttaagaacatccacaagaaggtgtaacatttgagctcattggatggcttgaaagatggccttagcttctaccactgcaggaggaacacacccaacaaagggtttggagaaccctgctttaaccttattgaattggtctagaacaacaacgccaatactgtgttttttacgattaagatcaatggctgcatctgtaaaaatctgaaaggtactctggacgtctgaaggggctggaggcacagtactctggacgaaaggagtcgaggtttcagtgttctgctcggtcggggctgaggaattggccaccccaaggctttttctagttgcctagcccgcgcagtaattaagataagccttcttggagtctccgaggtaatcaaaattgcctgcagtgtttgccttctagaattcataaaagacctacagggcggtagtttccaaattctcgacctccttcgagagctcttcttccctcgtctgcctggccttaacatcctcttccaggtcggtcttttcctaggttaaatttgaaagaagagtgcagagactctccctctcgtcattgagcgcatcgacctccttggacaaggcctcgttgtctgcctcgagttgggaagtagagggcatatcttgaatttcttttgtcagctcctcgaccctgttgttggcagcaaggagcttcttgttcacctcccatagctcggctctcacgtccaccaccttcttattggttgcatccacctctctctgcaggttgttggtggtggcaagattctttgcagccgtagacttggctcgtgagtaggcataatccatcctcagattgacctacatgaaaaaattgttaaaacctgtactggtaaaaagacaataaaaataaagaagaaaatacttatgcgagctgcttcctttaggaccctgcccatcaccaactccaaggacaactcattgtctaccctaaacaattgatcgctcacctcgggaagtgatcgatcaagatagtattggagcatgtcctttcctttttggcctcagagcttagcaccacaacagtagaagaagacttggttggaccggacccatccgagctcccccctttggcatttttcgacttggacaccttttggtctggagggtccatagcaggcaccatctcctcagagaggtcgatcaatgtttcaatcgggcccttctccttggacaaaacctcgtcacctctagatcgcttgggcgggggagtcaggcccaaactgtcaccagtcctcttcttcaaagcttggagcactttttaagacatggctacatataaacaagacaagaaagttaaatgcaaatgtaatgtaaagaaagccatgggacaaataaatataagttaaaataccctgcacgtgagcaggagcattctcccgaacaagtaaggacggagtctcatcctctgaagagtcttcttgttcctgctccgtcaggactgcctttccttttccctctactggggcagacggccagacagatctattaggttcccaaatcttgatagcatgctcaactggaacctgttcactggcaggggccttctttttcttcttgctcagatcctcctggtcgggtaccaccacctggccagactctgccttcttcgcagcctttagaacaaaatcggctaggaaaagcttatatttgacgaaattagcctcggtggcctagagggtgatgttccgtgtagattccgacagttggcgaattttttgtaccctttccctaagccccagtgtgaatggagagcggcagtatgatggcacctgctgaaagctaatgtgggcggcattcattccctggatgaaataatactcatccacgaagttccctattttgctcacctattagtccgtggtgcccctcaaccaattcccttcaatttaggagaagtagaaatatcttaacctgctttgcttagggatggattatagattgaagaaccagttggtgtcgtgaggggaaggctcaccccatccttgcgaggcgtagaggataaatagggcagacaagtacttgatgcccttaggaataaactgggacgggcagaggtcgtagtgatccacaatcctcctgaagtacggaagcaagggtaacatagcaccctgcttagtgtgagcacctgaccaagcatagtaaccctcccttggactggttgccaaaaggttaggagtgggaaggaagcattcgacatcccctaggtaaccacccttgagtaaattcttcatctttgctctggttaccatggatggaggaggaaaccacacatctcctaatgcactttgcctcctcaaaggaataacctcggtgtattcctcgatgacagaatccgtgccggcttctaggagtttctcagtctcagacacaggtaatccctcctcattataaccccgaagggtagcccccgagttgcacctatcttttcatcttcaaaaggagttccagagcagacctcgccctgatcctccatctcatcccccacaacatcttcttcctcaacagcaggttaggcctgttccacactcgacattgtggcaagacgggccacgtgtggattagatagtgaagacttctgcactgtgtgtttggttcgcaccatcatcctagtcttggacggaacctagttggtgtgtctggtgatggttaccgcgagtgtagcgatgggtgtacctgcagcagcaggatttggacagcctatgggcaaggtgtcagtagtatctggtcggacaatatacatccagttggatggtagatagcgcctcaaatgcttcctaagctcctagatgaaacgtccgtagccctgaccttcgatctggccagggtaaaaatggtgttgtactttaggttctggggaaggtgtgtgttcactaataatctcccagtcttcgaagcttgaattggagaggttatcactagatgaagacgaactagcacagaggcaaggatgatcctcgtgtagaagttgaagcagatcctagtcaatacgatgttcacttccccaaaactcaccaaggttcatctacaaaatttctatggttctcctagaacaagttcaagaactatcaagctttgcaacagaaacccaggaacattaaacattcaaacatataaaaggaaggaaatgaagaatttactcactaattcgaagctttggttgcttaacagccttcagtaaaacgaccatatctccctcaatattcatctgattaatgcgattcaacttgcatattaaagctctttcaagtcgtgcctcacattcttatcacaattctaaagatttcaagtccaaattttccctccaaaacaagtgcaattttttgttcacattactcaaaaacgattcaacggacaagatttaggctctgaaatttgatgatcatcatctgaagtcattttcaccattagatcatcataaatggtcaagatcaacccagaagtatgtttccataattttttcttattttattattattttaatggacctcgttccctataaaagcatagctctactagctcatttttcacattctaaaaaatgctcataaggctagagcatttctctctagtttctctctctagaaatacaaagctcttgccctagtcaattttcttgtatttttcgtgagcaataaaaacttgaagtatgtgtagctccattaccgtcacaacacgggagtgaactactataaatctcttgtgtctctcttatttactttacttaacttctatcttctctcgccaatctagcgagcgagtgttggcgagttttttttctttcaatatattggtattttcattgagaggcacaactcaagatccccctttgaatattagatgtggcttcttgtagtgaataatgttgcaggttgcccaatagatgttttctctggtatctatcaagtttgtgtattcagtatactgggattcgtatccacttttttccttcttggaggactacgtccgactttgaggcttgtaattccttttacctctagcttggcttacctttgactcaaggacttctgtttattgttgtggttgagttgttctgggagtaacactaaatttaatttatgccgccccatacccaaagaaagttgtctacagagaggcataccctgaggtaggtggagctggatacagggtgtaggtgcagcatacagggtttcgagaggcacaatagctggagctggatatgaggcaacttgaagtatgcgtagctccattaccgtcacgacaatgaaagccttcagcccttgccaagaagtcaaaaggtgattctagtcttttcatctacatttcattccaaagtagggatttggctctgatttttacctgtagggccactagcttctgttcatcactgactttcgtctttgatgttgcttccgtgaagagttaaatataagttttgagggtctcagcctattgttgcttgatgttggctaaagaactgacctccatatcaaagttcttacaacaacgaagtgcttcatgaacattaattgtagatttgccaactctgaacattttgggtggtagcctcttccaccatttatctacgaatttaaccaaagtaagaggaaaacataaacatttcttgtctccattcacgtgtgcgaccctcatgagtcgattgtatcggggcaagtgaactctggggtccgtcttgcctttgtacaagttgatctacggcatccaaaagcactctggtaggactacgtccaagattcttctaacgcatgtctctggatcttcatcttctgaatctaatccggctccactttgtttcttgatcagttgatctattactttctttaaggttactagtagtcctccagccttcgtgtattatcatttggcatctctcatcactggatttggtcattgatattaatttgtaaatcctctctttgaggcctgattctttcgcaacgtgctttctaccttcatgcattcacgttgtccctaaggtcattcgctaaatcactttcttcagcgtccaagtcttcgatatcttccttttggttaacaaaggcactaggacaagcattccttccctggggaataagtcccggtgcttgagcacgggtcttattgccttgcaggtccctccattacggattggtttcgcaatctagccttggggtttcatcattcctcccttttgggaggtcaagatttattctcgcatgccttggaatgttggcttttcttgggggcatctactatggattttcctttgtcatttgttgatttggatggtccagctctagggtgatcaaactttttcgtggccactggcgagttagtgttgatctaaaccccaagactggggtgctagtttgtaggagggaccttcgggttaaattccctagttccaattagggtttgcaatagcatgaggatttcttgtatttggcggtagcttcctcttgctcctccttcttggcatcttggtctaggaccagctgctttaaatgagtaacttttgagtcttttgaaggagtgtaatcttcttcctccttttcatagtcatctttttgctcgtcctcatagtacctatcttggttaatgtctttgtcgggattttcttcgtacggatcctctggttggttattgttttggaggggatcaccaaccaccacctatgctttttcctctcgcacggtagctgcccgggcatccaccggaggaagaggattaaaaacatatataatagggttttcaattgtgttccaacctatttaaccagttggtcgcacaaccgtgtttcttgtggccaccattttttagatgacaactgttgaccgaggttttcggcaactattaaaatataattataata

SEQ ID NO: 15228 - DNA, 3546 bp, Cannabis sativa
aaaaataaagaaattatttttttaaaaaaaatatgggcaaaatattgtattagtcaaaattcaggggataaaaatgctaatttttaacggtaaaataaacagaactcaaaataaaggaacataattatgtaattgttatattttaaagaaaacttttaacaagcggtatattttagagggcaaaatcaggtagtgctggaagtttagggaaaaacatgctaatcattcttaattttattactttacttttgactttctaattgaatgaaatcccaatttctacagtctctgcatttatttaatctttatcagttatttttctgaaataattatcctaattgatattttttcttaaattataatttttgttaaaagaaattcgtaaatttttttctttgtttctggttaaaggtgaagtaaaattataagtttataaggataagcttgcagtctcactattccaattttagcctgggcaaggtgccatgacgagaagaggaagaacaaaatgaagggctgtcttttggtgatcattaagcttctagtgacaagtaggtgaggctatactatatattattgttatcaaccatgccgagttggtaggtgaggaaattgaaaatgttaaaaccaaccccaccaaaacaaataaagaagcagatttatttaaatcaaagttgaaatatttaataaatatgtaatcaaactaaactaacttcattactcagttaggtgtttgtccgtatttaaataatttttctatgagatttaaaagaccaaatcaaaatgtgcttatataaaacactaatactaaaaaagaatagttacaagcatttaactaaacagtctatatatatttaatatttatagggctcaataaatacaaggcaaggaagaaatttataactcatgggggttttgcgtcttaaatgcagcttcacgtacagcctttgctaaccgaaaaagatcattttatgattgcccactaattcggtttctaacatcgtaaacccatcagaacaaactaacttggaagggaaataagataataaaatacaaagaccttgaagttacagctgataaagaaacccctttataagcattcaagatcttggttcttccatttccttattaggaagagaaggaggctcaaacatgctaaaagccctgtaagcggaaatgagagccaaaacaaggaagcagcaaagagctatggcatgtaaaaccaaggccaactttaatctatggcaaaatcttccatatgaattacaggcctcactccatgacacttctttatccccgttgtaagatagatatactatttcgagaacagcagccccggatgtgaccattaggtatgctgcaatctgcacatatcaaatcaataatattggaaatcaatacaaaatagaagcagcaaaaacggtcatccaattagccaaactatgataaagtaatgttggattaaaattgtcaagggctcatatgtatattagtgtattgctatttgaagtttgacccaaaataaagtgatcattttagtaattgtgggtcattggttattaaagtgtcatgagctaaatgtgtaaataccctaagcgatatttctaatttattgaggggctaaatttaataacctagctatcaggttaagcgatatttctaatttattgaggggctaaattagaaatacttaaaattaataaccgaggttatagattgatagtggtccccaagaaataagagtcaatttctattctcatcttcccccgtcgagagagaaaattagacaaccctaagtcttgttttcttgaaagattattacccaaaattaccacaaagattatctctacaagatggattaagatcatgactatgtataaattaaggtaagcttccgctatttcgcttcttccctttgaatcaacaaaggtattcttttaaatctaaggttatatatttataattatatgtaatatatttatttatcaaattaaatattgttattatgagcgttacagaaacttacaagtaaagggaaagttatggcaccccatgttaagaacaaattaagcttaagtgacttaaaataaaataaaattaaataaaataaatttgctttggtgagtagtggtaagatgataattgggaaaaaaaatataaaaaatatatttcccattatacccatctctgcaggaacaattaatatagtgataatagtcacctaactttactaaccataccaatatttggtacaataatgatgaagctatgttgagagtgcaaatacaaacctggtcagagacaaagaataaccaagctttggaagctaaggatctgacccatgaagacacagcagcaacaacagcatacactgctgaaacgaagctgataaaaaccatgtacctgtgatacaattcagccctttactccaaaaacgactagaagaagtagtagaagaaaataaaaataaaagagctggagctcttacttgagaccagtaagattggtgaacttaagatttccgtaaagagtgttatcttggtggtctgtcacggttagccatatcgttacaatactgagaggaatgactgtgattctaagagaagaatcaatgagcttaagaaatggtatgtgtttgtttgaatcattagaaatattctcatctgagttcctcctcattttcgaattaagcaagcaagacccactggagcactatggcactatggctgaagtaagtaacaacacatatccataaccgaaagccgaatcgtggaatatatataataattatggcttaaacaaagattagaaataaagatttgagtggacctacttctcccctctcgtgacagaaatgcttgaaagaacacgtgttgcttttttagtggaaacactctactagcttagcgtgttcggtacagcaatcatcattatgatgtcagcttttgtattactaaatcattaaattagtttttttttttttctctagccattgttattaatggtcagtatttttttaaatttgcacttcattatttattcgttatattttttaatttctttttaaaaattatataacatccgatacataattattaccaataatacatcttagtaattcttattaattaattcaaaattccaactttagttttgttacacacatcgtcgttgacacatcttcctcttaacgagtgcgtctgaaaatccaaactccaatagaagattccactataaaatattatttcgtagtgcaccattacattgtgatgatgataaattttagattctacctttttatttcactagtgaaaataacacgcgctacacgtatgtgaaataaaatatttatgaaaaaatacaattggtattcaatactactacaagatattatatatatcgctatataatacaatgtacatcgttatcatattttaagcatataataagtttttggtctattatttttaaatgatagtgcacactttaattatttacattttatattttttttaaaaaaaaatctaaataatctcaataagacat

SEQ ID NO: 15229 - DNA, 9010 bp, Cannabis sativa
  modified_base (4127)..(4127): a, c, t, g, unknown or other
tgaatgcattctcaatttggttgtactcatgcatgtttggtttgattgttaatgattgttattagattaaatgtcttcaaagtcaattcatacataatatatgtatccagtcgatatgatattatgtacgttttaattgattaccttatgtgtggtagataatgttatggtaattgattatattttccaagtgggagaatgttagaattattattgtggactaatataatcataagtttaataccataaacacaatcattaactatgtgcccaatatttgtcaacaaccataataggatggctaataattatttattatgttagaggaacatgagagcaccttcataactataattggtccattaaattatagtataccattattgaaccacttaagcccaattagtaaataacccattaggattagaggggtgtgacacatatttatatatatatatttatatatatatttatgtcttaaatgaaaaggattaatggtaataggaagagaagaggggatagctccatattgtgctcttctccaattttgagtttgtgttgttttagtggtgattcttggattcaaatgactcacatgaatggctcaatgggaggaatgcgtacattatttgggatgttctaaataaagtattgatcttgaatttaatgattatgaataatgatgattaatgtttaatgtgtgtatggataactcataatttatgtgatagtttaatacttgcacctcgtgtgccacgtcacgcatagaccaccaatatggtagtaacactagtccagccaatttagtagaaaacattttctattttaggtcttacttttaaattcattattttttgatgtcgtgatggtataattgtaaatagaatgttatgaacaatgctattagtattagtggtgtccaacactatggagtgacactataaataattagcaatttttaataataattactaaatttaaatatgtgagatttaatttgaattacacaatagatgcaaagcatggcacatttaaattaatagacacaatattaagatttgatattgaattagacaaaaacttcatagcacgacacctttatttaattggttttaaacaccaatagtgccattacaagtaaattttataattaaaatgaaaatacctacataaaatataaatttctcaatatgaaaataagaagatacgatagcatagactaacactgtaaattttatgagaaaaataatacaagcaaatacagagacttaaacaatacatatcattggccaaaaaataataaaaacaaagaacaaagcatatgaaaagccaattatttattccgtctaggaagacacccttcacagcaaattattttaaatcttcattcttttttcaatcctttttctttttatttcttgctctttcattggaattgtacggatggatttttatggtacacgacattcctggatattccagatttccttagcgtattgtgctattgttcggtcactgctgaactttccactccctgcagtgcttagtatggacatcttcagccatcttttcctgtccctgtagtcaaaagagtaattctattagtcaattataaccaagattttgtttcttgattttatggggttgaatctagattgcattgtcaaagttagctcgaaaataaaacaaactcagaagttaaatccatttgaggtttgattgaataagttggtgagttatcatgctcttgtaaattctgattgagtgctattatcttacttgtatgcttcatcaactttttcttgagcatccatgtagcttgggaaatcatagccaacaaggaaataatctccacgaccgaaaccggagtttccctcaagggagtcaagaagtgggttgtagtcatagctgccaaatactccactccttataaaatccttggcctcttcaaatcggggatcaggcttaaactgagtttttaaaaaagcaaccacacacacaaaaagaaatcctataagaacaagcagtagtttacaagattattactaataataaaaataatatttccctgaaaaatcataccagtccattttctctttccttccgcagtttgggaacttcgtcagccgtagcaccgaacaagaagaagttgtcctctccaacttcctccctgatttccacgtttgccccatcaagtgttccaattatgagacaaccattgagtgcaaatttcatgttacttgttccacttgcctccatgcctgcagtgctaatatgctgtgatagctcacttcctggaatgagcatttccgcaacagacacgttgtaatttggaacaaaaataacctgaacgattttgacagttaaaacaggtaagtctaaagaaactgtacacaatgtagcatttataagaagagggaggaaagtagtaaggtagtgactaatagtctgtaaatttaaagtatcataattcattatcatttgaaattagtaagtcttgaaccttgtagggctcctaattggccaccaacctaaactacattatataattaacaagcattctaaaaggtcttttctgactgagaaacaacctaaggaatgaggacccatatctgtagtttcattttctgctaatgaatttttcaagtgagctcagaatggaccgaaaacaactaacctttaaaaggctgttgacttcaggatcattgttgaccactgcacctacatcagtcaccaacttaacaattcttttagcattcgtgtaggtagcaaatgcctttcctccaatcatgatggtgcgtggagttgttttctttcgttcttcggggctaagctcctgtcaaatttaaattttgagctggttacaaagatgtacataacattctttgactttccattggtaagcaactgaaaaatctttatcagttttcactgagaagaaaaattaatataatttaaagaatattgaagtatagaccaagaccaagaccatacaatatggacatgaaaaaggtcatcattatgataacaatgacaaacaagagaaaggtaatgggaaaattctgaagtgcggtcttctacatagtacattagaagtaagtcgcagcaatgcctttttacaatagaaaggaaagcaacaataagaagtatgatgtaccttcaacttcttatatctataaattgcacccagaatgttcagcagctgcctcttgtattcatggatacgcttcacttgtatgtcaaacatagtatttgggtcgatacttacaccagtcacacgttctatgtactgagcgagacgctgtttattagccatcttggctgatgcccattcagcttgtaatttctcatcatctgcaaactgttagagattattggtgtaagtaataatattaaataaataagacagccttactaagaaaattttatcagttatacgcacttttcgaagaccgactagcaggtcaaggttagtgacccattcatcagtttttaaccatttagtgattatgttactgagctcaggactgcaaaaccgaagccatcggcggggagtaatgccattggttttgttttggaactttgttggccaaatagagacataatcttcaaataactcagcctttaatatatcactgtgcaattgggcaacaccattgacctacaaaaagttggggtatcagggagtccatattaatttgaaatgtaattaaataaacagctaataaatgaagagttaaatgactgaacatggctggtaaaaataaacagataagccagacaaaaaacataattattttacagaaattgtattcagttggttatgtttggtttggcgcaagggtaatcggattggaatcaccgttacaattgtattatttgattttgaaagttttgtaatatcgttacaaatgtaatcaccattacaccatttttatatgaatgaacattacagatctatacctatgcaatgactctgttatacaatttatatagaaacaaaatgaccattatacccttcctttaccaaaagaatttaaagtagtatatgtttttcaataaacaaaacatcttaacaccattactattactattactattactattaccattaccattaccattancattaccattaccattaccattatgttacactaaactaaatgtcatctaatagcaaaagatattttcatgattttgaaaatattcaatcaaccaaatgttgcagaaagatgattttgtttaatacatagatgcaatcagctctgctgtgacaaacatcatgccagttaaagaagataatccaaattttcaaacacattttaatgtcttaccgtatgagcagagaccacacacaaatttgccatccgcacgacaggcttttggggattattgtctaatatgcgaatgctgggaatcttactctcaagatcaattcgtgtagcatttatcattgcaataaactgcaatgaactcacaattcattaattcaatagtaaaagttatctatcttgtacagatatgtgaaaggaaatgtcaaataccctcttgtcaatttcttctatgatttccatatgacgaggaagaagcttccacataacagcttgtgaccatttttccagtgcttcgggaaggaccgtgtgattagtgtaagcaaccgtcctggttcaaaataaaatcaggtactatttaggtccaataggaactccagacatgagaagaaaaagaaacacaatattgtgctcccgtagccataacaaaaacaacgtcacataatacatatgaaaagcatgaaatatacggaccttgatgtcacatcccacgcttcatcccacccaagtccttcctcgtccattagcaatcgcattagctctggaatagcaagagtgggatgagtatcatttaattgtacagcaaccttgctggggaaatcagaccatttccacgatccgtttccatctttcctctctttgaacctaaagataatatcctgtaattgttttcaagttacaggaatattggtcaaagctttaatgccaagacaaacaaactgaacatggaaatgatattcttaaatgtaaaaaagtgatagctaccaaactgatgcacattttaccaactaaatcaaaccaacctgaagtgatgcactgcagagaaaaaattgttgcttcagccgtagaagttttccatcttctgtagcgtctccgggatatagaacagcacaaatctgcaaattcaaaaatggtatgaaaatgaatttgatggaaaaaagttcgaatgtgaatgcacacattcatttctctccgagatatacatatcattagaagtcaaaaagtaatgcataaaatttgtgccataaattaaatggtttatgtgaaaacaataattctcatacaacttttctatgtaaaattaatagcttacctgttgagctcgggaatgaagctgtgcagcagattcatatttcccatcattaaactgaaataggttgaaatcctcagcagaagcttttgcttcccaaagacgaaggctaatagtgttcttggttttgtatcctggaattggcacatcataagccagagcttggaaaagttctccctcaacccattttcggctgtacaacattcaaaataagcttaccataagcagcttcagaaatcaaattcccttttcttttcagaggacaaactaaaaaacaatcaaagaatttgacaaattcccatatatctttacgcagcagcattatcaaagagcaattatttagtggttagtagacatcatctatttctattttctaactctattacttacgatccatcaggattgacctcaacacgaccaaagaatctgaccgggtacaggacatcatgcctgacaatttcccaaggactaaacttctgcataatttccaataaaaggacatatcagcaacagcaaagttctatggaagaaacaaaataacttagtcggggaaaacagaacctctagccaatcctcagcactttcttcctgaccttccttagcgattcgttgcttaaacaacccatatctgtacctcaaaccataaccccatgcaggaagattcaatgttgccattgaatccaaaaagcaagatgcaagccttcccaaaccaccatttccaagggcagcatctttctcctacaaaattgacaatttttgttaaaaaaaattaaacaaaatgacagtcttacgggactatatattgcaatgatcaagcaatctaagcacaaagttccccaaatagtaacaccaaactgtggtgaacccaaatatatagtacaatccaacttaatattgttaaaagcttcagatttcaaaactaaggctacctgttcaactatttcctcaagttcatgacccaacttgttcaaagcatcggcatacgcgttctggatattgaggtttccaattgcgttcgtcaaagctcgcccttgaagaaactccattgacaagtaatacgtctgtttcggatccactttgtgaaagtgaagatacgtctcattccattgctgcaaaaataaaaaaccaacaacgaagattgaaaatcagtatatactcataaaccaaataataaaatttgaatcgttacctgtacgagacggtcgcggacgctctcagcagtggcatagtaggcttgctcgggctcgaacttgaacggcgagaagtgaggactgtactgagcatggtaattgatgttcgacgcaatcgctgccggctcttcagccaacggctgcgcattcgccggaaccgtggaagattttccagcagctgtggtagcattactaccattcgatttcaccgaagcctccatgtaaagctagctctaatcgattttcaatgataataaaaaataaataaataaataaattcaggaattgatcaaactaaatcaagactaaaaataacttacatttttgagaaattgcaatatctcaataccgtaaagtgctgattctaattgtacggcagagtagaactccccacagattgaggagaaagagagagagagttcaataaagcgctgaaaagaaagaaagaaaaaatctaataaatagaagggtggaggaagagaagatattttgtacatgtaatgtatcagtccaaacggaggagaatatgctaggaaagcagacaaaatgaattgagtgtgagagtatttttggttagtttcctaaagaaaaaagagcaaaatatcggaggagaaaggaggaggagttggaggtggaaaatctttctctttttagtttttttctattttgttttctcgagaaagtgatggaatggagtgagtgaacgtgaaggggtcacatgtagagagagagagtacttgcggttgatatgagagtgtggcagtaatcgagtgaaataagtttttggcgtttttcgggatcagatattaaaggagctattacacgtggttctgtttatttatagtgttcattttgacttggaagaattcacggcggttgtattgtatgtgctttcgtttagtttaatttaattaggaatgagtcctaataactccttcctactaacctctgttattaccattggattagctccagtccagcttttatggcactgtttatttattcgtttcgttggtattttattctaaatttttgttttcattagacaataaataattattgaaaatctataatgggagtaaattaataatactttcataccatggacattgccaaaaaaagaaaaaagaaaaaaaaaaaaaaaaaaaagagacagatacttctcatcccacttaaatattatgaagaaatggtaaaatatgaaatattttttttggtaagtttatttgacaaaatacttttgtttattggttttattgttttaaaatttatttggttaataaattatttattttggtatccattttatatttagtatagttttcataataaatgtataatttttttttgaaccaagaaaatagatcattcattctcaaaaaaaaaaaaaaaaaatagatcattcattaactttcggcaagtacaatagaattaagagcaaccgaagtattaagctcagtaaaaatacaatctgacataaaacaagactctctagcaacacaataagcagctttatttgccgcttaacgaaattcaaagaaacattattaaatgcataaaattaaggaaaaacttcattctagtactacttttataacttaattacaataaaatcatatcttttttattctttttttttaacgattaattttgaaatcttcaacttttaataccgaatatcaagatttatatttattattaacttaaattaaaaggtattaatgtctcttaataaatgtgtatatatcactattttataaagttattaaattattattaaagccttcattattatcacataaaaagttaataatatttcagtaattttatatgatatagcaaattgatttcaaaatttcacaaagataaagttatatagatactaaatggtataataagattgcttaaaaaaactgtaaattattattcctttagatactatttagcataatgttgaattattagagaatgcaagcttaatttgatttgatatgctttagttaaattgataagtacttatttggatactacttagtagtagtatataattttttatttttttttattcattttgatgtaatattttctttttagtatatattaatcctattttattgtatgtgttgtgtactttgtagtatataattgagtttgtgactgtgtttaatactttgtagtacataatctcatttaaattttcaaaaaaaaaaatgtactattaagtagttaaatgcaaataaaaaaataaaagatactattaagtagtcaaatacaaaagtaaagaaaaaactcatgtatactaattagttttttgatagataataattagttagattatatagcaatagtaagctatgatgtatgcttaacaaaataaaataaaaattgtaattagt

SEQ ID NO: 15230 - DNA, 3441 bp, Cannabis sativa
ttgtttgggccaattgaattgattttaaaagaagcttctgctttattgggttggttggcccaatggtttttattacacttgttgggaatataatagattctattaaagaaaagtttggactcattctattttttttttttttttgaaaggtatggactcattctatttttattcttctctttttcttatttgggttttgcatttaagtgtaacggtcataatccatttattgttaaagaaaaattttagttctaaaaacttttatgtgtcttgtatatatttacatttatagtttgtaaaaatatgaggattgtatttttctttcaaaatttaagagaatgttttaagaaactatggacaaaaataagtaactttcaaaatatagtcaatatagttgaactaaattttgtaaaaaaaaaaaaacaactcttaacttgagaattttaacaaaaaataaaaaagtcttgtaataattttttgtttgaaatttataattttctcaaaaataaataaagaaaagaagaagctccaaaatccccttttaagtgatttcatcatcattgaggacccttcattcatgaatataaatatatatatatatattgtataaattcaaaaaaatattatgagtaattagcgatatcaatatctcaatttaattctcaattaaaaataaatatctaagttatatttttagaacttctgtaagtacctggttgctaagtgttaaataaattgacacgtgacaatccctaattgttccacgtcattgaatttttttttatcttttttaaaaataaaattagtttaaatataccaataaaaaataacacgtagataataactttacatttaacggtcaaatatttacggagttctagaaatataacttaaatattattaccattaaaaattaaacataattaattatttacaaccaaaaattaaatttaaaatttataccgcaaattattcaattattatttttacctaaaaaaacctactctctcatatcatatggtccatttgtttttctctattgatgatcatgagtgaccaatcatgattactatgtttaccatttataaacattaaaactgcacatttattagtacgagaagagaagatttccttttcaaaattcaatatagtacataaacacagtaaaaaaaataataaaaatatataaaaattgtcctattcaaagagtaactttttcagttgtgttaggttcccaattcccaagtcccaacggcccaaacccactagtggaccacaacacccccaactttttcatcattactgggccctttaaggcccattcaaatgtttccgttgaaacccaaaattataattaattaatttttaattattatattaaacaataatccaaactccaaagatactaagctaagccaaaacaaacaaacagagccttctttctttttttattaattttcccattttgggctcagactcagtagttaaaaccctgaatttaccactttaccctcggcatatttcgaccgttgattaggggtagtttcgggattttaataaatacaagccttattatcaccaacactccatagctgaagctcgctctgttagaaaattctcaaaaatgggtttgtgtctctctacattgtggtagtgttgtacttcattttagctttgtcaatcgttaatggtgtttttgttagtgtaaatctccattgtagagctacagaactaggcgtatcttggtgtttttttttgtttagggtcgtgacagtgtaaaggtgaagtttttatttttggctaacaatgacggaaaccctagattctggatctcgaggggtgttaggtgaaatagtggagatgaattcgaatgtaatggagcttgatcagagtaatgttttgaatgattcgggttcgaaaatgaggttagacaggaagaacagttctgagaccgataagggtttgaggaagagagcggagatcgatacttcggctccgtttgaatcggtgaaagaagccgtaagtcgttttggtggaattggttactggaaaccctctcattcttctaagctttctcaacaacatcatgaggttctctttctctttcactttctctctgttttttaataaagaatttaaagtaatgaatgatacctttaatgtgaaaaatgatcaaatgggtttgtttctttgagtttaaatttatgaactttatgaattttgagcttcatttccaccattgatgaaaatggggttcctataaatgtgtagtactaagtaaattcagtttatatgtatgaattttggagtgaaactatgtttgttgtttaacattatttgacttttttgtgttcatttaatgtcagtatgaggtggtggaagagcttgatataacaaaattagaggagcaggcattgcatttggagaaagatttaatcatcaaagaaagggaaaccttggatgttttgaaagatttggagaagactagaatgaatatggaagagttgaagcaaaagctacagaaagaagctgctgaagtcaatctagctcttcaggctaatgcagctgacaagaatgtgaatgaagcagataaggaaaatcgtggggatgagggaaatttttgtgctcctgtggaaagcataaacaccacctgcccttcatcagccccgggtttgatcttaatggaattgaaacaggcaaagctgaatcttactcggactacaactgatcttgctgatattcgatattctgttgatgttttcaacaagaagttggagaaagaaagactttcgcttgagaaaacgcgtgagagattaactcagaattcttcgaagatattatcgcttgaagaagagcttaaccagacgaaagtgaagttacaattggtgaaggatgctgaaagtagatgtgtttctgatagcccatcagatatttcgaaggagcttcaaaggttgagttttgaggttgatcagttcaagcaaatgggagaagctgctagatcagaggttttgagagcaacacaggagattgaacagacgaaaactaagataaaaacagctgaaattaggttgattgcagccaggaaaatgaaggaggctgctagagcagctgaagctgttgctcttgcagagattaaagctatgtcatatcctgatggcttatctggagatggagatttttctcaaaatcaaggaattactcttacatacgaggagtattcgtcactgatctgcaaagctcgagaggctgaggaactgtccaagaagagagtagtggatgctatggatcaagttgatgatgcaaatatttcgaaaatggatattttgaaaaaggtagaagaggcaactgaagaagtcagaaccagtcaaaagacactggaagaagctctgagcagagtggaagcagcaaacagagggaaactagcagttgaagaagctctac

SEQ ID NO: 15231 - DNA, 4084 bp, Cannabis sativa
  modified_base (817)..(833): a, c, t, g, unknown or other
  modified_base (985)..(985): a, c, t, g, unknown or other
  modified_base (1252)..(1255): a, c, t, g, unknown or other
cgttatttcttgactgatagacttcaccccacaaaactgttatcattgcatcaattaatacataagtgtagtgttcgatgctgttcattccaaatgtgcatggatctaatataacttgatgttatatcacaacatgttaatggcttattggacccattgcagtgacacttttgatgagaatactccacctgttgatgacccagagtacatttcttcattaggagctgcaatctttaggggaatgcaaagtggtgatagtaatgctgtctggctaatgcaggtaaataggttaaatctcatttgatcttttactcagagcttaagtatggtttttatttatttaactttttttttttccaaaatgagaaagagatctcttgttttagattggccccctcccaagtttattgcgtaatctcacatatggcgaaggaaagccgtagtaacaaagatatattaaaataaaacataacatgtgtgcttttaaatagggatgtggattaatctatcaatacaaaatattgatagacctaaggataatatataagaggggtatatgggtaattgtaaagagaggtagtggtactatttatatgagtgattagagctatcgggagagcactgggtctttcgaatatccagcaactcattgttttgttatcttcatatcaatataccaactactattgtcatatatttcctattaatataaaggctaattaggattttttccttccaaactttaacatgtaccaaatcatattctcaaatttttttggccgttaaaattttcccttaaattattgagattgttagnnnnnnnnnnnnnnnnntaattttagtaaaaaaaaattctatcatggattacatttcaaggggcatgatttagtacgtattaaaatttgagggcataatttggtagatatcaaagtctggggagtatggtttagtacataaacaatcactgaaacaataaaattgaatnaaattagacaaaaattcttaaatctaactactattgtcctatatttcctactaatatattaaaggctaattatgattttttcttctcgaactttaacatgtactaaatcatgcctctgaacttttttggccgttaaaaaatttcttggagattgttagatttaaggacttttgtccaattttagtaaaaaaagttctaacatgggttacatttcaaggaacatgatttagtacgtatcaaaatttgaggggtatgatttggtagatnnnnaagtctggggagcatggtttagtgcttaaacaatcgaaacagtaaaattgaatgaaattagataaaaattcttaaatctaacaatctcgggaaattttaacagctaaaaaagtctagaagcatgatttggtacatgtcaaagttcggagaggaaaaaaatgctaattagcatatattaaattgatagaaaattcctatcaagtggcatcagagcaatcgatctatgggcaaggtgtgacggaatttcgattagagcttcaacaagtttctaactaattggagttgatgaaatcaacgtttctggcgatacttgaaaagacgattgagaaggccctcgtaaaacacatatttgttgatcagacaacttactcaactaatacagaactccgggaaggcactaaacattagggatgatgacgaatagatggttgaaatcttaagagaggaaagccacaaagctttcatatctcagaggagtatcgaggaccttcccagccatacactataataggggcaacaagagacgtcagaacttagtcgatgctcactggagccggagaagaaagaggctaaaccagcaccgaaccttcaaaagaaactggtggctttgtcggacaccaagcaaactcacgactcgtggccaggggaactgcgatgccgaccggcactggagaggacattattctcaccggagaagccgcatcattgacatacgaactagaaaagtttcttgtcagagacaatcttctgatgctcgacaatggcgttccgaatcgtggggttgttgcaattgttactgaagcactagggtatgggttagtcactccttacttaaggcccacaacagtccaagtggttggcctattaagcaaaacaaaaagctcaaggtttattttaggtcacaaaatggacacatgggatccatgtatatttccttcttcttcttcttattgcacaaagtggaacgacggagtgtgatttgcagacttcaacccaaggcagctagtgacagttcaggcggagagggtggccggagggaagcagacggggccagaatttctttccgatgaggtgggtaagccctttacctgctggatttttgacagaggaagggaagtcacttttgacagcttcaggcatggcctatcttcacaaaatcactttggagcactaggtattttctatgggatagagccaactacttgcagaaaaagaattaaaaaaatattcagcagagttagagtgttcggttaaggagaaattcaatttgcatttaatgctaaatatttagaaggaagccagccacttgctgcagcaggcaaactcatcaacaacaatttttaggggcataaaagtgcaaaatgcatttgttggactggtttttcgagagaggacgacttgctgaaactggcgtttctctcagcttgcacaatatgcattttctggagaaagcacatgatatggttgtttttatcgcaatctatcatgaaacctttcccaaagttgctaaccagccgaagacattaatcttagatgcaccactgtctaagaattcagattagatccatttactcactgaacaactttaatttgaattcatagtgtgttgctcatcttgtattgctaaatttttacatcacttttggctattttgtgatacccttttttttttgtggcaattttgtgatacattattgatctaatccaatgcttgaaagaattagaaaattaggtattttattgataccaaagagaaattgcaaagtcccaaactttttgaggcagtttggtatctctttactcacttgtaacaaaacaattcttttcacttacaattgatcagccctctatttatactaaccctgtccctctcttaactgattttgttaaaactaaccccttaggatataagatagctcacttaaagcccctaatcaattatactaatgagactaatattaaggtgtaacatttttgtcttgcacctgatggatatattgcactgttctagggatggctattctcatatgacccgttctggagacctccacaaatgaaggttcttgtatattatttgcctttgttgtcgtttctttactttcctttctacaattacttatttattcaccaagcaccaattaatgctttgttgcatttgttggtttactttcaggtttaatttcgtgttttccttgtggttgactataatccttgtttgcaggcacttttgcattccgtgcctctaggcaagctggtagttttagatctgtttgctgaagtcaaacccatatggattacttcagagcagttttatggtgttccttatatctggaaggtcatcgttccttttttaattttaagtcagtaccccgattatcattctatatgtatattaattaatatgcatgtttctctctaccaaccattagtttaggcttgaaaaataggacacatctttttaatgaatgaaagataggttcaaataaatcacacatatgtaatggttacttttctgactatactttttttgtgtgtcttattttcttattccatctggataataagggtgtatgtcactgccacacacacatatttgagattgccatgttaagcatcctcatcaatgtgaagcttgaatttgtattgatgtctacaaatgaataactgtgactcacattgtcataaatattgttattctgcgtgcttgcattatatgtcaacgtatcaagatgcttcaaagcttttattctttattgacttactgtatttataatttcatgggcacaatttccctgtttgatcttaatttgttgctattttcctttacag

SEQ ID NO: 15232 - DNA, 2030 bp, Cannabis sativa
cctcaggcattgttcctcatcatcagaacctttcatcgtctgtggttgcaccgcaccataacctagccacctcaggcattgtgcctcatcaccagaacatggctgggtccgggattggtgcgcctctccagaagattggtcatgctgctgctgctgctggaattcttccgaataatgctgcacgctttttgggttcggacaaccgagctgctcgctcatcggggtttggactggatggccgctctgctcgtagcgcacttggattggatgggcgtgcttctcgcactcttggacttgacagccgtgcagcccgtggtggaatgtctgatgagactgaactgagcaagagaattatggagcttcatgagtctgatgaacatggtcttgctgttaagcctgttctgaacgtcatcgatgtcatttttcaccgcgccacttctgacctaccaggattcactgaggtacgtattacatattacattataacttagatataaagtaattgttagagagttataattaatttgataatattatttataacattattggctgaaagagtaacacacacaaaaagaaaaaaataatagaaacaaaaatctatacccctttatctaattttctagatctatggctcgctaacaataatctatattatagagtcttaacacttccctttttacagtaacaactatatatatatatatgtgtgtgtgtgtgtgttttttaaaaaatatggtgtaaattaataaattagaataagttatactttaattaatttatggaagctgtattaatgtaattatgcatacatggactttactcaaacaactcgatctaagttaatttttttaaaaacttttggttattttcaatgatctattaatacagcatccggacattgttaaggatgacaaggcgactgtcatatattctgttgctaatcttcaagacaatgtcgaaatcccagctaggattgtcagtgcaatttcctgcgaggtaatacaactttaatttaaaatttaattggtgatgacaaaattggttgacttgtttgaccctttggtacacgtatgataacagatcctcagcaaatgctctgctggagtggatgtgcacaccataaccatggaaatactaaacataatcaaacactacggatgggactcgaaggtgttgctagccttggtggcatttgctgtgacctttggcgagtttcgccttgtcctccagcaatactcaaccaacccacttgccaaagcggttgctattctcaaacaattgcctgaacttttagagcattctggagctttgaagccaaagctcgacgctctctatgatctcatcaaggaaatcattgatgtaaccaagaaaattgttgacttctatgaccttccaaggaacgagtattttactgctgagtctcctgaacttttggctgctgcttctcatattccaactgctgtttactggaccattcgcagcattgtcgtttcttcaacacaaattttggcactcaccggcatgggcatcgagtatgtgtatatatatattagtttgataatttggcttaattgtactatatatatgtagtcatatgactttttgacatgtttgaccaggtatctaactgagccttgggagctatcttcattggcccataagctcaacaacatcaaagggcatgtggtcgacattatcgaacgttgttacaagtttgttggtgggttatacataaacatataaaattatacaccttcctatatattctatatatgtattatgtatatataactattgctaatataaataaggtgcatgctaatacagagaagcagaaacaagatgaagcatacgagtatcttgtgcgtattttccaacttactcacatcgataactcaaagcctctgagggttttgttcaatgaggatccgaacgcactctacgattgctacaacaagaaaagggtatatatgctcagagaaatcaatattcaatttgttatatattaattgatttgaaaataaata

SEQ ID NO: 15233 - DNA, 14513 bp, Cannabis sativa
  modified_base (114)..(134): a, c, t, g, unknown or other
  modified_base (11151)..(11151): a, c, t, g, unknown or other
ttgtcaaaataccatcataaggtttgataaaaaaaatatgaagaaaaaaaaattaagtgtcaacaatacaataatcagtagactttgagttgaacatttacatattggacctannnnnnnnnnnnnnnnnnnnnttttataatgtgcggtgcggtgcatattaacaattaaaaaccgcaaaccgcactgcaccacgtggtttaggaaaaattcaaatcgcgattgcactgcaaaatatttcaaaccgtattttttttgcagtgtgatgcggtgcgggccgtttgagcagtttgagcagtttgataaacacccctaaattccacgtatgtatggggtgtggtgaaattattttactttcgagtgtttacagcgcacgtgcgagttcttaccacccgtgtcaccgtatgtgtccgtaaaaattaaaatgataagaaagatatttctgaaccttacaaaaaaacaatcctctgaaactctccttctccttctctctttcccgctctgagcttaagcttaattccagtactggaagatttttctagggtttctccattctcctaacacatatgaagctagagcttttgggaggtttctctccctcctcctcttcttcttcttattcttctcactcagctccgtattcaccattcttctctcccaaaatggtcgccttgggttctctttcgctttgtccttgtagtctgctatggcgcccaaacttcactaggcgctctgtttcctgctctattgacactcccaatgctgtaggtgcgtgattatagtggaggttatcactctttttaaatccatttgcttttttttacttatttcctctttgtttcatggtttgattttaaaatgttttatctgtttggttactgagaaatggaaaaagaaaagaaagtaagctataactttgttttgtttttattttttaactaaggaaagtgattgttgtactaggctaagtaagtagtcacttgatgtatgtcataagtagggaaatgaattttcttaagcttgagcctttttgtttattcactgaaattgtgctcgttaggataagataaaacttagatatggtagttatgtttgacatgttctttttcttcactttaggtgcttctaaatctaatgtgtcggcccagagaagaaaagggagaaaagaaggtcctaggaaaagtatggaggactctgttcagcgcaagatggagcaattctatgaagggcgtgaaggcccacctattcgtgttcttcccattggaggccttggtgaaattgggatgaattgtatgttggttgggaattatgatcgatatattctcattgatgctggtgtcatgtttccagagtaagtttttatacaaaatatgtaaattacggtcttggtagtactagttacttttagattagtgcagtataatgaatggttttttgtggagttttcttctcctcaaacatggtttggatacatttgcattttgcattgtttatgtttgttttaaacgtttcttgtattgtttatcttcttactatccataacaatgctaaaatgttttttcagctatgatgaacttggagtccaaaaaattatccctgataccacatttatcaaaagatggagtcacaaaattgaagcggttatcattacacatggtcacgaggatcacattggtgcgttgccttgggtaaagattctagctgtttcttgcagtagcattttggttgattccaaacctattaattattttactcaaaagagtctagtcccttattctttcttctgtttatttttctgttgaaagctataaatttaggcaagagtgttcaccgatttagcttgtgtcatctaataatcatatatctcctaagtttcccaataataagggctgttctttttttaaaatgcacgtgaataatggctgactatgcattcagactttggatccttcacactaaaacttcattgtctttcaaagtttattgttttggtagtttaattcttcattttattttgctacatgtatttacattttgttccacatttctcctaaacaggtgattccagctttggattcaaatactccaatatttgcatcatcatttaccatggaggtacttgtcaaaattttaatttacacaatgttatttgcctactgcaattcaccacatttgctacttttgagagtatggatgtcacttgcaaatgtatttttttttggccccctcttagagttaaatagtttaatggtagcccttgacactatttgtacattaaccttcggttcttcctgtgcctcgtatcatttactattgatcattacattttgttgttggttttgaagcctttattttctcgtttcttttttgttatatatttattctagttataaccaaattctgtgaagattctgattctgctcaccatgaaacattctaaattgctcttcctttaacagcttatcagaaaaagacttaaggagaatgggatttttgtttcatctagacttaaagtattcagaacaaaaaggaaatttaaggccggaccatttgaaatagaacctatacgggtcacccattctattcctgattgttgtgggttagttcttcgctgtgctgatggtacaattcttcataccggggactggaaggtaacactttcttacatgctttctctatgtcatgttttcatttccaagctgtttacagtctatacttgaacagattgatgagtcaccattggatggtaaagtttttgaccgtgaaggtttagaggaactatcaaaagaaggagtgacattggtaagcctctggtccacgattacatacctttcttcctaaatttttcatcatttaaatgttgaagtatgaactgttaattgccttttggctgaggaatatgtatgtgcttgttctgttgttgaagtttgtgcagccttccttctcttggaagtttgtacaagcgaatatgttaaatgtttgcagattagtattttctgaaaacttattgtcacagaaaaagttatagttctcactcttttctttcagatgatgagtgactctacaaatgttctctcacctggaaggacaacaagcgaatctcatgtggcagatgcactgttgaaacatatctcagctgctaaaggaagggttattaccactcagttcgcatcaaatatacaccgtctaggaagtgtgaaagctgctgctgatttaaccggtcgaaagctggtacttgtttttcttttcccaaaatgtgtaacaccatttggggctccatatattacatttacttaaattagtgttttgaaaataaatgtccggggtgcttttatcattattatatcaggtatttgttggtatgtctttaaggacataccttgatgcagcttttaaggatgggaaggcgccaattgatccgtcatctttggtaatactgcctaaatccaaacttcttcaattgtcttgtctaaggactgtaataatcctgcacttccctattttttgggtctcttttagtatttgcaatgttaaatatgctttcttttgtcagtcgaagttaaatatgtttgtaaaaggaattatgtccaacattttttcatttatttttccctaggaatttcgcttcagttttttttctttttggaaagattgctttcaaaaattgcgcaattggctacatatcatttgtgttaggcatttgtttcatcttaaaacattgttgaaagtttaagtttgtgatgacatcagttttctctttctaatagattcgtctgaaaacgttgctggacttttaagtttgtgatagttttctctttccattaggtgaaagtggaagatattgaagcctatgctccaaaggatttgctaattgtcacaactggctctcaagtaagattatcttcataaactccacctccactgcaaaatagatttcaatactatcagtgagcctgttggtgtttgtaactgagaatgctatttatcaggcagagccacgtgctgctctgaatcttgcatcttttggaagcagtcatttcctcaaattgaacaaagaagatttagtcttgtattcagctaaggtaatggaactaaatttcatttgtaccattttctaacttgattagcactcaaattttcacttctgatcataaaactacaaacttaccaataaaatggagtgcatttctccgatagtctgattgcatttagagattgttgaattcattgactgtttaattataccgttgctttcttttctgtttttacttaaggtgattcctggtaatgaatctcgggtaatggatatgttaaaccgcatatcagagattggatcaacgatagttatgggtaagaatgaggggttgcacacatctggtcatgcctatcgtggagaattggttagttcctttgcatctcaattttatctttatatgtttttttttttttgtaatgtgttatcatctctagtgagcctgcaatgaaatttatgttataacttgatgaactgtaagtctgttactgttagaaactagttatgtaaacttctccccctctttttaacacccatctgtaactgctgagaaaaacacttgtatttttatttgattaaggtagctggtagttaagcaccatacgtccatttactgtgttttaattattcctagtgtaaaggccgtagaatttaattttcagtttacttgttaaacgcaaaaaaaaaacaaaaaaaaaatttactcttctaacagtagcatacatttttattataaaaatgtgcataaaaatgtgcatttgtttcttgtttttatcttatatacttccaatggttttgaaggaggaagttctaaggattgtgaagccgcaacattttctgccagtacatggagaacttttgttcctcaaagagcatgaattgcttgggaaatcaactggtatccggcacactactgtgagtcaactctttccttgctaaagtgatataaatgatcaacaaaaacttaatttagaaataacatttgttcttgggaaaatcctctgtcatcgtggtataactttatgatgaccgctgtgggagactccgagactattctgatgttcttctgttgcttgattctgatatcttaagttacagttgtgtgattgtatgttcttatttaataataataataaaaagttctttaaaattaaagattgacttctatatcaatttcagttcttattctatttttttttcttttgtttaaagataagctcattgcacattgtcgttagcatcatatgaacattgaccatgccattgattgcaacactgttctataagaactaggataattttcatatcatgaatggatattctagaaaaaatcttctctcatcatggtataattttatgaacaattagagactattctgatgcttgacataatacaattctttgttgtatgcatgatactgcaagttttgaattttacttctgtaacctgaaatgcaacataatatataaaaatgtgaattcttttgctccaggttataaaaaatggagagatgcttggggtttctcatttaagaaacagaaaagttttgtccaacggtttcatctcacttgggaaagagaatttgcaggtttgtgttcgcttatgctcatgtcaaaaaattattggaaatattctgacaaaggtttttggtgatgcagttaaagtatagtgatggtgataaagcatttggaacatcaagtgaactttgtgttgatgagaggttaaaaattgcattagatggcattattgtggtcaggtagataaactattaaatcttctaatgggttatgcatattccaattttctactaaatagcatgctgatgcctattgttttgcagcatggaaattttacgtcctcaaaatgtgaatgggctgtctgaaaataccataaaaggaaagataagaatcacaacacgatgtttgtggctggataaaggaaagctattagatgcacttcataaagctgcacatgctgcactttcgagctgccccgtaaattgtcctttagctcacatggaaagaattgtatctgaggtcttgaggaaattggtaagaaagtatagtggtaaaagaccagaagtgattgccattgctctggagaaccctgcagcagttatctcggatgaagtcagtgcaagactatctggcaagtcccatgttggttttgagacttcagcattgaaaagaaagattgatggacacccaaataagggcaaatcaaataaagtgcaagcagaagcagaagtagcaaaccgcaattcagtttcggacatcaatttgcaacaagatttggaaggttctcatctggctctataagtttgcattattttgatgcatatattctcacctcttttctgtcaataatgattcttttttgtttatatatatatatttactttcttatcttggtatgatcatcaaaataataggtgatggtgttgaaatggaactattacccgaagaagaaactacaacttcgacttttgattcagacatattatcttctgattcaaaggagtcagatgagttttggaagccatttactactgggtcagcaatacctgttgacaatgtggtagaagaaaacaatgactctatttcaagtcaggaacaaagtctactcgagaatggtggtaaagaaagcatcgaaacaacaacggattctaaaccaaagccttccaaacctgtcaaacgcaataagtggaccaaccaggaagttatgaagttgattaaactgcgaggacaactagatggaagattccaagttgtgaagggaagaatggccttatgggaagaaatatctaaagaaatgttgtctgatgggatgaatagaagcccgggacaatgcaagtctcgatggacatctctggttcaggaatacgaggtttgttgcccctccttcctgctttatgtcctttaattcactatctattatactaactaatacttgttttctttattaaaaggataccaaaagtggtaagaaaagcaacaagtcatggccatattatgaagacatggacacaattttatccgattccgaggcaatagcagcatagtgattggaagaaaagaacacagtgaaatgaaggtttgatggagtttttggtaaacattatttgtgaccttaaacaacataagaccagatgacaacttctcatagtagttgaatcattgtgtcatggtttcaagctgtgaaagaaaacacttgggtcacaactcacaagaacaaagtcgaaaagggtatatcatcatcaagttatatacattttttttgtagctataggacctctgtacatcgtcattaattggatagatgggcttaaggggtggagtggaattttgttgtgggggaaaattattaaagctgaaagggtcgacctttcttatagttcttataatttaattttctggataaagaaaattttaaaattcttattaaaagtgatgactcgagatctaattttgtttttactattaaagataaaatgttttatttaaataaaattaaaaatatttcatatcaagacttcgtttctgctttgtccatcattaagcttgagctcttattttttattttttttttcttaatccaaagtgtctccaatcttgactatcttttttttagttaaaaaataaattgattttatttaattaatatcaagtacgtacagatgttataagttcaaacaactaaaaataaaaatatgcatcaaatatgttatctattgtatttggtattagagtgaattaagacaggtaaccttaatattaaattatttatggatttgccactgcttattttaatgtttaaaatgctaagggatctttgaaatatttttaagggtaaataatattttggattttgtgttttgtaaaagttattaattggaccttatattttgttaaatgataaaatgaactttatatttttcaaaatagtataagctcaattttttaaaaattttattttttaatataatcaagtttaagacaatttctaacacgaacatatacagaaaatgtgaccagttttgccataacatctctagatcagattgttattaagttttattttgacaaaaaattaattcaaggttttatttgtacaattttaaaaaatacagagtttatcttttcatttaataaaatagagagttcaattgataactttacaaactacagtccaaaaatatatttactatatttttaatacgctcactgaagtaaatacaggagttatttttcctatttgtcctaggcatacatacacgctagctttttcttttttacgtgaacatttatctattatttagtattggcttcttctatttgtcctccttttttcttttactctgaaagtttaagattatctgatagctaattaattaattttagatttttaacacaaatataaacactgttaatgtaaatgaatgaacacataaattacaagtttcccctgacaatagaaactcattcaaactgaatatttcttgggtcctcaagaaccgggtaaaataacattcactatgaaatcatccaaaatacatttccaattatgattcacaaatcaaacaatgtaaactgaaatgatttcatacaaaagtaactaataaacttaattacaattaagaataaagatctaagtccccttatatctgagaagacaagatccctttgcttccaacaagctttcttcagcagatcagtctgaactttctttagacattgtagatcaacattccttcttcaagcctttatctaatgaattacaagctgaaaacacacagaatacacataaaaggattttgccctagcaaagcaagaatctctatgattctatcaaagatgaagaagaaattagaaaaaagctagatcaactttttatacctaacatttttgaataaccaacctaaacaacaaataaactaactcagccacgttggcaaaaagctaaacaataaatgcaacgaactaaaacctgacctagcaaaagataaatgaaaacagatttaacagatgcatctaacacaatcttaaatgcacaactaataaagctagaaaagatgcagctaaactgccaacagacaaaccaacaaccaacataatttgccataaaaaacatggcacttacaatcttccatttggaaaattatggtcaatgcaatcaacaatataaaaaagaaactaacaaaaatcaaagatgctaggctatcacaaaaaaccaatatctccccccattgagcataatgaaacactcccaccatggaaactatccatgggaagatgtctctgctggaaaaataataaaacatcaagatgctccccctagacctgaccagacatgtgaacactcaaatgggaaaactcctcttgaattgaaaaaaaaataacccacaacccatttagagataacccaagcccattaacacaaacaaaaaccaagaacaacaaagctcttccagattataacaaagacacatgtcaatatataatctatattatatacaataccttcacttagatgtctcactacatcagtaatctgaaccaagattacttgaccaaagaatgggcattagtgaaccgtactagcaaccactgattgaagattttataactttaatatgttgctaactgttttattcatagctatgtggtcttagttctctgtacaaaatgacaaaatccatccaatgcatcttctttgtttcatcaaaaacgaggacataagtatttttgaagaaaaaacagaccaacttggtggccaaaacaagggaccagtgcccaggttgacacctagtgctggcctagtgcccaagttgacacttagtgcgggcctagcgcccaagttgacattttgtcaacctagaaaaatttcaaagaatttttccgaaaagtcttttgggcatattctctattttcatcaatgattacgattcaagtatttcaagggagcaaatggaactatctaagggccgaaaattggacccaacacccaagttgacacctaatactaggcctagcgcccaggttgacataacttgggctgtttccaatcctttttccaaaatagtgttctggcatttttttcgtcatcagaaataaggaagatacaagtaaaattgaagagaaaataacaattacatgggcatcaaaactgagccccgcgtctagattgacaatcaacttggtgtgttggtttcaatcatccaaatgcaaattctgctacgagaattctctcgaaaatggtaaaaaattgggtgggagaccttgcccttgattttaagaaccttggaagtatcaaaacaacataccagaatctctgaaaaagagcacccatcacccaagttaacaaatggccaggtgcactgggttttgcttattcgattctaatttcgtctcaaccgtttgtctagttttttataatgaccgagagctatgaaatcataaattcaaattcacaactttatatttcacttttatgacaaagtgacttacttggaaactgaattatttcaagtctcccgttttcacaggataacaacatcttcgagaaatggtgactaactttacaagaatgtagaaactagttaagtgatgtcataatatcacttagacttcaaaaagtacatcctagacactatttttccttgccctaatgtccaggttgacgtcacatgttaacctaggctatgggagcagcccatccttcagtaaaacgatcataattcactcaatattgatccaattgattcgattcagcttgcgattcaaatctatttcaatgctctatcaactcatgtctcacacttgaattttaattatgaagttatcgactccaaattttaccctcaagagagatacgaatttaagctgcaacttacccgaagtcggtcacacgtatgcaattcaagctttaaaaattgatgattgacctccaaagttaatttcactattagatcgtcatctacactcaaaaatagcctaaatttattttttcatattttattattattttaatatggcctcctttcctataaaaggagagctccactagctcatttttcaagttcaaaaaagtacacataaggtcagagcatctctctctngtttctctctctagaaattagagtgccaagacttagctattttctgtaattcatctcgtgagaaataaaacttgaagtagacataactccattactgttgcgatacagggagtgaactactataaatcgttgtgtctatcttatttatacttacttataatacattctcgccaatctagcgagcgggtgtggccaaatttctgtgtctagatttttgcatcaatatgtacatttgtgtatacatgtacaatccatattggcagccacattagaccataatggttatgtgttactagccgcgtatgtaaaatgacaaactaacggaaattttgtgggacgacaccttaaaaatgatagaatagtagtttgataggttttctcaccaaaattagagcttaaaaggttgagtgcaagtgaaatgagagttgaaagggtttagctgccaaaaaatcataagtaaatgcataccagtataaataaatttgttatagagtcttttaatcaaaataatttttcttaaaaattaggttgaaccaactttaattttttagttgtatattcttcaaaaattcttcaataagctaatttgaactgtttatcaaatacctttataacaaaactttttctaaaaacaacatctattttttaaaaagttgtgccaaacatgcgtcttttatcaaagtaattttgtttttgttcaaaaaaaaattatgctaaacatgtggttttggatgcctcatcatagttggtcatttgattattttttttttgtcatatgtgaataataaagttgttattttctaattttgttgaaagatcattgactaattgtcattgataggcggactctctcagagtttcatttagtttagaaacctattttactttatacttttttgatgctttatggttggtgagttattagacccttagttgaggttgttgttaagatttttttcctgattattgtaagcgacttagtaaacctattattgtcgatcctgctccatgagttatattttcatgtaatgaattatgtccgatttgatttttttctctttcaaattgaaaaaaaaaaaacagaaaaagaaaaaaataaagtgaaaatgaaaagtttgtaagctctagaaaattaaaagagtaaatctctctctctctcatgtatttgttaagtaactattttactcaaaagcaccgacaaaaaataaaaacaaactagctttaccaacatttaagtgacttggttataaaaaaagaaaagaaaaatttaagtgacttattatgcatgttcatagtatattttatgagtaatttaattttggaatcacttaaattgcacacaattaattgaaactcaaattagtgcttaaactataactaattaagatgaaagttatattttacgagtaaagctttggactcactcaaattacacccattgaggtggtgtcattagattagtttgcaaccacatatataatttattaaagagatgagatatttatgtataaaatatactatttttgatgtattatttcaaagattgaataattaaataaaaataagatggacaagaaaaaagataatatattgttgttggatatatagaagtgacattttgttttaataaatttaagttgtgtaacttaatttgagtgtattcgaaacattactcatcatatcattttcaaagttgtaatgatcaagttttatagcttgctctgtattttagaagtaaaacaaggtgagttcaactataatggcatgatgacaaaacttgttcttgtatttttgttatttttttattctttgtattcatcttgaatcttctaagatagagaaagagattaaaggaaagaagcaacattaatgttgattgggtccatgagaaaaaacaagataatacattatgaaaggagataataaaagagattgaagtgatgtgatatatttttctatttttgtaatgttatagttggatttttgtaattagatataggggtaattacaattaaatattcaaaattttgagtttgtaattataaatctaataattctatttattttaacagcataaatacttaatgttagtaaaattaaaatttttattcaatttcgttaatacagatttcattttgaatttattaaaaaaagatttaaaaataactcatattacatgtttatgtatttattggtagtgatttcatataattaacctttctcaactttattataacgtttctaactttcaattaagaaaaaataattaaaagaataccattctatgattgattggcttagaaagctatattttgagatctttctttgaaaacaattccattcatactagaaagatataattatatcataaaatctgtgttttaaatttttaatgagcattttcttttgagacttaaattattttaatgcattgaatgattgattatacataacaataaattttttgttttattaattaaaataataataatgaaatcttataccaatttaattatatttttaaaatatataaaatttaatatagtgtagtatttatttataaaaaaaatatatttaattaattttattattttattgaacaatataataaataaataaatttaaatattttaaacaatataattaataatttttttttataaaatatgattaattaattgaattaatttttaattcaaattcaaattaagatatataaaaataattatttaactttgttgatagttttaaattaaatttaaatatttaaaattattattttttttaaaaaaaagacaattaattgattggtttaaggtattatatgaaccgttaacttaaaaaaataaacaaaaaataattgaaccaacaatttctgttaaataatttcttaacagaaaaaattaaaaaaaaatgataagatatatataaatatatatatttatatatatatttacattttttttcaatagacttgatattaatttcaaatttgttataagttgaattgttgctctgaaagaaagattatgagagtaaatacacatagaattgaattgatattggtgcaagtacaaattattattaatttaatttaataattattgtaaaaatattttttttagaatgtgtgggaaaaattagaaaggggtgaggggtattgtaaaattggtccatgtggtattctccaactaaattggaagctatggtaaagtatgtgtgaatttattaagagtttgaatgtttgaaaaggagaagcaacatatttgcaccacaaacaaagcaaacctttaatttttctatataattagctaacctcatttcattgcctctcttgcctataaatattaaatacttctctt

SEQ ID NO: 15234 - DNA, 4275 bp, Cannabis sativa
aaaaatcctatgtactgataaattagggagtaatatttaatcacgtaatcttgattatttttcactgtgtagacaacacaataatcatgaataccattgtgataagaatttaaaaatatatcaaacaaatgaccatgaatcaaacatgtgaaccaataattatattaaacaagtaataaaataattctcttcctttattaataaataaaattcaagataacattgaaataaagctttagctagagcacaaaactcaacaagaaagtggtctttataagaagaggagacaaggtcctgtctggaagtgtttttctagggtttgctagctcaacctatccactcaagttcttggctctatcatctgactaacaccactctagctttgaggcctttggctatatagctagatcttcaatgaaacatatcagaaggcgtttcaaagcataaatatagaaaaatgtcttgccctcacctgagaagcaagttttaatgggtaggtgcactgccacttcattatttgaagcttgaggtcaacctccttggggctgtagggcttgatttgttgtgtattggattttagtttttgttaaattttttcaataatggtatttatgagccattaatatcccacgaccaaattgtggggtttttgagtttcatgataatgtttctttatgtttcattctcatctaattgattataagtttttagccattgttaaaattgatatatttgatgataaataaagtaaacgccagttttcctttaacatgaaagtactgcggttaagaaagaatagcatttctaatgaaaaataaacaaatcttgaataatatataaattgagatccacaacataacatgaatcataattaattattataatatatacaaaaatattataacaaaacgaaaccaaggaaaagtatcaaagacaaagagacattaatgagtattagacctgaagtttgttttccattaataatgcctgaagatgttgatcttctgcctcgaattccacctggcagtcccctaacgccaccgctccagccgtggccacggctaccaccgcgcccgccaccaactcgtccgcctccacggccgccaatctttatgtgagtcccaatcttgtgatcatgatgagatttgaataatgaagaaagaagaacatgatgtttgggttttgatgatgatatttgattaggtaattgatttgtatccaaaacataagctgaaattggaagacaatattgaagtaatgatgataataatactaagaaaatcaacatagaaagataaacagagggtttcatatctcagattggtattattatatctttattcattaccattatttttataatatatgtatatatagtataaactaaattgttggtgttttaaaaattgagctatatgatatattacttataatatgagattgaattttgtactgcaagataaggaaggaagatggaaaggacaaaagagataggtagaatatattccaacggtaaaaacaaaataaatgggaaaatgtagggctgggggtttgtggttgtagttgtacgtatacatatatagtagagtctagtgtggtccaataatacaatatattacaaatgatcattcaatttttatacaatcatcacactggtttatttggataccaacttgccataatatgtattcttagataaggtatgatatcaaccacgtatgtggccaattgcctaaccagctcaagtttgtaggaagggtcggtagttgtttttatatatcatttttcatatgtatttaaatataaagaatatttttagtgggttgctacttgggttacaaaattctacgttcaaaattgttgaaattaaataccatatataagagtttgccaattaattttaaaataaaacctcctacaccttatcatatatatacttacctattctactaccttaactatatacacttctgccttttaacatatagggaaaagatcaacttaaagtatgagtacgtaatcttcaagattgtctataagaccgaaaggatggtgaagaaatcacattttttctcagaaaagaaaaatgaggatatatgatatcatgtttgtacaaaataatagatttgttgttatattaatttattattactgttactaacaatatattgatttattcgatagtgttatacttaatactattaactaattatgataacagaataataaataagaaaactaataatattagtgtatattttcaacaaaagttgtctcatatggtgcaactacaagagattatatatattgcaaataataaattattaaaatgagaagagacacttttaagtgatattccagcatgtaaattatacgtacctactctaataagctactactatatatataattagtgccatgttatttatacttaaattaaataaatatttatgtaacgaatataacttgacttaatgtaaacaatacaaataagactccttctttagcttattccaatttcacctgtagaaatttgcaagtttggcgagagattcccatgacacatgaaaatgtttgaataacttcattatttttcaagcgacacattcatgtccaatatcatagttatcgcgatgttgttataagagagagaacaacactgagtggataacaattgctagattcacgagtgttgagctagcgattgttatcgttgattgatcaataaagaagggatagtgttggcataataaaaagatccatttattcggattggatcgaaaactgatccgacaaattacttctgattcgaaacattcgaatacttatcgaattttggatctgatccgccccaccctgcctaattcaatctatttaaaaaaagaagaattggatctcaattccctaatttgagatctcaactcgatctcttctcaagcatcagctcattctcagaagtcaatctccattgactcactggccttccttcccaactgcctagtcgattatagctccagatctaccattgacggcctcgatgtctcaaaatcaaaggccaggaggcctgtggtggcctctgttccatgatccattgtcggatgggagatgctcatcgaactctcaccatgtacgacgagggagctactgagctggaaaagaagggagcaagagggaaatatgagtcttcagggttgggctttcttggagttctcgatttcagggtccatttggaccatctaccctgatgatggcttgttctagtgtgttagcgccaccgtccaagggaagacagagagagggaaggaggtcgggtttcagggttgtgaggtttcaggggttgggagtgcggaacccgaggtccgcctaaagtgggaaggccagagaatggtggctctgatcttggttctggcactacacgaaagaacgaaagtgagagagagagaggtatcgagagagaaaattagggtttgaaattttaggatttttaaattttctacttatgccccttcaaattttacccacagttatttattttattatttcatttaatagctaaaaaaattatattgtgactaaaagattatcactaaagataatttttttagtgtgttttcaaattggattaggttataattatttgtgttcatttaccttcagttttgatttcaagttcaattattacttctaccattaattgaatctatgttttgatcttgaataagaaatttcaagtgatcaatttatttaatcaaatgtttgggatctattaataaattataccaatgataatatattacctgataaaaagtattggcacgcactcttcgagtgagtactaaattacaaattctaataaaatatttttttaattctcattcatttcatagataatctatttgtgaaatagaattacatatttatactagttaggatatattaacaatttactaattagtccccataccacatttatgtaacacttcaactactacaaaaaagacatttcctgttagtaaaaaaaattgatattttttaagcaccaacagtaattaaaatgagtgactgatatccaccaaatgctcttgtatgttattagcgtaagttttttaggatcgatcgatatggattcttctctatttataattgatactgaaatgaaaacacacgatttggcttgagaatacatatcaattttatatagttatttatatagttggcgtttggtaatacttttttaattagttttctgtttttaaaattgaaaaagtgaaaata

SEQ ID NO: 15235 - DNA, 8480 bp, Cannabis sativa
gaaatccaactaaagtgtaccataatgcctactagaggtgcaagaaggaaaagacagtgtggctctcttccaaagtgctctaggctacgagaatgcctgaaaggcagccaataagttagggactcattgacccatctgaaggtacttttgcctaatgcaggggcttctaaagtcagctactctagtacttgtaagcccctcttacctttagtttatgcaccccaaggttgaaagtatgctcaagtcaagtccacaatttaatgagatactccataggtttagtacgccacggtctcattgagaggatagagaaaaacaagcattgtttgtatctaggggattttttaggtaggtcccgcctacagttagagccttcgctaccaatcctattagataataattctcatactatctctagcttgtttatccccttagataaatatctcacgaaaaatgactccacatatatgatttacgcttttgttaagggatagttaaagcttcgaggtagggactatcccttttatataattgacctttgctaatttatttatcatgttctcgatcatctaggttgtgtaactagcactcgttgttgtatgtcatgttctctcatttgatcatccagcaagtgttagttatacaaccatagatctcgacgcaactgagaacgcattggttgcataataattgaaagtggttgtgactcaaggaggcccaatccaaaagtattagaattagtaggaggtcattctactagagtaaggggatgaggttgttcccttcgagaaccgatattctaagcgcaaagcgcgccttctgccttccatatctacctcatctaagaggtcatgcactaaggctttagccagccaaaccagatcacaagggacttcaagtttgagagatccctcctgaaatagctcaatttccagagattttacatatcctacttacgcctattcatcgagatgatgctcacatggacttgaggttgctaggcataacgttaccttggacgagatgtccaaggagaatgtttaggaaacttttctggccaaatggattaacgatcgacaagatggtaggctctggggtgtataaattaaacttagatccctaaccgactcgtcgtaggactatgttgcgtcagaactacttctattggcctttgagatgatcagtagtctggctgctgagatggtgcatgtctctaccaggaaaatttcaacgtgtgcctcagtcgaccccatcttccaatattaggacctgagaaattgtcttgcctctgtaaaatattcaaaaccatctgtcttcattagttacccttattattgttactaattgtttatgatacaggcttctgcaaaagaggtcttatatgagaacttgatcgacagggtcatgccatggcaacatcagatggtcttgttttggtccagggaaagttcaagctagcagagaaggaatttgaggagcttcaggataacatgttgtcagagaaggtgttgctggagcgagaccagaagaagccatctaatcttgaggaggaattgagtcaagtctcaaaataactttagcagagccaggggaattgttggcatcttaataggccttcatttaaaaagaggtgaatttttccaaagcatagttggaaatgaacaataccaggggaaaacttgacacaactaagcaaaggtgcttaaggttgaggagcttcatgctgctgacttacagagtgtgaccactatttctattgagcttaaagaactttgaagcctctgggatgctaatcaatcgatccaagacatcacgaacatgaattcacctcctgttgtaactcccgtcacatgccaacattgcgtgaaaggctatgaggatggggtgtttatgacctagaaggccaatcgctttgaacctctctttcactttctagagaatcctaaggaggttctggagctcttttaggagaagaacaagaagcttgaggcaactcttgctaagaaaataggtggtcccaagttgcctcctccagcgtccccgaaaaattgaatacaattcgcagccaaactcttgtgactctttttctgtatggtcatgaggtcttttttattattatttttgcacgggcgtgaggctattttttcggggtggggtaaaattttagcagttttttcccttgtcacttttagctatatttttattttgttttcgtacctttttaagataatgcgaccaggtggccttatatatctccactttaattataatttcttgagttcttgatctttgtgtaaatttttggcatttactaagtttaatatttttaattcaattttaccggtgcaggcaatttgtcgccctggtgctttagtgttaggttttaggtctaaagtcacttgtcatgccctcaagtttcgtttacacacttaagaaattttatatgatattttggtcacatcactacattaacaataatatcttgatcactgctacccacaaaagttacacaaaatttaaaaataaaaacaaatatggtctcctactcatttatagtacttgcaaagatgtacaacattttaggatcatgggatcttggttccgtccaattgcttgaggtgatcctagagcatattttattttcaatctcgtaagggccttcccagttgaggcctaacaccctcactctgggatcttgtgatgcagggaagactcctttgaggattgagtttctcaccatgaattttttgtcccaaaccttcgaattgaagtacttttccacttctctttagtacgacgccaactgcacttgtgaggcctcatgaagctcttcgattaggtctagggaatcctagaggagcgactaataagttgttgggtcataagtggttctttagtgggacgatatagtgttttttattaggttaaaggaatcctataggagcgactaatttcagctcctatcgttttgaatatttaatgataagttttaacaaaattaaaattgataaatctatagttgggagagatagcacagttgatatatgattatacttatatatataaactataattaaacttttaattaaaatatattaaatgacctgcttatgcacgactattaaattacacattaactagtacgaggtttatgttgagatcaagaatgaatactttaccaatttatttaggatagtatacctttatttatatattgtaattaattaaccatgaacatgcccattcaaaaataataagaataacatgaacaagtgagcgtgtgtagcttaattcgttacaccattgtaacatgtatatatatagttatatagatatatgtagagagagagatatatatattatatactaaatgtacatataacattattgttgggggccgtgatgaaaaagcttcaattgaaaaggctatggaggaagagagtagtataatatatgaaaaggttattgatacatgactttgcttggtaagaggggttcggtataattctaaagacaaggcaagacaaatcgaatattgattggggaacacaacaaattatttaatcaacacactactcacttctttaacaacttctttactcaaagaattgactccaacaagacaaggctctctctaatgtttttaactctactgggggccaataactgttactttttctttttttttctctttttccctttcaataaattctttttattttcattcttttttaaaattaaaaaaaaaatggcatcagaacttctaataataatgtctaattttgtgtatttatatacataaacaaaaccaatgacaaagaaatctttttggtctgacttgtgtatgacccattaagctcccctgaaattattatttttttttcaaaaatatgtttaaaaaattatcaataaactatactccatttaaattatatataagttaacccttcactaaaattaattacgacagtaaggcatatttatatatgcatgagacatgaaaatttgatgagctggcatgtcctaagataacatgaaagtaaaaaagtctcagtcaatgtatctcatatattccttaaaatcttgtaataacaaccaaattaatacataagtacaacatataattctttactgaagaatatagtaacatgagaatacattactaacaataacaaaattccctttgtctgagacttactcaataagaagaaaaatgagaaaaagagaattttagtaacacaagacaagcatatataaatatgaacacatatatctttactccacaacaatttgtaaagcaaaacaaaacccaaacagcaaaacaacaccatacattgctcagtaacaagtgtgtgagaaagagaaaaaatggaggctaatatggttggactacccaagcacgagaagaacattgcttcaagttttcttagacagggtcgctcgaaccgtgcacacactggcggtgtaaccgacgacactgagttgggaagaaaaatccttgccacacatgaatccaatgagcgtggtttttatgtcaagcctgttctggctgtcattggtgtcatattcaaccgtgcaagtgaagacatttttaaatttacacaggtactttcactcataacatagttagttagtacttgtatatagcaaatttgttgctcatgttcaataatagtaattatatgtacatacataacagggctcgattacacaatgggacattgctgtgactgatgaaaaggtggttgatcttccaacaagggtcattagtgcaatttccctcgaggtaataaaaacaaaaatgagaatgatttcatttcatttcagtaccctcaatttgttcattcatgaatgacccttttgcatattatggttacagatatacagtaagtgctcggctggtgtagatgtgcacacaattgtcctagacgtattgcagctagtcaagcactacagctgggaagtgaaggtgttactagttttggtaactttaatgatcacttttggtaagttcaggcttgttgttcagaactacacaactaatccactcccaaaagcaattgctattcttaaacaattgcctgaaatattggagcatctacacgatctgaaaccaacacttgatgcactctttgctcttattggggaaattatcgacacaaccaacaaacttgtcgagttttatgatctccctgagattattgctgttgatgctaatgttcccactgttgtttattggaccatccgaagcatagtcgttgcttcaactcagatgttctccctcactggctccttaccaatcgagtaagttcatgtgattaaaaaagataattttttgtcagaacattctctctaactttcaagtgttcttgtttaagtctcttgacagagtcatgggagctgtcttccttggctcacaaactcaacaacatcaaaaggcttcaccttgttgagctactcgaacgttgcttaacaatcatgcgtgagtgtctcctgacataattcatccaagtttatctatacatatataacaaaactaacattatatttgtgtaatttcagaggagaaaagagatgaagaagcattcagggagcttgaacgtattttcacaacaccacaccttgacaacacaagggctttgtctactttattccactacaaggatggccagccagcactctatgattgctacctcaagagaaaggtttgcactttgcaccaccaaattctaaacttttatcttcctacttaaaccatttaatgactacaatatcatcctttactataggttgccacagaggaattgagcaacaagactgtagccttattcattacagatatgaatctcaatctccaacgtgggcaagaatacaaaatcttggaacgaatttaccaacaaaagaagcatagccccatgaaaatggatagtcactacgagatagtttgggtaccaattgttgacaattgggatgaagacaaactcattctctttgagacactaagaaatcaaatggaatggcactcgattgaccatcattcggtggtgtcaacggtggtaagaaggtacatcaaagagaaatggaacttcaacaaaaagccgattcttgtggttatagacaaacaaggtgctgttgtgcaccatgatgctaccaacatgatatgcatttggggaaacactgcctacccttttaccatcaatagagaaaaattattgtgggaggagatgagatggtccattgatcttctcattgacaacctcgagcctaatttgaatgcttgggtcagttttttttttccttaatacttgttctttatctttcgagataaagaaaatgcttatatgtttgtgattgtgtttcagattcaagagggaaggcacatttgcctgtatggaggtgaagatatggagtggatcagggatttcacaatagctgcaaaaaaagtggcaagagatgctgggatcagcctagagatggtttatgtgggaaagagccaaattaaggagagagttgtgtcgaccattattgacacaatccacaaagagaaattgagcagaactcttgaccgtgaccacattaattacttttggttaaggttgatgagaatgttggaatctaagcgtcaattggccaagtttgaaaacacaactcatgaccacatactggaagggatcactgtgattttaagctatgactctagtgattacaccaaaggaaggtgggctgttatgagtaaggatattggtactatggttaggagcaaagggacacacatgctcaaagccttgactgagcacagactttggattccgcggcagcaggagattgggttcgtccctgctttagatgagtacctcaaggaccatgtccagccccacgagccacaccactgcaccagcctcgttctgccttccagtggtgccttgcctgatgtcatgaagtgctgcgattgtggccggctaatggagacttacactttgttccgctgctgcctagaatgaacttgacatggatttttttgaaaatggctatgcttgatgatgatgcttcttattattattactatctctactactattattgcttataagcaatcaaaataatggcaagaagaccctaataaaggtcttcttctcttcttcatcatctatttcacttctcttttttcccttaattgttgtaatcgagaataattatatgtgtaagttgttttgagttaaatccacttgtttcttgattccaatgtggcctcttacattaaaatttccaagaggattcgtttcaaaatgtaccactagcttcaaaattgatttattcttccaagacatgaaatattctccaagttgtaatatgataaataagttgcaatattcctaagttcgatagttgcctatgaattttgtttgagatggataatgggaaatatcttgagcatatagcagcgatatgagttggggcattggttaaaaacttcaaagacgagcatctcaatccatcactagttcttaatcaaaaccctcatcactcttactcggcagcaacagaaggcaacacaaaacatccacggtagcctcaaaaccctttccattctttctcaagcttaccctattatctcaaggtagcctctcaactgtgtttttgtaacaattaagatcaacaaatgacaaaagtaatcaactatgttaaggtttaaatccattgcttttctattccaacttggactcttagagcaaactaaaagggtattgtgttttgaattcatttcaaaatttaccagaagacaggtaacaaagtgcaacaaaaaaattagtgcacactgctgtttaatactggcttagaaatttatttatgcttcggaaacttgaacatcccctattttaatagaaggggttcaccataagaagcaactagaaaaaattgaaaataaatatatgtatatttataataaaatgtgacaatctcaaacactaaaacaaactacgaccaattatattgcgtagatgctttatattaagatgcattttgtgagattgaagatagtttatgctttcgttgacacgtccgtctgggtttacagaccattgatgaacgcaacgcctatcaaaagcaacaatatagaaaacaaaaaggaaaaagtaaatgagatttgaaaaccccaaacagaacaaacctatttgatgctgtttcgctcgcagagcggcgcgtttgatgttttgaatgactagggcttgaagatttcagtcttgttggcttcgatttataaagacgaaccctccatggtaaatgaccaaaacgcctataactcacctcatattgttttcaattgaagaaagcccaagcccaaaagatcataagactagactagtggtaaaaatggggaattttacaaaaatactgcttttggaccaaaactttacaattatactgggacacggcaaaaataacatttttactgccccagcccaatttcattacttttg

SEQ ID NO: 15236 - DNA, 10611 bp, Cannabis sativa
catttcatcagctaacccaagagctagccattggttagcatcttttaattccccagcactaaccgatttcccaccagttctgtcactgtagctaaagatcaagttgaaatcaccacaaagagtccaaggcttgaccggcatgtataagttagccaatctttgccataatagggccctttcggttattgagttactaccatacacaaacgagagacaaaaagactcatctagtcctgtcatccttatttggcaatgcacaaattgggcggactctgccaatatctcaacattgacaaatttatttaaccagacaattagaattcttccttctattatggggctggtgtaatggtcccatccatacaaggaagtatccataatgtccttaattttattgcctctaactttagtctccaaaattgctccaattcccaccttattactgttaagaatttcccttactttctcttacttcttttgcctgttgaatcccctaatgttccagcataaaatgttgcatctatccatgaacaataagaggatcagtgctgtcttgcaaagcactaaacatatttccctgcttccttgccattcttttctgaatacggttacttttcctttttggaagttcccaattctccacaatacaatcttctaattgactctcctctggttgcttaattaacttagcagacctattcaaaacatccttttctcctccttggtcaatctgttagtgcaaacaattccccacttcattaatgacatcattttctaccaatatactggggctcttctcaagtactggtaatgcctcttggtcccttaatccttctagggtcttattatctttttcctcaacttgtatagtggatttgggacatcctagaatgtcctttgtttgatcgacaaacatcagccctgtgaccaaacccaccacacttggagcattttgtgggtaaccattcatactcaacagggacagtatcaagaactccccattcattttcaaattctatagctgcaggaacttcatctttaatctctatctccactagaactcgtgcaaacttcacctgggatctttctttggttatgttgtctaccataataggagtaccaatagtgctaacaagagcactaagacagttggtgccccaatattgaagacccaaaccaggaagcttcacccaaacagacacaaatttgatcaatttcatagaattaacctcaggagtccaaggtcgcatgataacaggcttgttatcgaagtgcactacccctgcctcaaggacataatctctggtggcttcatccttgaatttcactaatgttacaccattattcattctggcaattttttcaatccctaaatctccccaaactcttctagcaaatccctcaaaaactttaatgggtggattagcacccataacaacacatagcattgctgttttctagtactcagattcatattcaatttcagttaggtcaagcttagcaattaccttgccctcatgttttgccggaggagtgaagtgaagcttagcaaccacataattggccttcggcgctagctttgcccagagattcgatgcctcttcttgcaggttcaaaccagaaactccattcgtaggtggctgatgagaaccccttgcagattgtagtttccgaccagaaccaccagtcgcaggtacctggagagatccctgtgcaggaactcgagcatcttcttcttcctgtaacaggagaaaattcccatccatagcatccataaactcagctgatgaatcttcagtcatcacagcttcttgcgcatcgtgaaatcgagctggaagtcgatcgattgaacctaatcttgctggcttctggttcgaccttttcttcttcattgggagagaaaatcgcacctcacgccttaacctatgtagcttttaatgatatgtttaattttcaagagaaaatactcaaattatagcattactcataatcttacaaatcagacccgaccctacacaaagagccctaaaattaagaaaaataccatttgttttatatactcaaatatccgaaattatcaactttatatatataaaaaaaaaagggtgtatacatatttgataccttatatttcatctaaatacaggtttgcaccttatattttaataatacttatgtgatattttgtgttttaaaatcatacatatttggtaccataaactcaaaaatttttgataaaattttatcaatactataaaactgtcttcaattttataattttgaattcaaatttaattatttgattacatataactaaaaactgtttgatcaaattaataaaattatattattatattttactttaggataccaaatatgtacaatttcaaaatataaagtatcaaataagtattattgaaaatacaagatactaaatgtgttttttgaaaaaaatcatgatactaaataagtatattctcatatataataaaaaattgaaaactaacatattttgtataagttctctcaccagcgagagtcggggtctgttattaatttatgtcttataagaatggaataagttgagaaatatcttttttgtgtatctattaatcaaaaataccttcatattatattttattaaaatatacctacttttgtgagtaagctacccaatataccctcaccatctacttaagtctagaacataatttacattaacttaaggggtataattaggacatcatctataaaagtgggtctaattttaaaaatataaaaataaagctaaaaattaaaacatataaagtaaagtaggtatacaatgtaatttcctcaatagaatctatatatgtaatgaaataagtatcatcctatataatataggggattagtcccacaaactataaaaggggtgggcaacatccaatccaatccaattgaaccgaaccgatccaatccaatcaaattacaaaaaattagatatccagctataattggattggattggatgctaaaagttagattctaattggattggatcagttattaggtgtcaatctcaaaatctaattaaaaaactgatccaatccaattacatttatatatattaaaaaattatttatattgatttatataataaaaactaataaaaataaaaaaaaaatatattaattatatttttagtgaatttttttgtaaaatttgtaacacttggttgttctatatatttattttcatgatgttttgttatattttattacttgaaaatattattgttttaattatttcaaatgtttagttacattacgcttgcaacaattatatttttatggagtattaaacttaaaaattaatggtgatatttatatttaacgtatttatcttcatatttttaagttaatattaaaaaatcgatccaatccaattagtataattggatcggattagattagaatttgatgtctaattggattggatcggatgagaaaaaaaaatattgaattggattagatgctcacttctactataaattaaaaattgaaattacttttgtgcttgacttaatgtgttgttactaaccttcattgattataggaaattacaacaaacttttttttttcctctttctttaagtttgataaaaatgagatttttaactttgtgtgttgccttttctaaagttttacattttatggaaacttttttccatatttaatatttttttcttcagaaattgataatattggtttttatcatatcaatttattattattatatatataaaaaatagtgaagtaaacacactgataatagtagtatgttattgttgacctccaaaatttaccaagtgtaaattttagaatcctaagtccgaataagaattaatacttgaaaagtattaactctaacatttgggatgcaataaatgtcgaagttataattataataagaggtaaaataacgtgacaatcaaggtgagtcctaagaggtaacaattctcagagtagatgacccaaggagtatatggcaccaaccactttcctctcttcttttttctttctcactccttggtgctccaacccccttgaccccgccaactactttcctctcttctcttctctttctcaatctttagcgccttcgacccccttggcgttgccaaccactttcctctcttttcttatcttctctttctctctccttgacacctccaacccccttggcgccaccaaccatttcctctcttctcttctctctttcctctccttggcgccatctaccatcttcctttttctttttctatctttactattttctctctccttagcaccaaagaggtcttggctccaagaagacttgaatccccttcttttcttttctttttttctcattcaataggacaacaaaacataagtctcgtgtcttgaaggggatggactaggtaccaagcagtaatgaagcaaggagcattaaaaggtaaaacaaatgtcattttgagcgtgtcatgtactcacctgacctatgcatccaacaagtagtagtgatagagtcatacacaagggaacctaccgctgggacaatcaagtaccccgacaaccacacctctgcaacaactacccttgcaaccacaactctgatattcgagggttagaaagtgtaccatgtattggccatccttagggaccccgaaaatcaattcgtaacacaaggtcagtagagcctcactataaataccattctctttcattgaagagggggttgaaaaatcactgtaatacttctccctaagaaatacaaaggcttctcttactctattattgttctaagcttcaatcttcaagcattttaagttatattactctttgatttgataacttaattttggattttcgacctttaattcgttcacgagaatcattcgtcaataatttggtaccatttgtgggaaagaaaattccatagctacgttttcccttagtattaatcaatcatcatgcctagacatttacaacatccccaagacaatggagttcactcagatgacaatcactggtcaccatcataagagaacatgtaccttccatttccatagaagaccaatggaaaaataaccaaagtgtggactgccaagccaatgctcaaaaagagcccctaacgggtgtgcagaaagtcacccaatctaattacaaccgacttatccaatcccaactgacctcggatatccaatcataattggattgtatcaaatgtaaattttaaaaatctaatcggatcaaatcggttgttggatgagacatccaatccaattgataaccgaccgaaccgatctaattaccatctaatggtcatctaattatatttatatatttttaaaatatttttataattttatatattttatttaaaaatttaatatacatttaacacatgagattaaagaaaaaaaacttaaatttaaaatattaattttcatcttcctaatgccaataaaattgtcaatacgtattgaataagttttttttttttttttgacaattttattatgagatcataagaattaggttggactaaatgtatgttgaattattaggttttaaattatatttgtatacatatatttttctttttaatgaaatcgacttaaatggtagctaaaatggattggatccatccaatagatccaatccaatccaatagaaaaccagtcaattcatccaacgattggaaccgatccattccaatacatatattagattggatcgatcgaatcagatgacttaattagattggattggatcggatgacaaaattcaatatccaataaataattggattggatcagttgggtctaaattcattagatgtgatacaatgaacagacctaaggatcactccgtctaaggctctctcaagtcgaatggagccaacaactccaccatttaataaaatagaatattccacaattgaaatacaatccaaatttttttcaatgcattcaacatgaaacctcaacttctccataatctttgccaagaaagaccttcacctgatcataagcttttgacatatccaacctaatagcacaatacccaaatgtgatacaaaaataacctttctatgatttttcttatttttattataaatatttgaaaataaaaaatatattacgtaaattatatttgaaatatagaaaaaaaaaatccaatagagcaatatatctaaatatggtaaattatttaaattaattattttgttgtaagtgtgactatttttttttctaaatatgtttaactttcttgattataatatttaagccttttgtcttgtatatgttctctatcttgaatgtaagtcatcaattttaaatatattttccatcttggatgtaagttatcagttttgaatgtaacttccatcctagatgtatgtcagatccattttttgtttatgtttatgtgtcacatcctgtgtctgaggtatgtcatcccatataaagtatgttattcgattgactgaaatatgagtcatcccgaccgaccgatcgagaaataagagtcatcccaactgaccgactgagatatatgagtcatcctagccgattgaatgagatatgagtcatccgatcaatcgattgagatatgaaagtcatcccgtccgaccgactgagatacggagtcatcccgatcaattgactgagatacgagagtcattctgaccgaccaactgagatacgagagtcataccgaccgactgactgagatacgagagtcatccctatcgaccatctgagatacaagagtcatcccaactgacctactgagatacgagagtcatctcgatcggccgactgagatatgagtcatctaaccgattgactgagatatgagagtcatcccgaccgatcgattgagatacgagtcattctaactgactgactgagatatgagtcttcctcggcctgatctgagatgaaaattatctcagatcaattcgaattaaatataactttgacttgtccagtgaggctacactctttttttttgaatgaagtgaggctacactcttagttatatatattcatgtatttcggctcctaatcttgatcttctcaatctttcatggactttatctgaatttatttattagacttttttttttttatgtttttaacaccataggtctcttgttggtccattgatttttttcccaaacaaatactagtgctcacaatgttgctagatgggaattagaaatgaatgttgctagattcattgaggattcctcaatgtcaatggatatatcgtgtaaaacaaaattgaatctttctcacacgacttaatttattttaataattaattcaactataattaaaatttttgtcctttaaactttgacatgtactaaattatatttttttaactttttacgtcgttaaatatttttcctgaactattgaaattgttagatttaatgacttttgtctaatttcattaattttgctaacatgacgattgtccatatactaaatcgtgcccccaaattttaatatttactaaatcatgcccctgaactttaacatgtatcgaattgtgccccctaaatttttatccacgtcaaattttctttagtcaaattaaacaaaagtccttttatccaagaatcttaatagttcgagaaaaattttaaacgaccaaaaagatttaaggagtatatttaatacatgtcaaagttcaaaagtaaaaatctaaattaatgctagcatatattaatagttagtacatactaccaaaaatactaattagtgaaaacctagttttattcactaatctattacgagattaacaatgcttattaatttctatttgttattaacaattaatcaatcaaacttttagtattatttgttaggaccaggtgctttagaaagtcattatacttaatgaaatttaccatatttattccactaagtaattacataataactatgcaactgatagtaattaatgagtttaatttacagtcatcacttatgagaatcacgtctaattataaaaatttataatttttttagataattaattaatttgttttatataattatcaaacatgaaaataagattaatattaccttatacgggtaatttgcactacttaatacgaaataaagtaatggtatttaatattatatagctatatgtatattcttattactaaataatattgtactttgcaactaaggtataagtaaaactatttttctcaaaaaaaaaaaaaagtaaaactatgttatacatatgatgttccttgttctttttctcacgttgtcaaccacgaaacgatgtcgctttatgtgacgacgacaaaaaataaaaataaaaataggaagagtaaattgccaagcgcaagcgcaccgttcctccagaaaaaaataataaatgaaaattaaaaaaaaaaggaagatatatcaaatggttggctgaggagtgaggagctttaattttttttttcttacacaatcacaatggtatgaacgaaaaataacgccttaatatttcttatatgcattagtgaaggtaaaggggtagtgatatatgtccaaaaatggcttcactctgcttgaattctttgcctctgccaccctcttctcagtctcagcccaagaaactggtggaaacttcattattttcttcagtgagctataacagtcctaatggccttgtcaaaggaggaggagagtccttaaaacctatagtcataagtgggaaccccccaacttatgtttctgctcctggtcgccgaattgttgctggttcggtttcctacgttttaatctttcagtcatttgtttgtcactactactactactacttatctttgtttgaaagaaataaaaaaacaaaaaagtattttcctctcctttgttgggtacttattgaagttggagcaaagttcatttctgaaatttgtttcttgaattcacaacccagaataattctaatactaattatctattgaagtgttttacatggattctacacagcttgtttatgagtttttttttttttttgttttatattatacatatgtagttggggatttgcatggagaccttgaacaaacaagatgtgcacttgagatggctggagtgttgagtgacgatggtcaagacttgtgggttggtggagaaacggtaattcattgttattaactttttgtatgtgtaaacaaatgacaacttgaaaattttgtccctttgctttaccttgcttgtttgttcatcaaaagaaaaatgtttatttatgtcaagcttgtaaaataatgttaattgtccttgtaataatctaggtgttggttcagcttggagatatacttgatcgaggtgaagatgaaattgctattttatccttactgcgatctttggatatacaggccaaatctcaaggtggagcagtttttcaggtatttaaaaaatgttcatgttcatggctactactaattatcataaagtttgaatcattgaattatgagataagaatttgtgcccatgataacaaactttatcatatacttttttctgaacttcatttttacttttgaaaatcaattacatgatgttctttgttattatgatataggtgaatgggaatcatgagactatgaatgtggaaggggattttagatatgttgatccggggtctttcgatgaatgtagtgattttttagaatactcagatgaatatcaagatgattgggaagaagcttttgttaattggattggcgtctcctctcggtggaaagaaaaccaaaaaagtacccaaaattattggggtccctggaatatagtgaaggtagttatgtttttgttcaagcaaattattgtctttcatatttcaacgaactgaaactttgttatgacatcaaggggcctttgggagtgttaaaggcctggcatgacattataaagcaatgaattattgaattgtttgttggtgaatttgttatctttctatctaattaattaccattttcaatattttgacatggtcactaactaagttttccaaatattaggacagagacaaaagggagtgattgccagatcaattcttatgaggccaggaggtaaactggcatgtgagttagcgcgacattctatcgttcttaagattaatgattgggtcttttgtcacggcggtcttcttcctcatcatggtaacaacagttttgcagttttagtgcatttattgatccccataatatgctcatgctgttcaagaaaaagttgagtctttacatgcctaataagagtgttggtttttccacagttgaatatggcatagataggatcaaccgggaagtttctctttggatgagaggtctcaatgaaacagatgatggtcctagaattccttttctagctactaggggctatgacagtgttgtttggaaccgcttgtactccagggatagctcggaattggaggactatcaggttgagcaggcaagtaattcttatatggatgctttagaattcgggatgacataactctgattttaattgaaaatttactgcttatctaaccaattttcatctgccttttcattaaa

SEQ ID NO: 15237 - DNA, 9976 bp, Cannabis sativa
aaaatcttgtgtctctcatatatatacttaacttataaattcatactcgccaatctgataagcagatgtaatccacaaatttgtgttcattaagagagatttttttaataaaatatatttatttagtgagatatttagtgtaaattattaaaattattgcccaaaaaataaaatattatacactaaattaatataaattttagaccaaattaatataatcattagagatggtcttatacacttcctaattctaccatggttatgtatttacttatatgatggaagttgatttatttgtttagtgcaaaagaatacgtggggagaatacaattctttttcatttataatttttttatttcaagtttcaaatgaccctgttagaaattaataatttaataataataaaaataaagtattaaggaatgttgggatccaatggtagagaaaggagcattgatcagcggctgaaaaagcagttaagacatatagttgtaaaattaagagctcgcgctctttctcatcttatttcatttctccagttttattttatttgtagcattagaaatagtcgaggaggagaggaggaaggaagagagagaaaataataataataaaaataacatcttttgaaggtggtggttgtggcagtttcatagaaaaccaaaaatggcgtacagaagaaggcaaggaatcacgagagcctcaacctttaaagaagaaattcatcatcctctaaacgatgtcgtcgagaatcattcatcttcaacctcttcatcttcttcgtctcttgctgctaaagccattcgagcttcctctgctcttcgtgaaacctccctctcatttgatcgtcaccggatcgatccaaggtttttttttttcttaacattttcatggatccgtttcttccgtttatattcgttgaaaatttcaagatggggtgtgatcctctgttttcttttctttttttccttaattgtttttggatctgacgaaattgttagtatagaatgaatgaagacaattattttgcttgtaggaatttgataagtatggagatgggtcaattggagatgagtcgacaaatgggttttggggtgttctggctcggaaagccaaagccatactcgatgatgatgatcccggttcccaacaacattatatgtctcccaaaaccacttcacaatcctacaataatcccacaactcaatctcaggtatatacgaattatataacaaatagttcctcacaaattttattgtatacacttaaaagtgttcataaccccatcaataaaatcttaaaatgtgctgatttgaacatgaatgagaaaaacagtttccggagcaatcagaccaatcgaatgagaatatgaagaaaggggataatcgtaagttccgtaagggcttgaatgccctcaccacttcccttaatcagcttggggacacatttgagaaggcatttgaggtatatacaaatatctcatattctgatgtttctgaggtcttgttactttttttttcagtttatattcttcaacatttattattttatgaacaatgttaaatattatgaaaattaaggtatatttattgtttgacctttcatgattctgttcggtttacgtcatgagtctaagagtatctcaaattttgaataaacttcttaatacaaaccaaagaaacttgtattttcaatcatagaagtagcctctgtttggttactttaaaccaaaatactcaatttgtttgctttgaaattgattgtattgtattatgtttcttatttcaggaaggtcgaacaattgtggagaacaagacggcagatattattcaagaaactcgcaaattgcaaatgaagcgacaaggaagcaattccgagtcacactatcaatctctttatgcaaataatagttcagggcagcaacctcagcatcacatgcaaatgcagccaacacagcctcacactcaaaccaaccacgaaactcaactcaaggcatctcgcgacgtaaggtggcaactttgttattgtttatgtgtataacttattgctctgccgctcacacctccaaacattttaatctcaagcgactttgttttattttctggttttttgattcaaaaagttccaccactcatatttctcttttttattactcaaacatgacacaaaaggtgaatctaaacaagatcaagatttaatcttaattataaaacaaataaaattatatattggaaagcatatgttaagcctgctacaatggtgagagagaatggttttgtgtaagttgagtatcgtctatgcattagtataggcctgctagtgttttaccctgaactcttttatcttaaaattatcagtagaaatgcaccttctcttgttctggacgcaggttgccatggctacagctgctaaagcgaaactactacttcgagagctgaaaacggtgaaggcagatctagcttttgcaaaggaacgatgttctcaactcgaagatgaaaacaaaatccttcgggagaaccgtgagaaaggagatcatcgtgcagatgatgacttggtatgcaaactcactctttcttctcttaacattgaacaagaaaactggctgcagactgtttttttatagtttctttgcttgattgattggtttgattctcttgtataaattttacatgctcttgtatgtttttgttttcttcattatttcagatccgccttcaactggagacactattggctgagaaagctcgtttagctaatgaaaattcaacatacgctcgtgaaaaccgcttcctcagagaaattgttgaataccaccagctgacaatgcaggatgttgtgtatctcgatgagggcagcgaagaagttactgaagtttacccagttcctggttcctctgtagtttcaaaaatgatttctgtatccccaaggtcatctacgtcagattcattagttcccgaggaagactccgcaaccgatgatcctgaagagactaaggagatgtttccccttaacagacagagtcaagaaactctggatgtttttgaagagaatgagcctacaacttccgacttattagtcctggtggaagaacctactaagagacctgaatcttctaactaaatgttgttctctgttttgattttcataccaagtttgtgcagcatttattattattttttttttttgtgggttattttccctgcatttagggagggtaggtttggtcttggcggcagttattttatgtaacatttctttttcatggcttgtttagttcagtgtacgatgaaactaaagcatatattgtcagtgctttccttgttcatgagtgccgtttttttttttttttgcttgaagagtgcagagtacttgtacgttgaagagtttgcaattttatagaaagaaatcaggacttttgagtagatagattactcttgaactgctcatgctgtttaattatttttctttagacataaaagctcaattgtcatacaatctttttttctatcaccccgcgtaatcattatcttgacatccaacatcaaaatagcattcaaaccgtaatgtaacaaacttttcaatctagttcgttaaccagtaaatgttcatgtgaagacaaaagaataagtttgactaatggcttaaacaagtgcacaacttaatactaactaaaacgagctttacaagtcgtgaattcacgcagtaaccaccgcacataatatttagaaagcacttccttactcacgcatgatatagaatagaggtgtaagttatgtttccattagcttattttagtttctaaaattaaaaaggaccgagttcaatcctcatcagtcacaaacgtgatcacgttgcccaaaggcttttatttgccttttgccttgtgtatcatcaattccaattacttgtgccaaattctttgttctttccggggaaggaaaactagaacattcgatgcgccaaccaattactaatatcaatacttttaacaaaagagaaactagatagatacataacgaaataatggcattacttaatacccggaaatactaactattgccctcaaaaaagacttgttaacaaaaaaaaaaaaactatatgtataaaaggagtgaaaaactttcatatacgaaaagggacacacttaatgcttgaggacaatcctctgttggttaatggacgcattactttacaatttccaatttctcaataaaaacatatgaacaataataaagcatgttaactctaaccaacactttaaattaatctgcaaggccgttaaaaaggcaaagctaatacaatcaaattttacctgtgcattttgtataagtaggagaaagctgctttgaaagaggtcttcaaacttcagagcagaaaaactccccagttttatggtaagcgttttaaaacaactgaagaaatagactggttgatccatcaccaaatgatctgagatctgcaggtttcaccaaagccctgcataacgggcatgtccgttctctctcgaacctaggaacaagaagtaattatttcaaaaaaggtcatttaggatccctagcttctccaaaagactcttatgaattaaataaaaaacacttcctaaaaaacaaaagatataaataatcaaaatattttctgagataccagcacggtaaagatcacctcaaatgtacattaaactggtgagatgcccgcttaaaagttgttagttgtttttcaaataaaagatattttattttgaaggaaaataaaaaagaactcacataacagctctctttctttctctctccatgggctaaaatgtgcatgtattttccagagtgtgtgtgtgcatttgaacttctatgcttatgaccacagcctcaaaaagaattcttgaccaatcaaaatcccaaaaatggccaagaaatcctatgtaatgcagtcaaaacaataatgattgataattttcaccactaacaaaagtccatccaagtggaaacacttaaaaatgaaattcggacaaaccataagttggtcatttcccataagtatacatgagcatgaagaagaaaacaagaaataaaaggttcaaccgatccaccagaaaatgcactagaaaaggaaccatttgttgtgagagttaatgcaagtaataataggattgcagaaacagtttccccaaaacaaagtataagcaaggacagaataaatttagaaagcaggcaaaaactcaccactctgacacacagtcctcgcaaaatatgtgcttgcagcgaagtaggataggagcatgcatcttttcttgacaaatagcacaaagatcaccagctgcattgacctgtacttggcactgacaggttagaataacatttacagaaaacattatctaatgaaaagttacaaagaaaatttgagtggaagcaacaatacaccacactgactccagagacttaaagaaaaaagaatagaagaaaattatcggtaagtcaagcataaagaatcatataaataacaattttaagagttaatgctaggttctgtgaaacacacagacaccgtccaggcattcaactttgtccacaaaatttatcactgaaatccactttacctgctcagatgttgcatatgccccatagtgtacttctttgcgtgataatgccttcaacgcagcaaaaaaggattgcacctgaggtaagaaaagtgaaaagatatagatatagcttatactgaacggtaaaacactaaagctttagcaaagaaataaattaattttaaaataatacacataattaaacaatacacctaccttttcaactacagaagtgagcttaaaagttaaatataatcctgtcattagtgaagaaaataggcttccatattctttgtttaagaaaaaacggtaccacactggtgttggcaacaaggcacggtacaagaggagtaggtactcaatcaaagttagcatttggccctgaaattaggaatttacaagtttacaatagttagtaatattagttaaagaaagaaacaaatagagaaaacaaagtgaactgtactgtctctattcaactctatgtaatgatgtatcaactctagatacatcatacgttactttctcactcacaccctctccacacaacctgcccccctctcccagctaaagtttaatttataactgatcctagtattattacctcacctgtttacggtaatttcggcctctgctgtttctgtaatatatcagtaacatgcacttgaataccatcgcaatctgtcgaaccaatgtatctgaagaaaataaatttttagcaactactgctcagtactgaaaagattaccatacattcaggataggaggagatagaaatataatattttaacaataatatcaaaggaacatccatagaaacaattttataacttaagaacaatcagattatacataaatagcattcattaaacggtacaataatttgtcgagaaaaaaaaaatgtacaataaattatactataatgtaccaaagaaatgaaatctttattcaaatatatgtcaaacacagatgctccaacatactgttgcatgcacaagtaaaaatttttagtaagtaataagcacattcagtatatcctagaattctcgctctgtcatcaaaccaattagtcctagacccccttttttttatagcaaaaccaattagtactagaccagtgatactaaaaatagttaatctttagaaaatgcaacaaagttatatcggtgacaaaatataaaagcagccaaatagcttaataatatagctcaaagcacattattatagcaaaagtctcattaaactcaagcaaaacttaggctcatttagtcattttttgtttcttaagctgcccctttcctctctaatacctctcatgagctcccaatctgcaacatttcattcctccctcacctaaaggtttaaccacttcttcaaccagaaatcagatattctctgttcctctatttatgcactccattcttgaagctgtaccctttccttgaagattagaagtcctacgaaatttcatgaacttcattttttttaaaatgatgacatctatctacattattttacctcaatcgcattgatttttatttatttatcttaatttttagtaatgatgacatctaactacacgctacaaagttattgtgctttaagtaattagcaacagaggaacttaaaataaggacacaccattcactaagatgataaaaacagcatgccaaaatggtggtatgattttgggaggaagcatcgctaatgggtacagcagatcatcattctgataccaccagtacacaccaacaacatgaactgtgaaagcaagacagatgcctatcagaacagagatttttctctctccctgcaatcagaaacaaaaatatgtgcttagtaaacaaatgttgtactaagttaaggaacgcggaaaatataaaagaaagatcttagcatgaaattatacctttaaagctgtctgttttcttacaatatcatttgacttaaacataacagcagcaatccaaattgtaacaaagaagcctgaaattcaacccataggatacgaagaaaaacaaaacattaatacttgcatttcattttcgactaataaaaaaatgcagaaaaattgttcatctacagctgccataaacactaaaagaaaaaaaaacgaaaaagaaaaaaaaatgaaggaaatctccttattttctaaaacataagccatacatatttatttgtatatcaatctcgttcacttgtaaagcatccatgatttagtacttagtttcaaactaaaagttgacaatttagtgctaacaccttggcaaatgatgcgaagcaacacagccaaaaatgaacgttttcatataaaaataacagaacagcctacccacaaacaaaaatgctgcataattatttattgaggtatgtgaatataagtaagtttcatttcccacaatgtttcttaggtcaagacgttttggaatcagttaaaacataattaacttgtctcaactttctggcaaatgtaagcttcaaatggaccttgtattgcggtattcacctgactatatcggaaaaactttatttaagagaagtcgttttaataaaaccttgttctctttccgaatcgataacaatcttgattttctttttgaataaatcataatctcgatttaaatttactaaattttaaataatcatacgacggcccaccaaaatctgacaaatcttctaataggtaactccataatcattataagaattgttgtacaagacctgttacagacactttaacaaagcataatgcacaattcaagaagagtaccttgcaaatgctgtcggataaagaccaccaacagtagcaaagaaaagggcagaacctgctcaatccacctagcagcctgctgaatgtcatatcgttggtaagacgaatctcttccattggtaccagttccatcccctacttctgcgtcagaatttccatttaacgactgggaaatgccttctcctgacccacgctcagccctagaatccggcgccaaggtagccattgattgggccgaaacctcattctgagtggaagtgacttcccctctcgcctgcccaaccaccaaaccagtcccttccctgtcatgctcctgctccgttgctccaataatcctaattgaaacctctccatcgttactggcagtcgcaggctcatcgagttgaccatggagatgatcccgaaatcccgaaacgcgtccgctgatcagaccctcgttttcttgataattagaacgactgcgaagaatacccgaatactccaataaggcggagagcggtgcctggattatgtttgaagcggataacaagccgaatcttctagaactgccactagaagaagaagacgaagaagaagaagggctgcggtacacgtcggaattgctcccaggcgcttccatttgtcggagtgccctaaccctaaaaaccatagcgatgaccgtattgaaaaaagccaagaacaaaatacatttacacacacgcatataaagaatgaaattgaagaaaaggcagatgaaggaatcaagtaaaagaaccttcgaaagcgaagctccgtttgtagaaagtcaaaatcaagaaggatgttacgtcgcaaaccctaacccaaataaagagaaagcaaaacaagaagaaatcgcatggtagttcgagcgatgaccaatcaggccacgggcgaaatcgatcgaagagaaagtttcaatcaaaatcaacgtggagagataagagagagaaggttgaaaggtgggtctggtctggtctgcactgctctctgctcctctcttctcagtctgagcacctatcaattatttgtttagagggtttggtggtgtcttgttgttattttaatattttaacaaattccttcctctattttctcgctcaatttaataacagcgcgagacgagaagagaaagagaagagatgcagcagatcgataaagactatgacgagaaaattagagaatttgggtctaaacaggacaaacctatccaaaccctttatggcctttatttattgtcgttatctcttttgaaatgattatagttgccatcctttttacacacatattacaagtcaaatatatgtaatttagtaacgccgaagaaaaatttgttcacctaaaataggataatgccgtaattcttttttgagaaatttgattaattatgtatgtattgagacaaaattgttttcctaaacttaacgtatctaatatttgtatttttttttttttttatgaaaagtgttcttggattaataaaaacattagacttcatgttcattacaaaataggtctgtaagaattgtttaaatctctgatgggcaaaagtccacatagtgggcatcaaaattacaagttttactaatgttaatttttcctaaaactctattctactcctctctctctctctctct

SEQ ID NO: 15238 - DNA, 8430 bp, Cannabis sativa
  modified_base (7858)..(7863): a, c, t, g, unknown or other
  modified_base (8286)..(8289): a, c, t, g, unknown or other
tgtttttttgtgtgtgtgtgtgtgtgggtggggatattaatcggaagatcttcggcaaatgtgcttaatatatataataattctgagatctttgtttatcctggcttccccctttttatcttttttttttttttcgttttaagtgtatttattactttatttgacaggtacacagatgctgcagctttcctgttgcgattgggtttagctgctgataaatgcaatgctactaatagccaatgcaaggtgaagtttctctgttcccttttattatttttgagaaatatcacatctatggaacatctttaatttttagaaaagaagatggcatccttcatttcatatccacttctgctaagcaagagttactccagtgcttctttcttctttttctcaattgattggtagaattatttctaccatgctgtacttaaaagaaccatatgctttgttttacttggaatatgtaggatcaagctaatcttagagaagaagaaactgaccagagagtgcaaaatagtttaataggatttgttaggttaatccgttaacgtcataaacctatgatgaaggtattctttagatttcaaatgctcagtgataatcttaaggaatatatgagaaaataggaaaatcaagtgactaaatgttactagcagtagcaagtgaaaagaggaattagttataacatggaggagacattgaaagaaactaagataaacacttgatatgcacttacattaatgtcataagcataggaggtgataacgctttattttcctgcaatttaattttcttcgtattagttagtgattgagctttcttctagttgtgatttttagaattaatctttactgttaattgacctctttaaggtccaatgcctatatttctatgctagccctttcacctggttcatcaactactgtaaagtccatttcctaaaacaaaaatggtttgtgttggtacaattctaattgtaaaaaagaatattgacctaataaaaaaaaaaaagaaaatgaaaaacataatagtaataacaaaaacgttgagagaaattgaataattatgttacaaatgtgcaagtgacacttaatttcaaaccaattagtcttggcaactgaggtgtgctggccttgtgaggagtattaaggtataaacttgaaggtggactctgcctccacattaatgacaaaattctcaaaagtcatgactttttttctgtttcattggcactattgaatttctacctgcctccccaatgtcaatgtttttgacataaattgctaagcatttttcttcttcatcatttttgggtttgtcactcgctctttctcaaatgacacattttcaacaagcaaaggatcaccttcttccttgcatgactgtgtcctcaaatatctttgttttcccttttgttttacataatgtagatcaatgcatttattgtatctatcgttatgggatctatgtccaaacgcagatgctaagcatgtaagacatgtgactctcattgcaaatgtttttagttctataatttcatcctgaaaagaatctctccacttaactatgtaaccatgaaaagaaattaaaagttactagcaattattatctacaaagttaaagacacaaaaaatgtttatttatcaggtgcacatgaagtgtacgattctgaagctgctttgacaacaaataatctttgcttgttttaatacccatcaatttgtttattggttcttgcatatgtttttcggcccttgattaatcaatgtgtttatataaactatactcgatcgctggtttccattatgaatcatgaatttgagtaatatgcaaattaaatttcactgttggtcggaaatatcccaaatttctcatattagaagaaatcttcttcatctaagttatttgtgatattgtcccttttgaggacatccaataaaattggaactatacggaaaagattagcatggtcctcgcaacacacaaatataagtaatttgtgatgttttattttgcgtcatccataactcaataagttaatctcattgtacgtaccttctcagaattaactttgtagttttaaattttaatagtacaaaccatattagggccaattttagttgatcattcatagttactttcttcaatgcctttctttatgcattttggcccatgtacaatctgactatattttagaaacaaatatcattttgcatatgttgcttaaaataatactgttgtctaaaagaaatagttaacaaatcatgtggcagctgatcaaataagatctttcgttacaaattttttcactaagctcatcacccatccaaggttgttgataaaattggtcactctttgcttttgtcagagcaattttggcaagcattaaattaatatcatgaccacaaatttcctgctgccttgtatgcacctgctttattagcaatcacttcaacaacaaggttttctcctacttcaacagctttgtcatgccatttggaacaataattgggcatctttaaataataaaggcatcaacaatatttagaaagatagttccactaggattgttacggatgaaatggatcaagcttctaatattttgtctgtccaactgtttgataataatcaaactctagtcattttccatgttgctttcagatcatttacaatctgttttatagtctcttcttcttcattcaatgtccctgcatgtgtctcatacatagaaattttcactctttggctataattcccaacgaaatgtttcatgctgaaatatactttcaaattaatctcccagcatcagcaaacttgtttttagagttattgtgtatttactagaccaaaattttgggcaacatctattttatctacttttggtgttcttatctatagatcgtttaggtctcctagaggaaagaccgcttggtccattacccccgcgcaagaataactcatgccctcaaatggagcgccactaccagtgctactctcccaaaataagaacgatagtccaccatctcatgttatcttttatgagctacaggcttaatatagtcagacataaattgtttaaattctttgatactcttgagtacaacattttacgcccctccaagactatccaacctccccacacatttattactttacatgcaataattacaatttatgtaagaaatatctttactatcaaactctcataatatataaaaagaaaaggacggtagccgctctgctcactgcagcttcaagctctcgggtattgactgagtgaagatgaatatgaaggaggctgtctgctgctgagtgaaaatggaggagtagaaagaacaaaaagagaggcaatgaagagggggagaatgctgctagctgttggaagaatatttccagagagtgaaaagcacggggagagaaatgcaggatgattgttttttcatttcatttctggttatcttgtcttctagagtttatttgcttcgagaattatttaatttaatccaatcacacagaagagaaagttgagtcataaaaaccaaactaaggagcctgattagggtataaaacatcataactgtgaggttaggcatcataggcttaacctcacacaactagacttaagcctttgactcgcacttaagaaagtgtaacttttaaagtttgtacctttcaactcgccttgaggcatgcctcaaggcacaactcaggtagcttttaaaatcattatgctctcaactgagatttggcatcccataatttgtggtgtttactgcttttgttgttcagcaactagcccaagtaacatcattctgtaacacacatttttttttttcacttttccttgtattaaatctgtaaagctttctttgtatttttatatttattttactttcaattttttttgtaattatttaattcttgacaaccttttccaaacaggcgtatcttagtgcaattattgtgtatctttatgctcatgatttcaagcaagcagagaagtgcttcaatgactgttcacagtaagtataagttttcccaatctcaagtaaactcctgtgattattattttgacttttttttttctttaattttcttgttattactttgaaagatgaagacacagaccttagagacttgtactgtttttacgtttaccatatataaagaaaataatatatatatttatatatatatattgactttttaccgtagaaattccagcatttaaatttttctaacaagaaaaatattatctggcttgaacttttttttgcctaaacatattaaaaccccatatcatgggcaattggatcagaatccgtgtgatggttcgagaagaattctaaaatggtttgactgatcatgtgattgttattgttaattctgacttacttattttttccacccctggggtgtgctgaaataagcatcatttgttttcacggactttttattgggaatcacattctttggcaccttcgaaatttttatatgccacagtatattatacctaggaatgattaggggctgtaagagatctttgctgtttcaatcactcgctccagaaggctttgaaatcttattgttcattgttctcagtgacaactctcaatcttttcctgcaactctagtagaacgtttgcttaccttttgttatgataggtgtctaaagtctaatttctgtgctgtacaataagttgaagtgtattgtgaactgtcatacggttgcctaaataaatgcctttttgttgcttatttatgcattatttgaagttttcactatatcctttacttgttaaacaaggttgccgattagatagatcagaatgaaccaatttccagtgcttccagagaacaataaaactaataaacttctccttcaagaaattaatttatgttctgaccatctagttttgtctctttacaaggattgatgcatttttaggaagcgatcaaggccggttttctagcagactgctttctgcctacagggaaggtgacattgaagaaatcaagcgtctagctcagtcaagctcagtctctcatcttgataacatggtaatgtattgattcttcacaagagtgttcctaactatttttttcccttttaagcattaatatcttcccttagtatagtaactctagttccatcttcacttgtcctaataaaattaagctctactttcttggttgaactttgaagtatgaagattacaattctagattagacttctatagcaaatctatgaaccctaattttattgctaaaaatccttgggttcaaaaattgttttctgcatttggaaggattaaaaatgacattgattgatcaaatgcaattatatcgtaagtactgtacgagagggattacttattatagccataataaccagcattctcatatgtgataaacatgattgtatatttgcttgctcatccatattctagtttagcttttaagagctaatgttttgtttttgatcgactcatggttcatatcaccaaaaatgcttgcccgactgaatgatatccattatccagactgattaatatatacaagattgctataaataatcttttcggtctatatcttactgaaatcataactacagatcattaagcttgctaggaaactgccaaccggcgatgtgggtgcacttaagactgaagatccaaaggaagaagagcaagaaccacttgatgaaaatgatctgacctagcctcaagtgcttccaacatccccttagataatggctatattatttgtgttcattctcaatatatattggaattgctttgctttgaaactaggaggttttttttttcttttttttcaatccatttttttctcttttttgaggggaggggaggagctttctcattttatttggaatgagaaagattttctctcgtaaacgttatgtaatgtacatactaatagaagccactcttcggcttgttatacagttagccaagactcataaggcatttaatttaaagatctttcttttctttttgcatttatgagaatctttgatagcatgaatcatgatcttccatttaaatttacttatcaaaaatttacttttcattacacagtattaacccagatttttttattgggtaagaaataaagcttctttggatagaaagaaacatgataaaattagtgataagaacgtttgatcacattttgagctccaaactttgtaattgtaagaatttattggattataactagaacaataatcaaaatcgcatgttattccacctgaggaagtgtagtccttaactaaaataattatcattgatcacataactattaattcgtcttaaattgattttggagggatcccaaattttttttatgtatatatttagttctaccatctcagaaaagttgaatttatacgataatattaaataattttcttattttggcaatagtaaataaatattattttaaaataaaataaaaaatgttaagatgatacttggcgggaaagatctgttacaagttacatgttagttaatcgttataataatcttttgtatttaacttcacactctaaacaagaaacacactctacctctctctctctctctctgtaagttcaactccattacaagaaagattttgaagcaaaagaagaaaatagaggaaattataataaagccaagaaaattctattttcgtttcttcttcaatttccatgtccaatggcaatggccctctggctctacctcccaactctcctactcttcttcccaacccttctctcagcttcttcttcttctccttccactatattatcaccgtcgcaatctccaccatctccttctccaccgccaccgccgccttctccttcactcccatccccatctgagtcaaccccaacatctcctcaatcaccacaacattcatcccaccggaggagacaccgaagatcccggcgaaggcaacaacaacctccttcaacagcggagacgcctcagcaattcaacaacataatcgatgccttgattggctccggagacttcagcaattgggtcaatgtcatttcaaacgccgttctccctcttagcgcaactctcttcgtcccagaaaatgaagctgtaacggccccgacgttcgccagccccggtccggaggacccattgattttcccttaccatgtggtaccacagaggctctctttcgccgaactacttctcttccagaccaacacgcgccttcccacgctcctccctgggaagtctatcatcatcaccaacaactcccggatcaacttcaccatcgacggctctctgatcactcagccggatatttactccaccggcaacattgccgttcacggcgttggctctgtctttaattactcggtcttcggtgatggtttagaccttctgcccaaatcctcgaacccagagccgaatcagtcgcaagttcgccggccgccaacggtggataacccgaacggagagacgtatggttcgagctcggactccgcgccgccgtgcctgtgcattgaattaccggttgttttcttagtgttctgtggggtttggatgttcaagattcagagaaatggcggccatggacggtgaagtgttggtttttttggtatagtttgttcttgggattcaagattcagatacatgtctttcttggacgttctttttcttgttttttaaaatcttttatactaatttttttcataatgaaataattcaatttttttctggctcaggcatttttgttttaatgggagtttttttttctattttcaatctcatcgactcaaaccatggacaaactgttatttgaaacaattattattattattattannnnnnttattattattattattagtaaacaaagccgcatgtataataattttaaagattttattcatactaagaatatattttttttttgttaggacaacaaaaatatagaatacaataattgatctttttgggaatacaataattttggcaaagaattttctttttcggaatttgaaaatacagaacatcaagaattaaaaaaatatatataacaaaaatttcaaaaaaataaatatatattactaagtaataaaaatagatcaacaccaaaaattagaaggaaaaaaaattaacataacaaaaattctataaagtttaacttaatcttggacaatatatataggttccttgtagtggaagaatacaataattttattttaattaaagaatacaaatagttttaatatcataatagaatattaatannnncataaataataagagttacataagaatataaatagacttttttttattaaagaatacaaatagttttatcataataatatgacattaatataaatataaatgataagagccatacataaataatataaataatttttttta

SEQ ID NO: 15239 - DNA, 3637 bp, Cannabis sativa
tctagatcctagtaaaatatatccaacacagggttgggtggcttgttggggtgtcttccggtgaggttaggacctggttagatggcatactgatttggttcccatgggttggtgggggtcgtgtttgctttaataaaggcatgggagtttggggatcttatgtgcttctgtttaagtttatttatttatatataataatggtggtttccaaagaccttataagattaatggggttagttatcgtcctggagagtgattcaaattctatcttttttaggtctatcaatgtctcatcgatggattcaagtagctttggcaggggcaatttggttctttctttggtcgtcaaatctaggagattcctagatctttattggcctaatattttgtgatctagtcttttgtgattgagtatcatactataactggttttgttatttcctttatttttgatttaaataatggggttgctatgtcccaatttttattgaaaaatcactggctgaaagccattagtaggtggactctgttagatgtccatttggtttggaaacctagtatacttcacacctctttagtgctttgctatgtcccaatttttattgaaaaatcactggctgatagccattagtaggtggactctattagatgtctatttggtttagaaacctagtatacttcacacctctttagtgcttgattgttggtggcttattggacccttattttagtttgttattagggttttctttcatgttattattgttatcccaattttcgcacaagatcacatggcattcttctgggtgacacatggagaactttttatgacctggacgaactgtacattcctcagtatgacatgtagagtgatttattatccaaaaataactcatctgaagataagtatggaacatctagatagggttgaatgaatctatcagagcagcttccaatctcagcgaagtcacacactttgaccaggatgaatgcgattgaggcacaattttagggatattatccatttatatctttaaattaaatccctatttcggtgggatttctgcacgttgtaaaagtaaaataggaaattagctaactttccctttctattcctaattgttttgagaaaacaaattgatttaatttcccctataatagtggagccattccattgtacagggatccaaaatgatattttatagaagagctcttatgctatcaaagaattgtcaagcttttcctaagaattcttaaaaatcttacttggccagctccttatgagcttattaattcttcaaaggaatacaataagaagggaagtatgctattaccataattatggagtcaaacctctataaatctctatgttcttattgctaaattacatataattatttctaatcattcttatcgctttaattaactcaacgtcgtttgttaaaagtgaggtcgatattttagtacttttattgagagtaaaagaatgttgtttttattttgatgatcttcaaaacattcaaagatggttgtgactaccatgaggggcctgccatcccactgaaataacggatccaatggccaagaatcttaatgtgcaaactctagcaaatctaagagatccaatgggcattgatcctaatccaaccactagtcagcctccacaggtccccccatcagcaagccaggagtaacaacccctctggctgggttcacaataggcacacaagaaactaggaccactaatatgcataatggagaaattgggtcaggaactgagggccaccaatgggagagcgtcgagtaaatattggcaatgatactaagttgcaaaatctatgagaggccttcaaatgggtgcaagaccataccaacacccttcaccacgactaggaggacacccgagcaactatgaatttggcatttgagcagcaaaaatgccgatttcaggagaggatggataaacagacagagatcatgagagcccaataagcagcaattgacaactgctccaagtaggcaactgagctgatcagacaggcttatcagctaactgggtagctaccagtggaagacactctcattatgggattcaaataggggaaataaccttatatcccaaatggaccacagtacaggctagaagagcatctggccaactactcccattaaacccaagataatgggaaatccaatctgaggccacataattagattgtgggccacatggtagacgagcaagttttttctacttgttatcttggaggagatgttctttggattttcatttatgttgggttaagcaaggtattcgataggaacgacaatgagggtgttggaatttgttgtgctagctagttttgctagagaatttgcattgtcattttattctagtgaaacttgccaaatggagtattaatttagctgggttaagagatccttagatttgctcaaatatgctaccatcttaagccattgagcttggtatttgcctaggacttgattgaccacaagctgagaatcactggaaaccagaagtgtgtcagctttgatggctaatgccaatcaaagtcttgcacgtagtgtctagtattttgcttcattgtttgttgcggtaaattcaaaccttaaagaacagtgagtgtggtatccttctagagttatgaggataaggcctacgctggagccatagttgtaatattccaggaaaatatactaagtgtttgtacgttatatactaagtgttttcgcagtcgatctgcgtcgctttcgtcttcccagatgtagtgtacttgatgcatcgctatatgcattaaatgatatatggtttctcgttactaagcaacagtttgtatatctttcctcacataagacctcacagtcagcaagttgcaaatatactttgccacttacgcaatcaatgagttattccattaaaagtgatttcgtcgatccatattctcttcatcttgacacgtgtcctccattgagattttagccaaattttgggtataacaattgccccttaataagtccttgtttaataaaaagggctttttaataattacaaagggtattttcatcataatcccctttgaaaaatgcatcctttgattctggcggttgtacggtttcgagggtcattatgaaccatcttttcatattctaccccactctcaaccgttagatctcccaacctttggccttcttgtcactagactttgagtataaaatgatggcttaggctttctatattccacacacttttggtttcttgtatagtttcatcttgagattggattgtcattctctcgtcaagatgcctcatttgagtttagaaatttgttcctctagattcataacaccaggatgcaccaaccattctttttctttgtacgttcccaagaacttcaaacctcaaatttgaactggaaacaaaggattccaaggctgggagcttccgatcaatccaaactaaggacacgtcatcgatcattatgggtgatcctcacaagtaatttttgagggtaagtattatcctttgtaaatggtggtttgaactggattattattattatttgttgctccattgatcttttatctctgtctccacacgaatagacatagatcttgtgag

SEQ ID NO: 15240 - DNA, 10924 bp, Cannabis sativa
ttaatataataatttttatggagtatcgctaaccaattgtaagacgacacatttagaaagtgctaggtaccactggtgcccaatagcaattctctatatttatttaagattttgaaaaattcgaaaaaatttatcacgctgaaaacagggttcaaaaaatgtgttgcatgcgtgactattttattttatacgcgtgtgaaatagactatgcaaatactgctttttatattgtataatattctacttttattaaaattttgtaatatatcttaaataattttaacatacataaattagtgcattgtatcagcacccataaatattttatatttttgcatgacacgtacggatgacattcctcattgcaattttcaatctaaacccatttatattcctaatcctctcattagtcctcattcactgttttggttattaatgtttttgctaacccccgtatcttcataaatgaatttagatttcttccttttcgaaaaaaaaaacaccaataaagaaataatttttcataataaatatttgattttgtttcctgtaatgaaatcaaattttgtataaataagattcatcatttgataaatttcccaagaaatttgcacattctttgccttatttttctctctttttcttaaaggttagaaaattattttctagaatccatttattttctcttcaaatgaggtgaactgacaattttctttttgttactgttacaggtcaattatggctgaaaaaagagcaaagacaacaataatgattggtgaagagaaagacaaaatttcgaaactacctgattcactcatcatacatatactgtcgtttctttccactgaagatgtcgtttccacttgcctaatttcaaaacaatggaaattcatgtggtattatgtccccaatctctcattttccaattctaatttggcaaatgatccaaaaaagttttacaattatgttgacaattatttagaacaccgcaaaagaggcatgtattttgtccccgattcagccataactagttttaagctttgcatggattattcttatgaaagaatcaatgaaccccacctaaacaaatggttagctttgatagttgtgatgaaagtcaaggaattagatctttatctaaagaaggggaagaattaccatggtgatatgtactactatcctttacctaaaacactcatagtccatgcaagatatttgactattttgaagttgaattcagtggagttggattctcattactcgtttagttttccatctttgaaaacattgtcattatcttatgttaggcttgtagttaatgatgttttagataatctattgatgggttccccttcccttgagaaattacaattgtataattgttgtttatctaatgatcatcatgatcagctcctcatcaacatacaacaaagtttaagcctcaagtttttgaaaattagtctcattaaggatttggtggagcaaatcaaagttataagtcttgaatctttgtacctattaggtgtttcctttgacaaaatagaactctctacatgtaagggaattcgaattctccaattaacttgttgttggggtgtggaagactcgtcatcattcgaaaatctcatttctaaccttcctcttcttgagcaattgacattgtgcaacgggcctaagcggaagttaaagcgcgttaaaatctcgaatcaacacttggaaagactctttgtgataaatcgttatgaagatgaaatgactgttataattaaatcagcttcgaatttaagaattttttcttgtgtaggtaatatcaaatttggtttataaatttgttgatttttcttttgaatctcaagtgttcttggagaagcatagacattcatgttgagtcaaatgagtgtcttatttgattctttggttacttggctgactggaaactcagtattctaaagtgatttctgctattttttttttctttctattttcttctcaccacaatttgaagttctttaattcctttttgttaacacattaatcttaattttttttaatgtgtaaatctataagctatttaattttcatgcctattatggttaagattaatgtgttaaggaaaacaaaaacagctggttataaacatgtttgtgattatattaagggcctaagaactatcaaatacacatacatttttaatcatatataaatatatattattaaatatctcaattttgcttgttgatctagatttgttgttctcactatcaattgcattatgatgaattttgctgaagtaaataagcctaaacactttctaggatttgcattaaaagagactcaatcagccaaaaacaaccaaaaagtctaataaatttccaagacaataatatcaaaacaaacaaacttgagtagcaattagatatatacttttaagtactttgaagatttgctcttggaatattctaaggctgcatatttgctcaaatagcagtcttgtttgaatattttcaccttctttttcttctcaaattctatgatgggttacttaatcataaatttttactttgattgctcaacgaaagagtgaactcatagccaataatacttatgggttgcttagaatatttcatatagactcgataattaaacattgctcacacagtaaagttattatcatattatgataattgtacatctatcaacatgatatagtgtctattatataggtaattaggattataatgagatggtcgttttcaataactgtatttaacgtacatggcagtactctaataactacaagttggcccattaaattatagtccaccatcactaatgatagaggcccaatagctcaattctagtagaacaatattatagacattgcatttgatgatttgtaacttcaagagaattcaaatgcaatttgtatttgtagtagatcctagagcaataatttaataatttaaataattattatagctctaataatttcaataattttataactcaaataactaataacttttctttaataacaaaaattataagataattatctcatttaaaaatacaaaatatactttaattaagtaatataaaataaataccgttatataacataaggattaaaattatatttttaaagactagttaattaaaaaaaattgtaattaataataactgtgattatcaacattactttagcaacatattaattcattatataaatgagaaaaatggcatatataggaacataaataaagatatatatatatgtgataattttaaacagagtgattgatgaaataaaataaatattcatttaaaataatatattaatctaaaaaaatgaaaaagaatgtaacaaactatgttgtgaagatcagttttcactgtagagtagagacattaaataactgacattatttaaaaatagaatagaacaaaataatatgattaaaattattgtcactaacctatgtccattaattaattgtccaaataaaactttttcatactctgtttgggagagaaaacaaaggagagagcacaataatatttttactccatgttttctatgattataaaccaacatataattaattcgattaatataattattattactaccactacatgagtgattaattattagttaaataaactaacccttggtaataagttccagacatggtaacaagatcagcaacattggtactaagcaagcagcgttgaccaaacaagctctcccgttgaccaaacaagtctttattctcactgttgtgttttccctccattactctgtttgtcaaacacaaaaatcaaaatactgaaacatttaagtaagggaacgaagatgaacttcaataccactattcattcttatgcagaagaaagctaaacaaagtgcttttttggccctctattcaacttcattcttgactattattctttttctctgcttgccaattctattttgagttggagatttattgtctttgattgtttgttaatgtaattttgaagaatcttttcactttatggtcaagtaagtatccacgattctatcttattcttcttcttttcttggtttattcttttggttagaaatgattttgattaatgttcagatcaaactaatagagctcaagttttgctaacacccataataaatatttcatacatattaaattttgactaattttcttgattgtattttttttatgtcttccttaattattaattgtacaaactctttatttcattgatttggtttcctgcaatgattcttcttcttcttttttcttcttttaagaaattaagattcaaccattactacttagaataatttcacaagaaatgtgtacattctttcctttctctcttcattgcatattttatgagtaattctttctgggtgttcttcattccaagaatcgatttattttgttttcaaagaaagttaactcacgattcctctgttttttgctgtcataggttacctatggctgaaaaaagagctaagccgacattgatgatgatgggtgaggaggaagacagaatttcgaaactacctgattcactcattctacatattctgtcgtttcttttcactaaagatgtcgtttcaacatgcctcttttccaaacgctagaaactcatgtggtattgtgtctccaaactctctttctccaattctaatttggaaaatgacccaaaaaagttttacaattatgttgataattatttggaacaccacaagagaggcatgtattttatccccgattcagccataactagttttaagcttcgtatagcttattcttatagattaagtgaggtttgtcacctagataaatggttaagttttgtagctgagaataaagttaaggaaatagatattttcgtgaagagcttgaggaataacaatggtgatatttactactacaccatacctaaaacactcttagtcaactcatgatatttgactatattgaatttgatttagtggagttggattctcgttactcgtttagcttttcatctttgaaaacattgtcattatcttatgttgggcttgtagataatgatgtaatagataagctattgttgggtttcccttcccttgagaaattacaattgcataagtgttgtttatctagtcatcttcgtgatgagctccacatcaacatacaacatagtttaagcctcaaggttttagacattatactcactaatgatttggtggaaaaaaattgaagtaataaatcttgtttctttgatgctaataggtgtttcctttgacaaaataaaacactctgcatgcaaggcaattagaattctcacattaaattgttgttggggtatggaaaagtcgtcatcattcgaatatttcatttctaaccttcttcttcttgagaaattgactttgtgcagcttgcgtaagaggaagttagagcatgttgaaatctcgaatcaacacttggaagaactcactgttactaaaagtttctatgatgaaatgacctttataattaaatcaactccaaaattaagggtattttcttataggagtaatatcaaattgattgtatcaatggagtcgtccaaattgttgtctggagaatttgtgattctttacgggctggagaactatgatgtcaattggtttatcaatttgatgaattttcttttcaatctcaagtgttcttggagaagcatagacattcatgttgaatcagatgaggtatgtcgttcacctttggtcgattggcaaaatcttacatattcttctcaatgtaaactggagaatgaatcaaaatagaaagatactctgcaatggatttctcctacattatctataaagaaagagcatcctaattaccaatgtatttttaaaaaatatgaaaagtataaagatttgttcttgtgattacattatgctatcaatgccttattactagcaagaaattcaatattatattcagtagcctcattaggaaatgtgatgaaaaattggtttgtcaaatgttgggacatttcttagctgtataatataagatactaaagtgattttctgctattaattgaagctatgtattcttttttgttgacatttattagtaattgaaaaggggtatcctttaatgctctaaatagtaaataaaatgatttgattttgggttgctccatgagcattgcttggttgaacattatactcaattggaaatgtgatgtaactctgtaagtgaagattgatcaataatggtttcaatatgttctgcaactaatatagtttcatctttgatggttcatttggattatcctttattcttgtgtgattttggtattagtgaacatgaatagtgtgaatgccactttgtttattttgtttctttgctttatttttctataattgaatttcttatgtgctcctaattcacatttgatcatgagacattaattttcttggcaatggatttcttctaagcctcaggattatgtcaaaatatgttgcataaaatgttcaacaacctctcatttaatcatggtattttatgagattatctaataatggtgatctatctatgttcctgataaattaaagacacattttacccaaaatttatcaattactttccatatttatcaactgcttttctttccatattccaattctcacaagtatcaataattgaatcttcttcaaattgtaaaagacttgataaagttatggttcacctatatatgctctatgcatatgtttttttgttagcactttcatatgtatatacacaatatataaaataaagaataatgttgggagtgtggtggattttgtagagtgattttctcatttgaaataatagtttcctttccaaaatttgatataataaaaaagactactaaataaagcattataatttgtgcaaaaaaaaagtactttttccatttgattcaaatcatcaatttttattttgtttttttgtcacaaacctatttttaaaattgaaaataagaacagcctgaacccagcccaaatccataacaaaaaataaaaattgatgattttaatctaaaatagccaaaataaaaaatccttatttctatagcttcaattaaatggaaaaaaaaaaaagtacttcttttgcacaagttataatgcttagagttcaataacaaatattctgtagtctttttattatatataactattatttcaaatgagaaaataaccctacaaaatccatcacacttccaacataatttgcctctaaataatagaaacccaattgattgattctatattatatatattatgtatatacataaagaatgtaagtgaacaataactgtatataaatatcaatgacgaatttatcaaggcttttacaactgtaagaatttatctaagtagttgatgaagtaattgatataatttgggtaaaacgtgtttcaaatttgttgaacattattagattatcttataacaacacatgcaagcataaaaataaaacaccatgattaaatgagaggttggtgaacattttatacaacatattttggtattatccatagcaaagaaaatcaatgtctcgtgaaattaagaaattcaattatagaaaaatagaggaaagaaacaaaatacaatatatccatacaagaaaaaataaacaaagtggcattcacactattcatgttcactaaaaaccaaaatagcacgaataaaggataatccaaataaatcataaaagttttgctgaacatattaaaaccattaatgatcaatcttcacttacagagttacatcacatttccaattcagtgtaatattcaaccaatcaatgctcatgaaataactcaaaatcaaatcattttatttactatatagagcattaatcacataaagtaaaatacaattcagaaggaccaaatatacgttaacaatataatcaacaaaaaagaattcatagtcattatacagctaagaaatgccccaacatttgacaaaccaatttttcaccacctttcctgatgaaagctaatgaatataatattgaattttcagttaacttaagtaacaaggcattgataacataataatcacaagaacaaatcttcatgcttttcataataaggatgctctttctttatggataatgtaggagaaattcattgcagagcatctttcaatattgattcattcttcaatttacgttcagtaaaacatgtaagatttttccaatcgagcaaaggtgaacgacatacccgcttcaagttctctggaaagataagagcctacatgtatagaattaaaggaatgtattagtgtcaaataaatatacatcaaaatatacactaataatataaacttaaaataaaaaaaatcaaataatacaagtaataaacatacctcatctgcttcaacatgaatctctatgcttctccaagaacacttgagattcaaaagaaaaatcatcaaattgataaaccaaccggcatcatagttctctagctccttaacattacaaattctcaagacaacaatttagacgactccattgatacaatcaatttgatattactcctataagaaaatacccttaattttggagttgatttaattataaagggcatttcatcacagaaactgttagtaacaatgagttcttccaaggggtgattcgagatttcaacatgctataacttccacttaagcaagctgcacaaagtcaatttctcaagaagaggaaggttagaaatgaaatattcgaatgatgacaacttttccataccccaacaacaatttaatgtgagaattctaattgccttgcatgcagagtgttttattttgtcaaaggaaacacctattagcattaaagaaacaagatttatgacaccaattttttccaccaaaatattagtgagtataatgtccgaaacctggaggcttaaacaatgttgtatgttgatgtggagctcatcacgaagatgactagataaacaacacttatacaattgtaatttctcaaggaagggaaacccaacaagagcttatctattacatcattatctacaagcccaacataagataatgacaatgttttcaaagatggaaagctaaacgagtaacgggaatccaacttcactaaatcaaattcaatatagtcaaatatcatgagttgactatgagtgttttaagtatggtgtagtagtaaatctcaccattgttattccttaatctcttcaccaaatatctatttccttgactttattctcagctacaaaacttaaccatttatctaggtgacaaacctcacttaatctataagaataagctatacgaagcttaaaactagttatggctgaattcgggacaaaatacatgcctctgttgtggtattccaaataattatcaacataattgtaaaacttttttgggtcatttttcaaattagaatcagagaaagagagtttggggacacaataccacatgagtttccagcatttggaaacgaggcatgttgaaacgacatccttagtggaaagaaaggatagaatatgcagaatgagtgaatcaggtagtttcgaaattctgtcttcctcctcacccatcatcatcaatgtcgtcttagctctttttttcagccataggtaacccatgacagcaaaaaacagaggaatcgtgagttaactttctttgaaaacaaaataaatcgattcttggaatgaagaacaaccagaaagaattacacataaaatatgcaatgaagagagaaaggaaagaatgtacacatttcttgtgaaattattgtaagtagtaataattgaatctcaatttcttaaaagaagaaaaaagaagaagaagaagaatcattgcaggaaaccaaatcaacgaaataaagaaattatacaattaataattaaagaagacataaagaaaaatacaatcaagaaaattaataagaatttaatatgtatgaaatatttattatgggtgttagcaaaatttgagctttataagtttgatctaaacattaatcaaaatcatttctaaccaaagaataaagcaagaaaagaagaagaagaagatagaatcgttgatacttacttgaccataaagtgaagggattcttgaaaattacattaacaaacaatgaaagacaataaaatctccaactcaaaatggaattgacaagaacagaaaaagaataatggttaagaatgaagttgaatagagggggaaaaaggcaccttgtttagctttcttcttcataagaatgaatattgctattgaagtccttcttcgttctctaaattaaatccttcaattttaaaattttgtagaaagacaaacctgttagtggttgagatacgattgaagcttcatagtatgatccgacaaacccattcctcgccaccattgtcgtgatcttttgggaagaaggagggtttggggagtcgaaacccagtctgcaccatcgacaagattcgatctttcctcaattgagatacgattgaagcgatccgccaaacaactttctttactgcaaacttcgaccaaatcacctctgctatacatttctctctcttttttattttttttttttttttttgagaattgattgttaatttgaggaaataagaagcaaatttgatatttttaaaattcaaattttttagagggatagcgtctgttttgggtttgaaactgaattgcaataaataacgaagcaaatattttattttattatctttttttaaatataggacttagtctcgccaaagctaacggaaattttgttatataaatataactagtggagaaaacacgtgctatgcacgtgtattatataattaaaatagaataaattatataaaattaatttaataataatatatttataaaatatgattcatgtta

SEQ ID NO: 15241 - DNA, 8988 bp, Cannabis sativa
tcttgtttgaaaaataaagcatgggggcagcacaaatgccttcacagctagtgagcacaccaactattattttgatgtgaacgctgattgttttgaagaggctgtggacaggttgacgattcaatcattttcattttttatttttaatattgtcagtgtaaccatgataatagtgatctaaaagtatctctatttttatgttcagatttgctcagttttttatcaaacctttgatgtctgctgatgctactacgagggaaatcaaagctgttgattcgggttagcatttatgctctgatcatgctcaatcttttatttccttctgttgattgatgatcttcattaaatattttatgttttgtatgttccagaaaatcagaaaaacttactgtctgatacttggagaatctacaaggtaccctttttacttggctgtgattctttatgaagtctttctatgacattatatgatgccaaatatactattttaatgtcatggcatgtattttcatttttatatatattttatttatttacttttctctttgcttatgtttggtaaatgtttaaaatagtctgccagttttttttttctttcaatatttatgttttggctgcttataaaatgcatgtttttttccctggtattctatagaaatgtttattcatggatttatttctgtagtatgagaaatggatgtccttttctaaagtattgtgtctcatgctctgaactcctcaagattttttggtgtttatcttgcttttaatgaattgttgaaccaattatatcgttttgtagaaggtttgcacgaatttatatccctgcatattaactacataccaggcaggcataaccttatttttcaaaaatttcataaccttgtaattaccaaactaaactaaagataacttttgacttaattctagtcaaactttttgacaagattttaatgaaaacccaagtgtttgaatttagttttgattttttgatttttttttagtttaattttaattagtttatataatttgaataatgctattttgagatttttattaaaacctttaattaaaggctgactagaataatgttaaaggttatctctgattcattttgacaaatgtagggtctattgtggaattttaaaaattgcaagtagtatttagctaaaacttatgactataaaatattataaaaccgttagggctattacattatctctattgaatgttagaggctggtgatgccttgttttagtgatattatcaaaatttactgatgacttaacttgattgggtgcagctccagaaacatttgagttcagagagtcatccattccacaaattcagtacaggtacatatgttggctgtttgcttatgttgtatattaatataaagttgaaagcaatctaggtgccagaaattaatttgaatgggtaaactgctaagacactactatgttcttcactcctattcccctcttaattttttccctgcctttttatcttcttatatttgcataatttcttcaattttaactatataagcaaaatatctattgtacttactaactggattttgctgaagataaataatggcataattcatctaaggcacttgttatatattcaaattcaatattagagtgttgatagtcttcaagctgcatttctctctgatatttcaaatgctcagggagttgtatatttattgaaaaactggtgaattcacatttgtttggtggtgacgttctctttggtcaaactctatttcgagagggtgctgatattctgttgtgtattctttgatggttctatttctgaagggctttgttgaacacattttgtatatttggtttgggacaattggtgaaagagtcatgttatttaatcagacatttttggtgatacacacttgacatttgaagttgtcttgtgatttttatctggattcaatttctgtggagcacattttctgtttgaagctgtttcatgattttgaaagcttacttagcaaagataccatataggataaacagctcttgatctaatcttcatgtaaaaatatattcaagaaagattagtctaatacttgattttttattttctacgcccatcctcaagctgctcactttcttgttaaatcttcaaagctaatttagttaacttttggttaagatgcacgttgcttgtttgtcgaagttgtcaaccatgcccagcttacttgtaatttcttgctatgtcaatctgacctgcttctgaagcttgcttgatcttgttttgtcattctattttctttcctttagtttctctttgttactatttgtgtttgatcgttttttttaagataaaatatttaaatcctgtaatacttgtcttatgaggcaacattactgaatctggtttaaaatgtctactattcctacattttctcacctatataggaaactgggacactttggaggtccgtccaaaagcaaaagggttggatactagacaagagctgattaaactttatgaagaaaattattcagcgaacctcatgcatctggttgtatatggaaaaggttcgtagccaaatttaaataagcaaggccttttaagcttgggtaatattgtggaatttatgataattatggtactaatataaatggatcacatatactgtcagataacctggacaaaatccaagcccttgtggaggaaaagtttctagatattaaaaacaaagaccgcagcagccctcgctatcctggtcaaccttgctcatcagaacacctacaggtatgactggtgcgcttgattttttagtcaaatgattgcaaggtcacatttttactagctttgatcacaaaattatgctttatgctgtataaatatttttttttggattaaaatttggtctccgtagagaaacaaacccttatgctgtataaatattgaatgatcaatttttctgtgcatgtattatttgctttcagattcttgtgaaggttgtcccaatcaagcaaggtcataagttgagaattgtatggcccattactccagaaattcaccactacaaggaaggaccttgcaggtatcttggtcatcttattggccatgaaggagaaggatctttgttttacatcttaaaaacattgggtgcgttttgtgtttaaagattgttgtccggcttctaagtagcgctttaacttcatttgctacatagttttttcctcatgctagattgtatcttataagctctttataattttccttatttgtagtggttaccatttgggtagcttgtctgctttccccttcttctccgcctctctctctgtcacattctgtcagttttttttttttctttttcttaactgtgttcttgctcaacctaaatactggctcctttttctatttgttgttttttcaacctgtcggtggtacatatcaatgtgatgtgtatgctttgctcattttctttgactctcagcttaattattttaataatacatgaatgaatgaagcttttttagcaattaatttagactggaaagatgtagtggtaattgaggtcgatatgataaccaagatgaatctgcatttcagaattttttggtgaacctgaaagttccccgtactatccgaaaatgtggattagttaggggtggaaatgcactaatcaaacacttcaaggaagctagtgcgaattttataactgaattgctgaaagttgatggaagtctataactgaaatgttcagtgacaattgaaacgcatattttattgtttagtttttaatattgtttataggagggtcggaataatgttcatgcatacataataattctacatcaacctgattcccttgctcttgagaatgctgcaggatgggcaactagtttgtctgcaggtgaaggggatgggtcatttgagtttgctttctttaaagtagggattgaacttactgatgctggtcaaggttcgttctctttctagtattttttttcttttttgtggctgtgaaagatccatccttttcattttacagtggttgactttgtacatttttgtattctggaccttcttgactgaattgcagagcacactcaagatataataggtttgcttttcaaatatattgctctagtgcagcagtctggtgtttgcagttgggtatttgatgaggtatgcatttgcagttctacagtataatttgaatttttttatccattttcttttgtatagagctggtataaattgtggttgctttctgtttttaaattcacattcaaagttgctcttgttattgaaagattctgagttttttgttatataatgcagcttgcagctgtttctgagacaaagttccattatcaggataagactcctcctattgattatgtcgtcaatatttcaaccaatatggaggtattactgttatcaggcatactttaatctatttctagttctgtccaaaaaaaaaaatgtgtggggggaggggaatgggagagatggtaatgcttgaaaatcctaactccaaggtatcaatttgaaaatgtgcattattagagctccaaactcatatttttatcaaattgtttaacactatgaactccttggtggttttcagtttgtaactgtattgtagttttgttaaaattagaaggtcattcgaaagaataacttcgaagggtaggaatactagtatctttattctagataaaacatattgcttgcttgctgctttcttatatgatggttttacatgatttacagttatatccccccaaagattggcttgtgggttcatcattgccatctatattcagtccaagcattattcaaaaagtgctggatgatctttctccaaacaatgtgcggtaagattatcactgtttgtagctttaaattgatcattatgaatcttataccagtcattataccagattgattatgcctttatttacttgccttttattttattgcaagcttaagaatgatatgcttggcttagcttattagggaattagttacatagttagaattagtttggaaacttgagatgatgatttttttctggacttgtaatgcgagtatagtattttttctggtaactaaaactctggctgatgttgtaacatgggatccattctgcagaattttctgggaatcaaataactttgaaaaccatactgatttggttgagccatggtattcaactgcctattccattgagaaaataactagctccatgattcaggtttgtttttggatcttaatgcaatttagtattggttaagttgacatgtcactgtagagatctgcatattcatagaaaaataaattttgttttgatgcttcctcttctaacttaaatagtaattcaggcttttaatttcttaaaaatcttcaaaatcctgttgcaggaatggatgctttctgctcctaatggagaactgcatctaccagcccctaatgtcttcatcccaactgatttgtcaattaaaaatgtgcatgaagaggtaattaacatatgagaatatatattaaaattgaccacaatgtgattataatctcatgaagtggccttttgaacaggtcaaatatccagttctcttaagaaagtcaccatattccacattatggcacaaacctgatacggtgttccttactcctaaagcttttgttaaaatagactttagctgtccccatgctaatgactccccagaagcggaagttctaagcaatatttttacagagttgttgatggactacttgaatgaatttggtaaagatgaggaatttttttggtttgaacttatctttaaaagaagtatttccatggcctcaactgaccacttcttttgttcgcattcattaatctctttaaaaaaaaagtcttatttgagcacacacttctatttcagcttattatgcccgcgttgctggtctttattatggaataagccacacagatagtggattccaggtatcttcttgtttatgtcttctaaagctataaatgcatagttaaatgatctgtgcatttattttcttgtaaatgtgtatcacatgtataggtaactctagttggttataatcacaaattgcgaatcttactggaaactgtgattgggaaaattgcaagcttcaaagtgaaacccgacaggttctctgtgattaaggtacagcctcttttttttggttaaaagcttttattttgaatgctacttatattatgttgctacattctaacttttgagcatcaggatgaatttgtgttatggtgatagtcaaattcgacattatgatcataatataaatgaaacaacagaaatgctgaattattttagaatgttgtaacaataattaaatttcttccttatcaggaaatggtaacaaaagagtaccaaaatttgaagtttcaacagccatatcagcaggctatgtactattgctcattaattctacaagatcgtacatggccgtggatggaagaacttgaaattcttcctcatctgcaagctgatgatcttgctaagtttgctcctttaatgctttcgagagctttctttgagtgctacattgcaggtgcataccttcacttttcaacagaaatattttatcatcaaacacattattatttcaatttaaattacacttcctaacctccctccctttttcaggaaatattgagcgcagtgaagctgagtcaatggtcctgtacatagaagatgttttgttcaaggagtcaaatcctatatgccgaccgttattcccatcccaacatttgacaagtagaattgtgaagcttgaaaacggcataagttacttctaccctgtggaaggcctcaatccaagtgatgataattcatcccttgtccattatattcaggtttttttttctgtctacgtaatataagaaaccaattatcttgtttccgtattcaaacaaattctaaaataaataaataagtgatgaacttaactttaggcacactgtttctgagtttcatatttttattctttctttctaattcaatccttttaaaatataggtacatcaagatgattttagaatgaatgcgaaacttcagctctttgctctagttgcaaagcaaccagctttccatcagcttagatcagttgagcaacttggttacatcactttcttgctttcaaggtttgtaatagttatttttttctcatcagaacattttctcttttttaaaatgaagagtataaaactaatatataaaattaatttttacaattttatgcaggaatgatagtggtgtacgtggattacagttcattatacaatctacagcaaaggtactgtcacatactcaaacttctatgattggtttcgctattgcaatatcttgtaaaccatatgtgtccgtttcgacagggtccagcacaaatagatttaagagtagaagctttcctcaagatgtttgaaactaaactgtatgaaatgactgacgatgaatttaaggtgagattataattcgatgtggtattccatatagcgtgctatcatctttttgccggtcagcacggtagagtttagaatgctgtgcttgagtaatttagtgtaaaataattgctggtttgattgttacagagcaatgtaaatgctttaatcgacatgaagcttgagaaacacaaaaacttaagggaagaatctggagtttactggcgagagatttcagatgggaccctcaagttcgatcgaagagaaacagaggtagaatttatgctgtagaacagaaagatttcgtttaataacattaccacaaagtacgtaattataattcttttcaatggttctgaaacaggttgcagcactaaagcagctcacaaaacaagaactaatagattttttcaatgaaaatataaaagtcggggcacctcataagaaggaactgagtgtgcgagtgtctggtaacctccattcttccgactacaaaaaagataaaactgaacctgcagaacccggctcagtcagaatcgatgatatcttcagtttcagaaggtctcggccgctttacggttcattcagaggaagctttgctcatgtgaagttgtagagagattaactccctgcgtgaacttggcaaaaagtaagagcatttgaatacccatctgaaagctcttgtcctatcttaatcattttttaaagtacatgttattcagatattttacttggtcacagtgacattttttcttttttaagtgttggaatcattaatatcgattgctacttttaaaatgtcaacacatctacatgaacatcacccttgctacaaatagaacaattattagaacttggggttaaagaaacaaattcaagtgttactttaaccccatttttttttttggaatcattatgtgatatgttcactcctcgaaaagattatatattaaaaacataaaaatctaaattgtttcacagtattagttgtacttattaacagaaattgctaagtggtagatgatttttggatagaaaatgtgaccaatattatacttaaaacaaaaagcatgcaattataagggtccgtgatcaaaaatttcacattatcaactttgctttttcttacctattgtgtacatagtttaaagtaacatgtttgtagttgatgaagggattgtaaacccagtgtttgacagtattacttttctgatcgaaattgagtgatgcatgataatttttcaaatcacacaattaattacaaaataaaatatgcaatttatcatgggtgttcatgttcaataatagtaacacattattgtatgtacaaataattttcatcagcactcgttccgaatataatctttacatatatattatcacattttggaaagaaaataaaatgtacatgacagggccccaaaaataaattcaggcataaacacgatcatccccctttatacaatgagtattaatcacaattaaattttgatggtaaaagatggcagaaaatgtggtat

SEQ ID NO: 15242 - DNA, 5356 bp, Cannabis sativa
agtttatcaattcttctatttattatgttcttgtgtaactatctattttatctttctccctttttcaagagacttcattgttaatttttcattttgaaacgaggccctactgattctaaacatcaatatagaatacgaccattattaaaaaaaatgcgtattaacaccctgtattatagcacctaaaatatataagtataatctcaaatttaccatccagcccccaacaataactaaaataacaaaaaacccaagtagttttacatatattggttccaacaggaattttacaagtgaatagtttgtttatataacgagattcacgtgatctatcaaatatagatttttcagaaccagtatctaatcgacccacctttatagctcattggtttttttctttgagctttaattttagttaattaagtttatgaaaaggacacttacacctggaatattaatggaatgagtggtagtttcattctgaggtgagtaattaagcaaaataaacacagtaaccaactcaaacaatcagatgaaaaaaagataattgaccgtaagttatgatgactaaggattagttcttaaaacttaagtgttcctattcgtgtcttgatgacaagcataatccaagaactaccatgatggactacctaaaacagccataaataaaatttgccaataaagttaaaagaaaatattgaaaatttattagcctcgtgattcaaagtccaaacaccatgtaaattccttctctactttaaaccactaaataaaaaaggctactaagagttggtctttttccattagttcctaacttcctaactcataattagtttccctagagatcagtttattaagacacttttggtggcagtttctaaccaataagtttccatttgcaacatgataaacatcattcactttatagaccatttttagaagtcaatataatgctgaaatattttgccactacccttgtaatagacaaagtataatacttttatcactagaaatctcaacaaataataaatgctatcaatgttgacactcaattaatgaagttaaatcatctctaataaccactttctttgttgttgctaactaatatgccaataataaactaactaaatgcagtaaattaccagcactaaattttctaaaaggatgcttatagatagaagacttgcctggaaggaaatttgctatcaaaccgagcttcaacacgaagccaccaaagcaaaacctggcgtccacagcttccaagcggctcaaccatggaagggtccttcaacaagaataagggactctctaaatcctcaccaactccatccaatgtatctagatccctaacccattccggcttatcttcagcatccttccaaagcatcttggaattcaacacaaatccagcccattcaagcttcctgggaagcaccgctgcccgatcatcaatgtaaattgccttctttcccgaatgtggcaacgaattaaaggtgtgccaaccaattaacttattggatgagttacaagcaggaccctgaacaggcattggcaagttttgctcatcttccttcttctgttttgaagataccaatgattcacttgactctgtatcgcccgaatgagcaagaattccaactgaaagagcaccaaaccatttcacgttctggatctcatcaaagagttccatactatgcatattactgtcatcagcaaacatcacaatcccatctagcttctggtctcttacagttctgtttaatcatcaaaatcaatttcaatttacacactacagaagtaacctaaacgttaaagagttcatttttgttgcttcaattagatcaaacatcacaaatgtacctcaattttgggaaacaaaaccatgaacttactaacctcaatgcacgcagtctcattcgagcctccaatcgatgacgaccttcccaagaattcggcatccgctgctcaaatccaacgtgaatggtcctaagccctgacttgtcaagaatcgaagcagtctcattgctagctccaccagcctcaaccacgatccaaacgacttcataagggacaagcatcaacgagtgcatcaatccagtcatatgaagagcctgaaacgtcctcacataagtaggagtcacaacaatgacagttttagggttcttgacaccaaattgacgcctctgttccctctgaaccgtatcaataatctgatgagccttcataacctcagtcggattcggatgcggccaaggtctgattcggatcccgtgtcgtccaaccacaacacgactagcagaagtaccacctgtaagaacactcctattcatcggaaattcatcatcaccagaaggattcgaacgtcttaacaaatcgaagggaccaccaccgagctcagaagtagaccgaaacggcacaggataaagaccattagtagaagaagaagaagttgaaaagagaaagaagaaaaccaaacgagaaaaacgaaatccaagaacgagacttattaagcaacaaagtccatgtaacacaagccaaaagatcgccgccggtgacctaatcgaaccgtccgatgacgaatccaacggcgcagatcctctaaaactgctgttccttcgattcatgtagctctggtgcaaagccgagagcttcattccctcttcttcttgttcttgttctctctctaaaacctactactagagagagagaaaaagtaagagaaatcaaatgaattagtagttggagagaagaataggaatcaatgtgtggtatttgttgagtgttgcttcgaaattgaataatggtttttttggaaccaaatttctggtatgcgactgtgagaggaaaaaagggtttgaagaagatgatgatgatgatgatggtgatgggttaatctgagattactttaagtttaagatttgattaatatcaactaatctgtaattagtgatttacttaagttaagtgttcatgtaagaaatcagaaagaaacacacagaacattggcccattattttagggaccctaattttgggcttctttttatgtcttaaaagaggaaaaaaaatctattcaatattattttttttgtcttaaaacacttttattttgtaagtattataatttataaatagactaatttaagcataaatattttaaataaatgtaaagttattatttaagtggtatatttaaattaatttattttttaaaaaaataaaaatttattatcacgttataatttttttaaatttaaatatttatactacaaattactctttataaatatatattattattaattttttatattatttatgtacaaaattattctctaactatagaaatattaagatgatttattaatgtgtgcatcaattatgtgtataattagattctaaagagtataataatttttaaaaattcgaacattaattctaaaattacagatacattgtcccatattttattgttagaaaattatttttataattttttttttttttggactctccaatcacaataaattaattcatgagcagttttgtattgggaaattatttgtaaaaataaaaaaatgcaactaaataagtaaacttgtaattattttcaaagttcaaaaggaaatttttacaaaaaaaaaaaaataataatttaggggataaattttcaggagctgaaaattcaatttatttatttttatttacgttgattaatacttaattaaataaatttaggctatgttttattaaataaataaaaggtaaaaataaagaaataaaggtcaaccagtggttgatggagtgagacctaagatggtgtgtgacagagacgcgccacctggcattggaaatttggctattataatacctaaaacggtgcgttttgtataagaaaaaaacactattatattattctatacccaaaattgagtttatggttatgatatgtaaagttaaagccaattatatttgccattcattttaggctgtttaatttattattttattttgttttcctttggttgttaggttatttaaaaaatcataatcattattaattataataagtcttaggtacattgataattagggtttgttgagatcaagccaaaattacctactatttttttttttaaaaaaaaaagattgattaagaaacttctagtgttaataatatcaatgtgaacaatggtcaaattaaataattgccatatgtgcaaattatgttcaagaaattttaagcctcttgatttttttttttttttcatatttatatgaaccatgcatgcatccttacaaattataaactagtttagtagtaggtgtatttgagtaatgaatatatatatatatataatatatatatgtatatatatgatcatgggtgaataaaataatttctattaaagcatgttcatgagagttgacctctaaaatttcaagtatggtcatgtttaatagaacaatatatagtagtaaaatataattggaaaatgatatatttttattagataatcaatgattaatctaattaattaaatctattgttattacaacatattattttctcttaaataaatccatttacaaaggtagatttctttcactctttcaatagctataaatttattagataactaaaacattataatctataatgtatcatttttttttctttccttagagtaatgtagtttatatgttgaagtgataatattaaataaatgatatatgcttcattatttcaacaaaaaagatttagaaactactataggtcattaattatgttttagagttatttcacatgtgaatcttatttgtagttaagtagacaaaaatccttattaaattgaattatatatgtttttttttaattaatatttattaataatagacaaaaatggttgtgatatgaatgttcataatagatagagtctaaaagggagaagaaaaaaggagtttggtgagtggttgttaaggtatgactcacacacctcaatatggagtaccaatctactacaccttaccacaccaatcttatcatgaaccatcattcattgttgtcattttggtactatttacaaggtgatattatattatgacaagtttttctttttaaaaaaataaataaacatcattacatattacattaaatagatatgaattgagcacaaaatatgctaataacatttacttatatacatgcattattaaatctaataataatcactgaatacttatgagaaaagagtgttaaatcttttcactataaaaaatttaaaaacactgaaatcagttgctaccgaaaattgagtacaaaataccttcttgccttgtaacagattaatgctaag

SEQ ID NO: 15243 - DNA, 9842 bp, Cannabis sativa
atatatatatctcagaatcagtgctattcaaccttctgataacaactgcctttaaaataaattgtcaacttaccttcgtggtactaactgagttaaaaccccacactgagtccaagtcatcattattgtcaaatgtaccccatgctggttcgtcgaaactcttatcaccagaaaatagagacccagcaccaccaagatcactgcataaattgatatgcactagttaatttttcaaaattcaaaatttagacaaaaagagctaaccagtcaataagagaataaatattattgcactatcaaataaattaactttaaaccagagttaaaaacacaatgataaaatatcaccctgcaaatgagtgtggggtaattctatccaaatcaaatcaaaatctgatgataggctctatgtcaaagatgtcttgatagtttaaaatcttaaatataagattccacagtaggttgactaaatatttcaaacttagaaacttcactatggagttatcagtaatggagatatttactgtgtagaaagataaagtcctggtttttacaaaatacctatgagtttccttatcacgaggtgaggtctctgaaccaaatgtctttccaaaatctgaaaattctccagatggacttccagcaacactgcttccaattggactgtttggagtgcttttggccaagtcatcaattttatcatgtgcagaagcagaaccattttcaacaacccgttcatccacactctccggcttatcagatttgacatccaagtcgggtgaagtagcagcttttggactctcaactactgaggattctttaatctgagacagtgtggatttttgttttggaggtgctatggtattctgcacatcaagggtgagctccttgacaaaagtgaatcctgaaaaaaacaaagtttagcatcattatgaacctctcctttacaagaattaagtcccaacaccaaagtgtcacatcatgaaaatacgagattaaaacaaatgcaggtaattgatcagttcaggtcaactaagtggtacagtgataagttgacactatgacatgacagttctctacatcatggacatgatgtaaaataatagtggcattatcttaacacgaattgcctaaaaaattttgtaaaccgttataatataccttcatcttcaaacttgtcccaatcttcatcccagtcagcagctccttcttggatcccatgctgccagcctgtttgttttacaaaaaagagtgtgtgatacagcaagtaagagataggagacaataaactattgacttaggtgaaaacactttatatctatctataagaagtaagaatccaagcataacttagaagtttagaaacataacatatatgaggatcctataaaatgcagcaaagaaacatgtgcataaatgaacatatgcgagtgtgtgtgtgtgtgcacgcgcgtgtaaagcattgatcatcccacagttgccaagaacttgggcaacaatacttgcactatggaaatcctatactatttcaaatgccaaccaatgatatctgaaaaattaaatcattcagaagatgaaaattgcccctagatcagtatacacaaatgatccagtatagcaataactttccacgtattttcaaatgatcctcgatcgtggtacattaatcagattctggaacctataacagaaccaacttaaaaataaataccataccgaaaggaagctcagtcaaagttatgggttttccacgtagtccgtatttcttgcaacgctcattgagggatttcacaagttcatcaagatctgattgaatacgatcaacacgagcctgaaagtttcactccacaacttagacaaagtctgaaaagatattcattggtcagaaccaccttcaaatttacctgaaggactccatcagcgctgccatcctgttccatcttaacaatagcctggtacagctccatttttttctcctacatgtatacatgaagtttgggttatataatgaaagtttcatgcacataaatttgcacatgaatgaaataatttaagaggaaatacaatgaaacacgaaaaaatagattgtacaagtaaaagtatgaaacctaaatgtaagaacatggagaggaatgtaaaaactgatcattgtgaatggtaagtacagataccgacccaatgctggtcatttagttgtacttactagtgtgactctcttcagatattggatcaatttaatgtaaccaaagtaaatgtgagaccatggagaggaatgcaaaaatgatcattgtgaatgataagtacagataatgaacccaatgctgatcgtttagttgtacttactaatgtaactctctcttcagatattggatcaatttaaaacattaataatttgacagttagaaaggggtaaaaaaacaaacacataattgaataactggcaaaagagaaccactaaggctatcaatttgcaccaatcaccataataaagcctgatacctggatatcgcgaaatgtagcttcttcaatagtgagcttggaggctacatctccactttgtttatatttctcttcatatttcttcgccagggattcaacctgcaaaatatgcagtctcaacatcaaactcaaaataaacttaatcagtgagaaaatgtatgcaagtcaatccttcaacaatatacctcttttttgtcagctgatgacctttccataatctcattaacacgattgtcacacctactcttgtagagaaccttgattggagaaatgcaatttagttaacatcttagaaagattcaatatttttaagcgtgcaagtcaaatttcttgctaatgtttctactctcacagttatattgagatttgacattaaaatatacggcaattaaaaaatatatttatatatatatatatacaggataagtactaatcagaagcatcagtgtatatagcgagattaacaacacaggggttctacgtgttctgcatttcttgacatcaatattagaatcatgttgtggaaccaaaaagagacgtggaaagagtagacattaatggcgcatatataaattaatatgagaataaacattgtcctactgaaagacgctaatcagttatttatttaaggtacttgtcaggctatgaaggagagtctgatctagaaagtcagaaaacatcctactatttccaatgagaaaataatgtaacagatttttgcaaattatttattgtgagccgaaactgccaagataaaatattgactagtaactagtaaaaaaaacactcttcctcagccaattgtatacaagggcctgacttccttaggcaggaacaaataataataataataattaggacttacaagttcttgcatttttgtacggtaaaactcaattttctctcttgattccataatctctttctccagttcctccaccttccataacaataagacagctgagtcaatagaattctatccctaaagatatgtagaatttcctactaaaaatagcaatatatatcaatctctactcaataagggaattctcagagatacatatatagctagcagtgcaaccaaatgctaatcgatgacaactttatgcatcataaactcttttcgtaaaaagagtccaaaaactgacacaagcattcatgaaaagtttatgggaaggcaactgcagaagtacctttttatctgcttctgtcgcttctttaaactttgaattgagtgaattctgctcctctgtactgagttgatctacgaagtgtttatccaactccggaactcttgattttggctgagtgactggtggctcctcatcagccttgggaagagcaactggtactggtggtcttggtccaactggaggcatcatgtgctgagcaccagggccaggcacaacatttggttgctgaaaaccttaatggatagaagaataaaagggttaaatcaagaaagtgaattttcacaaaagtaggattctatattcacaagaaattatccttttagagcgataccagatggtctccaagctgcactgccagcattgttgtaattactagtaggttgaacactactagaaacatcaaatatcacgttacttggaagagctgctggaagaggatgcccttccctaaacctctccattaagtacaaagcaatacagaactccctaagtgatagcatgctatcattatcctggtccgataaatcccatacttgctttaaaacctctggtagatacaaacaattaaaaaaacctttcataagaagctttcaatgcaaacgcataatatgtaatttagacacacatgacaagatcgaacagtattagaattctgggttcatagctttcaacggaatggaacaataagagcatggcatgtgtactaaaaacttaccctgtgtttggttgaagagaaaaatgggaggaaagaaaagttgagagacaaaagtggagtgaataaaaaattgtttgtttggttgattggtatgaaaataggatggaagagaaaattggagagaaaaaaataaaagagttggtccaccaatattcttccctctcaaattggaaaacttattatctttgtttttaaattcaatataattaatataaaattgttaaattgtaattttacttttacacttattcctttcctcccttcttaccaaataacaaaagagaaatgtactttccttcctatcaccttaattttctatccctccttgtttttctttctttcaaccaaacataatgttaaagattatataaaccccactttcagagtgagaagcccattttctaatccgaataacatgcacacatgaacatcaaccacttgcagaagtaaatcaaacattatcagcttataattaacagcctattatatgcaagcataggcagagagagggaaggtaagaatgatgagtgacccttgggaagtgagaagcgggtagcatcaatctgatttgacatgtggaatacacaaagatatggtccaaacaaaggatactcaaatggtttcacatgtcaaattaaattaaactgctatacacatatattcacagaagaatatacctaagatagcatatgtaaaccgacaaccaaagacataaacaaacaaacaaaaactaagaaatgacattgtgattatatatcaaaggaatcaagaccgagtcatgtgcgagagctaagctactttgatttctaatatttttgcaaaaggtcatgcaatgtagatctaaagataaactcaaaaaattcttcaaagtgataacaatatttcaatgtgttccgtcatagaaatataaaacagaaatgtatgcagcaaaagtctttggttataaaatgataaaattatccagatttagaaataaaagtcccgaatttatgtatacaattaagggagatcctacctctcggcaatctccaactaagaaatagattgcgtgcttgttcaccagtaattttcccatctctgtctgtgtctacttcaacaaatacttttgtatacttctgaacattagtctgagtcatcttaggccatgacaattggggctgactagttgcagagttgccagttgtaggtgagactccaggtaaagatatagaagtagtctgagctgagacctccctgtttggtctggcaagtgactgagctggctgaaactgaacaccagctgtttgacgtgttggtatactctgtgctgaaacatgggcgggtggtctaactacgggctgagacccaacagagtttggaacaagggcctgtgaggcaggtaaattgcgtgcagtaaatgcaatggaagcatctggctttggttgtgatggggttgcagaaaacatatcacctccaaaagatgagtcagaagcaaacccattcacttctttagtagctgtaggaccttgtggcttcatcccagaagttatttgtggcctaggtggtagggaagttgttggccctaatgttgcaatcccaaatccatccaaacttgtggagggattaatccctgtactttggacttgtgatgttacggtaggagttccaacagtacctccactggcccaatcacttggcaaacttgagcttagaggacgaggcccagccacagcacctcccctaggaaatccttggctggccacagtcagttgagaagatgaagcagatgtgggtagtggaggcttcattaatttactttcgtgagaaatatgctggttcacgcctacattaacttgtggccctcctaatccagtatttggtgataatgtcggagtgacagcactactctgagtctgagtggtagatgctggtggagcagaaccaggcagcggttgaggtgtggccgcaaaatttatttgcggtggcggtatttttgctgcagctggaccatacaatgcagctttcacaatctctggggttagttcacgtttttgtgccacagtaatcagtttaagggcattatagaactcagcacgaccaaggaaaccggcctgtctctggtcagcatatgcccatatctggcaaaaacgaaaactataaatactagagttgaactatagcatatctttcttacaataaatctcaccaaatccaaaaacaaattaaatgaacttataatgattattgtccaaccccagtgttatacattgtaggagattaattacagcataaaaataggatcagataagcacaaaatcgagctataatttacttgaatacaaaccactaaataattgaatcatattcagcctagaccagagtaccaaatcaagataatctcatcacttaaaaccataaatagactaataattcagacactccgatctatatcactacaacaaaactccatctcaattcaattctacaatatccgactctaataacacaagaatacatacagaaacacacataaacatactaagatacacaaatacgcatacaaaatttaacaataatattacctgagcaaggacctgtttgggcaaaccagagccctggaagaaagggacagcttcttggccactaatccggccatcgcggtctaaatcagctcgccggaaatacgcatcgaatagatccacattcaccggttggttctgcggcgaagtcatgattggaatgtgattcacagatcagaacatgaaatcacccaacctagataaccggagaaaaattcaaagccctagatggagaagaggagtggaaagattcagaaccttcttcttcttcttcttcttctccgattaagaagaaaggaaagaaatgaatacaactgtagtgatggaacaacaatgaacgacaaattattttaatttgtgttttttattttttattttttattttttaggacaaaattactcactttttcattgtaatatttcaaaaaagacactattattctggcccgggcccagcccagcccggcccattagctgctaccgaccaatcacaagttagaacgaatatcgtgtgattaataaaaaacagacttcaacctttgacaaattattatgaaaactaacttttttttttttttgaaacattatgaaaactaacttaattgatgtgtattgataattattgggatttttacccaaattgtcaaaattgatgcaaaatctccttatagtttaattttatacacttatcatgatcatcacttttgtttgtaaatttaaagctacacagttagatgtgaattggattataattgtgtacacatgtgtataagtggtatgttttcattgatttggaggtgtaaagtagtaatctcagttgacattttattgtaaaatttaattgacgttttaaatttacaaataaatataaaattaagaggtattgcaaaaaaaattcacggactaagtgtaaaaaattaacaattaccacacgatattcattctaacgcattttgaaattctttggtagtggggcctcgatgatttgtttgacccgtggctctcggttttcgtcttttgagtccaagagagctctgctctgcttttggaccaacttcgtcaaagcgacaatttgttcttctagcttttcggtgtcattatctagaacttcgcatccgtaaaccttatcattcagatgattctggagatcgttcccttggagactcgttttctctcctttggccttttcatatttggcgtcgagacgtctctaaaggtctacagtagaccacctgtcttcagagaaaacttattccaccccatagccctagttaattgaatcacttgggcagtttttccttcccttaggctttggcacattcatactaggccttttgtttggcgcaatcttgccttgtggagtagaaaagcatccaagcctagaggcgttggtggccttctgcatttgtaagggctcatttgtcgtgttcaagtttttcttggggtgatgtgatagttttagtttgaggctcgcctaccttcgccttctccttgtcctttacaagagttgaggttccaatgtcaatagagtttgctctattttctcagctgataagttcctctgaaacatcttcttcaaatcttcatctatgtcacctagttttgctcggaggagagccattattttttccattcaaggagaaaactcttcttgacgtaccaactattgttgggtttcgaatcaggttaggatcctgttcatagtagtatccatccttgtagtaggcatctttaatttctccagcatctttttcatcttcttcttcatcatcagggcacttattaacaagttgttcccgacgttgggcaagctcatctttccggtcgtcagtttcagatgtttccccatctcccgcttaactcaactgagggtgccctggagggagtgggttaagattgtccgtgacgatgtcaggatctagccgaggaggtttttccacgatattttttctggtagccatcattgttttcgatggtaggtagctttgattctttctacaactcttaatgaaaccaccaaaatatttatcgatattttcaaaaaccaaattaagtaagagctaagaaattaaatgattatttaagtaaagtaagataaaaaaaaatttacgtggatcaggcgtcaatgatccttagtccacgagttagtgtattagcctttaaaagctttgaatgtattatatataggtttttgcggcttaaagaaccatagttcttgctatagtatttctcttctaagtttctcttaatgaagaagaaagcttagagaatatctctgaaattgtttttatatgttccctttacatgaaggaatatatgagtttatataggcttagattcgggtctgggcatacccgtgacacgctagggtttttgtgcaaaatgggcctattgttagggtaacatacacgacctcgaggcccacgatagaattctggctcgtggggcagaagcgttcgtacagtggaggacccatgcaatttggacaagtgtcacacatgtgtgcaactacattagacaagaaggccaaagggatgtcgttggacaaagggaatatgtctctctttgtggtacatgcactaccaagccttgacatagggacgtgatctaatttggtaggctaggcgtttgagagcagtcacgtcatccaataagggcttctggatgtacctcttaagcttcccttctgggtacacttcattaatcatttggaggacgtcgttcgcttcattatctggttggctaaatgggcttcaaagagtaagaggatcttacttttggaagtgaggttcctagagatgtgatggcctggggccacctctagtttggacttggccttcgcatgcaataagacttgggtcgggtattacatggacc

SEQ ID NO: 15244 - DNA, 5217 bp, Cannabis sativa
ttttttgaaacggctataaaataatattgtttacacaacataaaaacaacattccatattttttcttaaaaaaaaaacttcaaaatagacacttttgtccttttcgagtagtactattattacaaatcctctaataaatcgcaaagaaaagttttggcccagtgtcggcccagcccaataggttcacaacctattcattttaagacccaatagcgcttaagatgggccagcattgtccagtgggctggtcgtataggaaagaaatatgtcgtaaaccagatttgaatccctctgattgggagagagagagtaacatgggcgttgacaaggaggagaaagaggagagagaagctgaagaagaagaagaagacgaagacaaagacgcagagatttccctctgaattcgccaacgctcaatctccgatagggtttctctatccattatttaattctggtttcgggggttggtgaattagggcatcatttccattggggattgattctctctctctctgtctctccggaatttagagaatttgaattttcttgaatcccatttctatactctatctatgttatatagagattgagcttaaagaaatggcgtacagaaggaagcaacagcagggattttctaggcctttagccacaagcgttgatgaacataatggaaattatttgcatccaccgccttcttcggtttttggtgatgatgggtattcgtcttcctcatcgtcctcgtcttctcttgctgcaaaagcaataagagcttcttcagcctatcgagactcgtctctttcctccgcttatgctggcggtggcgttggccgtgggataaattcctcaacaacaacttcaacttcctctgcttcacgatatcccaatcctactgtaccaacctcttcttcctcgtccttcccgaaggtaatatttctcttctgctgttgaatttcttaatagttttaattgacaatgatcataactcaagacatataccttttcaccaatgttatgactcacattgcatttcaatacttattttctccttgtttcttagttcttgcagagaaaatgtacttagtttcctccttgaagtcattggtaattcatactatttcttttttgttcgtgttgttgtggtatttgtggatgtaggaatcgaagccttatgagtacacatcaatgaaaaatttaaacgaatccaaacatagcttttggggtgctttggcgagaaaagctaaatccattcttgatgatgataatgaacctcaacaattagattcacctcgaagaacgcacgcccaagtaccaactacagctacagctatgagagggagggtaagacaatactgactctttgagcaaaaaaggataatcttttgaaaaggctttgtttgggggagggcattagttacttccgaaataattttgctgaaatagtttatgctaaatagtcagataagtgatagtgttgactcataagatctgatgcttttgtttaattccccattattcagtaccatggcacagagcagacaagagagagccttccaaaaacagaaaatccagcattgcagaagggattaaatgcactcacgtcatccatcaattatattggtggcaccattgggaatgccttggaggtcagctttctcccataacattttattagtaacctaaaagtttcatatggttttttgggtagttgagttgttgcagaaattttcttgctgtaccactgtaatgtatctgctaaaccagtaggatttttgtattcccataaattgcgtctgtctgctctatacttctatgttttaatatattagcttttgcgtttacttttttggaagtatattttgaaatcctttaggatatacatgtgtctttcttgttagctaatatgagggaatatggaaataagaaatttgtttgagacgaggaaacaatgtcatatgcttctttgcaactctttcatagaagaagcaatgtaggcttgaatttctctggaagctcttctgaatgctaaaaattcttgtaatatcaaaaaaaaaaaaaaaagaaaaaggtccaagttggttttcgatgccacatatctaaattcatgctagtcaggtcacatatatttgtatctttctccaataaatcattttgtatttacatgtttttctctatgttgagaagctgcaaagcatgctaatataattacagatgttataaggctttttgtcatcccttttctatgttttccaggagggaattaccattgtggagaaccgaactgctggcattgttcaagaaactcgtaaccatataagaaaaaagtcaggcacttctgcggtgcaaaacccagcacagaactcgcaatcccagacgcaagctgacttagaacttcaattgaaggcatctcgcgacgtaaggtggcaactgtgtataactagttcatatagtaaagcatctgcatgttggtcccttgtcatgttcttttgctagaatatgagtgatttcggattgttttattcagacacagttagtatcatattaattctgacacacttactatatccatctgtattaatatacttggcacatctggtcaatgtgacgtcttgaatgattctgggtttgattggctgcagtatggaccatttagcttggtccaagaggaaataggtttgagcggaggagtttgagatctggtgttgtagaatgaggatttaccttcatcctaccctatcttatttgattagatgtcttgagtcttgagtaacgaaacagatgattgcattttggttgacactacaggttgcaatggctatggcagcaaaagcaaaacttcttcttcgagagttgaagactgttaaagctgattttgcttttgcaaaggagcgatgtgctcaactagaggaagaaaataaaatcctgcgggagaattgtgaaaggggagataacccagaagatgatgacttggtactatctctttgctttgttttaatccccttaagttcattctcttttttaattttcttttgggccagcaacactgaaggagttatggaattaatttttcattcctttggaaagtagaccatttgaaagtgatttatttagaaaattatttttttctactatgcttgaccacgctcaacatcacactagactacactaggtttttatgctgtaatggcagtatagttcagttttatgatatattttcttgggtatatgtccatcaggaatgtgttttaggttctaattgcatttcagtctcccaattgctttcactccttcacattttgaattagttgcagagtctatttggagtagatattatgtttttgtttgtgccatcacaaaatatctgctgatattttttgctggcttcagcataacaattagcattttagatttaaccaactcttattttacaagcttcatgcaatcaagctacaacatccagaaccaagaaagtttacaagcttagttgctaaacatccttacccttagcgatgtgtttggttttcagtagtgggaagtgttaaccttagtgaacatatttctcttgtgtatagatgtctctaattctgatgcttgtgtttcaatctcagatacgccttcaactcgagtctcttctggcagagaaagcaaggttggcacatgaaaactcaatttatgcacgcgaaaatcgttttctgagggaagttgtagagtaccatcaacttactatgcaggatgttgtgtacttggacgagggtactgaagaagttacagaagtttaccccatcaaggtataccttccagtctattttctgtttcccataccagcatatcacaataccagtgatagtcataaatatatctgttatgagcatataatattacctccaatagtatatgaagtgccataacctctttttctcaacactgtatacaacgcaggtaattccgggtaatgcctcgccatctcgagaaatcagaggggtctcctatagaacccaataaggttctggcttgctggctactgttgccataggataattgaagagaaattcaaatgcttcttattgaatggcaattcccatatattttatataatagttttgaggaaagtctccaactgtgtccacatattgttaaattcccatttttttcttttatggtcagtcatttctaaaaattggctgattgtgtaaaatataaatcccatcaagtcataaaatttaattcatttgactctgttacttaacttgctgtgcttaattttgtgagattattacttgggacaatatggtggagggacagcaacagcgacgaagctagaaatttatttgtcgtatctcaatatattcttttttttgcctgcaatataattttaattttaaggcataaataattttcctatcaaaaaataattgttttcttagtattttcctttgaatagaattactaaattacttttacaaatttatttatatttttgtgtgcagagtcaatacactgaggaatttttttcaaccaaaaaatcttatagtacatatcttgttaattcattttatatcgcatgtttaagacacactcagtcagagagataacaaaaatctaataaatctaataatataatctctttgagagacaccctcagattgagaattaactggaatgacaacaattttagcatcgctctttacaaaaaaaaaacaaaaaaatctaattgtaaacaccattttaaagtatacaaaattgccaacgcttcggtctcttcaaggaagaaaaaatcagccaaggatttagcaaaatatcttaacagaaagccatcaaaatcatgaaccaaagcctcaaaaccaatagtacttttttcacaacaaatagcagcatctacatttaactttaacaatccaacttgaggtgctatccaatgaataactcgtggggggagagaaatcttaattgtttgcttttgtgatttttgtgcctgaggccaactatcataatattgaaatgccaactcaaaatcgttgaagcattcctaattggggtgtcatgtttttctttgttacgttcagaccaaatgcacacagccagagtaatgaaaacacaaacctgatgtggcgaaaacactgacaagagataattaaaaatgtgggatattggcagctaaaccatctgaactttaaattttttaacacttaaccacaaaaatcgattttttgggggtaaaac

SEQ ID NO: 15245 - DNA, 2785 bp, Cannabis sativa
taattagcctaatttgttttattaacaccaatgctcactatttggggttcaaaagttaatgaattttttgaacattccttgatataccatttctttcaaagagtgtaaaagaaaaattgatacccttttattgtaacttggataaaatgtatgttctttctattgattttaaattatttaagaatatggattttacatatactttgttaaatgattctagttattaaccaaagtttagtttgcttccatttcttgaaattatttatcccacgattagcttcaaaagttgttacagtggactagtgaagtcaacccctaatggatcattgagaattcacaatacaaaaatctcctaggaatccaagagaaatacttgtaacttacaattaagttttcagtttctctatgatattctatttgaccaaacacataaaacacataatctttcatatttacttaaagtagaaatgaataaaataacacctcaccgatataacttatgctaaaagcatcatagcccctcttgtaaattgcacaccaaataagctagattacaagacaaataagcaagagctctctctctctctctctctctctaaatctcacattaagagcactttcctagagcagaacgttttgtccttattctttactcccataactatgctaactatgaaaaaacttgccatcacccatgagagagccctcgagttcaacactttaaccttagaattctccacaaacatttttcatcgtatattgattcttacttctatataaatgtctttacatacatgtcaacattcaaacactttacacttcgaaagagcacataacatttcactataggaagagaagagaagagaagagagcataacatttcactaaagagagagaaaagaagagaagagaagagagcataacatttcactaaaggaagagaagagaagagaagagaagagaagagaaatatggcctgtgaagctatagaggtgatattgcataggcctgtctttgaaggaagcctttcaatgcatgacatagagatcgagagacggccctaccaccgcagttgtggctgtgcgctacacaacacaaaggatagctccaccgttgcttgtactcatcatcggaacatatccttccccaagagaaatccatccatcaactcttcattattgacattgtcatcaacttcttcttcttcttccaaattctcttctcaaaactctagtcttattagtaactttcatgtcaaccatgactgcagaagacatcaatgaatggcacattgccatgtagatatgtgataggtaaatatttttattttgatcttttcatgttaagaggcttagtaatgatgaattatgtaaaaggaaaaagaaaaaaggtttagaaattatgaaacattttttttttcctttctcttgtcacttttacacttcttgatacctcaattaaaaaaatttgagcaattttcttcttattcttctcatcatttttatgtaaattctcattttaagtgctacattttctttatgaaccacatttcacttacaaattacaatagtgtttttttttactctttttgacaacattataaaattaaaaaaaaaaacacaaacaaacaaataaacttgtgatttttttctactctgttttggtgtgaaaatcactaggctctcacttctatataatattttattactttcacaaaggagaaagagtaaagttctccttgttttctcagttaatctatatatacataaattgtagtcttttgtcttgtaagattttaaatctacattttgtcttaattgtgagtaacacacatgaattcatgaaagactcttccttttaaagacatataaatataattgcatagaaataatcggtggtgtaaggagttaggactcacaaagttaggttctactcataatttattatatgttgtaagattcaacactcatcattgttctaaccacaacacgacaacttttgattcatgcttccatagagttgattatttaagaaatttaacaatgtaatttttttttaaccctactcagctagctctaatttaaagaaattaaggcaatgtgatacaatgtagtcacaattctagctggcttgtttattttatttttatttattttttcaacatgaaattcatttcaattgagcatgatataatacacaccgtatttctcaatgaatgagagactttagttttgtaattaacaacataagcttactttgttctctatgatatcacctaacgtcacattcacaaaaagtttttagaatctaattgttacctttttttattctattatttaaaatatattactaaataaattttatttttaatgttttaccttcaatttttacattacatcatacacaatttttttatttttcttctctatttcatttaaataaattattatataataagtaatgtgattagaaaagtcaaattactattaaaaaacttttaaagaatattcatctaactaaatatggagaaaattttagctcaaaaacttgtgaggtaaaataaaaataagtttaactcatctcatggagccaatatttagtatctttctccaaatttttatattttagttattataaaacacaagttgagagtattctaagagtgtttgatattattttaagatagcacgtcttagaccaataaaaattgtgttggattagtatatttagcacaaaaaaagaatttgtgatgtatttgcatcaatttttgatagggttaatttca

SEQ ID NO: 15246 - DNA, 8469 bp, Cannabis sativa
gcaaccgctcttttattggatcgactatacatgacaagattttgtaaggcgcatatggctacaactttcatttcatcagttggctgttcttcaagcacattaaccaaagcacggcaagctgaaacagcatcagcacttcgagcaagaccctcattctggaaaagatcacctagagccaaagtagccagtaatcttgcttgctgagcttgggtttggggatccaagaggtactgagacaatggcaagatggcagtctttgtagctttagtttctctaatcttaacattgttcagcagtacctccaataatcttgcagcagtctcctcacactggtggcatctgagaagctccaacagagcctctatggcaccactttcagccattgcctcagcagtggttgcatcatcactctccaaaactagcagagcattcaaagccccagttaccgtaccttctgatccagaacgaagcaacctcaccaacacagcaacaggcacttccaaataaaattcagaactaaattgaagaatactggacaaaacagaagcaccagactcccacaaagcatggggaagtgaaggatcactttgtagtatcactttggacagttctataacaccaccttcttttgcaatttcattgggccatgttagtgcaatactaacaagagcctttacagctctttgctgcaatatgtgaataccagagccaagaacgcgtattagaggagcaatcacttggtgtgtcacaggatccttttgaagatgttcctctgaaagcaaatgtgatagaagctctgctgccaattgttgtactgcaggagaaggagaatcaagtagcgggataagtggttcaatagcttggtgagatgttaaagtataatcagcacgacattgtggatgctccaaaatgttaacaagaacttgtaatgcactatgctgtccatcaggaccgaattctgatcttgttaacaatacgaatagaggctcaaccacttttgcagcagatggtcccttagcaatgctagcattgttggtcaatatcctaagcaattctgcaaaagctgcacagagaaaatctggtgcttcatgcaggatatcaagtacgctttcaatcactccagctttcaccatttccatcttacaagcaggcctgtctttccctagcttcacaagagctctagagatagcctcatgaagcaagtaattcttaccataaagaaggccaacaagaggaataactgcaccatgcgcagcaacaagttctgccagttgctcatcatcaacgagcttatccaatgcacggacaactgaatgctgtgcaggactaaactcacttacaagaagagacaccaaaggttcaacacagcgtgcagcagccattgtcgacctgattcttgtatttccaaaaagaacacagcacaattcagcagcatctcctttcagctccattgaacagctagatgaaaggattctgcaaagaacatctacagcgttcatttcaacatctgctactgcaagggctcttgatgggttctcactcaacaacctaacaagtgcagcaatagcagcatgttgttctctttccaggccagtattgagaatctctaccaagggctgaacagcttgccgagcagattcagcattccttatatgatcagcagaaaacaagctttcaagtgctttggcagcactatacctagctgcccttcctcctaaccgtaaaaccgcaacaagttgaccaacagaaccaaatgcagattcatgtttcctgatttcagcactgctgaagagaagacctaacagatcagtagcagcttcctcagttgcatcttggggaccaagtgatagatacttggtcaaagcctctaaagctcctgactctaccatgacaattttgtttgacggacagtcctttgcaagctgagtcagaatccctagtgccagaaatggtgccccaggacgatcaggaataggcttaagaagatcaacaagtagaggtattgcttttcgagaagtggcaccaacccttatgtcatcgactctaaacaacctctcaagagcaacttgatcaggataacgcaccaaaccaaactcctctgacaaatcaagaagatcgcttatatcaccatcagcacaaccaagtaaagaaataagcccacctgctgctccagagtttgcaacagataaaagtgttcccctgctaccattgcaaacaagactggccactgcctgagcagcaaaatatttgtttgttgagtcctctgaccttaacatgttggcaactgctgggatacttttcattgttgcatgcgatcttatgatatctctgtcttggaacaaaattgctagcaataaagcacaaatccatatgctgttgtcttcttgaaaatcaatctgcttatatcagcacagaacaagggagagaggttaatgacatgtagaaattaaaaattttttttttttttgaaagaaatgtagaaatttagaattgaattgatacagtttgctttctttttctcttatcttgaattaaatacatagtcaagaaatttagggcattacctgagaatagcgagaagagcaatttgagatcctgtctgtgaggacctcaacagctccagcctccataataactattttgctcttttcatcatgacatgcaagtacagaaagtaaccatatggataaatcaacaccagaaataatggctgtgctcatagcagattcatctttccttgtttcttctttagtatgtctgaaaatgcaaatggactctttgtcgttaaccactacattttctgcagaagactgagaagaactgatcattacaacaagagactggatgagaagggcacatgaatttgactgactaagatcttccaccactctccggtgactaacttttgcagcacaaataagaagtgcaactcctccaatcttaactttcaagttcgtagaattgatcacccttttggcaattgatgatatgcatccagtggctatagcaactgtgtcccccagaacaacaggttgatctctacaaagtcgtgacaatatttcaatagccttgtcctgcaacgtgggtgatgcatcagcaatagataaaacaataggggttatgcttttggggtagtcagccaaaactgcccatgcaggtttgatctgaccattaactccttcagacctggacagaatagcaagtgcatccagtgcttccgctgtggcaatagatccactgttagaagattctataaaagaaactaatgcaagaacagttccagaacgattaacacaatcatttattgcaaagtcaagttggcgagactgtagtagacgagcaattgctgctgcagcatgggttttcccagagacagtgccctcacgcaaaacccttgtagcgggcaaaataatttcttcagctactgctttctctgaaacttcattatccagaataagatttgccaaagcacatgttgccagctctgcaatttctagagcagaagaattagcaaggataattaatggagacaatgtatctctagcaatagcagccacatctctattctccttaattgaaagaaagattgcagcaaggcaacgtgaggcctcaaccaatatattttcagattcaacattgagcaacttcttcactgacccaagagttttaacagcaaagctactttcacgtaaatctttcctagattcaaatattccagctagcgcgaatgcagacttggcttgagtctcttctttggttgaattcaaaattttcacaattgtctcaattgcatcattagcagcactaccttcacgcaatatatcattgagaggaaccacggaaagcatacttcttaaagcatccagcacatacattttagattcaggaagatcactggttaatagtgcagtcagctggctaattgttgcagtatcagatttgtggattaaatgattcaaagtcttagctgcgatttctttcccattaggacttccattcttgagaagccatagaagtgcaggaacagcatcagcactttcaacacatgcacgtatatcttcactgtgattgcagagattcctaaggattgttgctgaatcttctttggctttcacggacccagtttctagaatctgaaccagaggagggatgccaccagcagcagtaatagcccacttactttcatcattttcattcgataacacacaaagaagtgcaactgcacattcctgttgctgttcagatgaaagtccaagaagagaaatcaagagttgaatcccttcacggccctgaagtgcacgccatagactgccatcattgttgcaaagtgtaagaagtgctcttacaagctcatcctgaacttcatttgttgccattgtgatcaaaccaacaagcaaacgtttcgcatcagaatttgcaagtttagctgagagtataggattcccatataaactggccagggcttctatagttcgttcttgcacaagaaatggtaaccgaggtttgatttgtgtaagcaaagtctgctcgacatccaaagcatctgaagctctagttgattctgctttgctatcatatatcatcagagcagaagctaaagcccctaaggtgtcagcaacttgggcaggtgaagaacatgattcaaggctttgaccaagacttgatatgacatatgataaaccaccagaaatgtttgctaaagcacacatagcattctcctgcaatgcttgagcatactcaccctgcataaattcttttgaaggggctattgtggcatttattagaacaggaataccattaaaattagctatctcacgtcttgcttctttgcactgggcagagagagatttaagagcccctgcagcttctgctctaacaggagcatcattaccaggtcccaagagcttgagtagttgtttggttgcctctgcagcaagtatcttagaagaaacagatgcatcctccatcatcacacatgccataagaaagcaaacattagcttgggtgcttgactgtccagttttcagcaactttacaagtatatccactcctccagcttgcaatgttgcactccagaatccctcagtgctagttgaaaggttcttaagtgaaccagtcaacaactcatcaactaaattaccattcttgcgcccatttcctagctggtcccaaagcactggcacaaccccttcagttgaaaatatttttgatccaacatgatccctagcaccatcttgagaaaccgcataaatagtctttgctgcagcaacttgaccttccgctgagcttgatttgagtaaaccaagcaaaggtgggatgcatccaccaagtaagacctttacccgaagttcattctccttacacagagaacctaatacagtagcagcttgtatcttcacaccaagcgatccagatcgaagaagagaaacaagtactggcactgcctgggaatgagatccaacagcactgaaagcattttcgcgtgtatcaacaagttccagcaattgcttcaatgaatactccttctcttgtacggatgaggaaccctgtcgtagctgttcaatgcattgggcaacgcttgccaatgtcccatctggatcctccatgctgctacgatctctgtaaaccatacaagcaagtgagacaaaaaacaagaatttaacaaacttaacattgaaagaacttgatttccattttgttaattgtggttggatgtatatgtttgtcaattcctacaataaatggtcatttactcagcatgtccctaggttgacagggtataaataaatttcattaaaaaaataaaaaaaaggtactcaatatagaataaagggatacagaatggagcatacagaaatcatcatgtcaagggcaagaagaggagtgcaactaaaaagcataaccatagccaatatatgcctttcaaaaggaagaacaagtttcacttatttagagcaatgaaatgttatgaactactttcttggaaaaagaattgagacattcgaattaaatgtaaagttacacttagcttagtaagtcccagctggggtttgaaccctagaaccttactcacacacgcactcaccccacagcttgagatagctttaagtggcaaataacccaactatattgtgaaagatggatataaaaatctggaatcttcataatcggtgattaacaagttgtcatttaagacatacagagtatccaagctaaggcagctctcattacatgaaatctgtctactatttgtacagaatgaggatactacaaagaaaaatttatggagctctgtaaactaaatgcaaatattaagggtggtcataggcatagcctagtggtttcacacttctcctcacaatgaggaggtctcaagttcgaatcccctccccaatgtcaaacaacaaaatgcaaatagtcagtagtaataattatatgaaggaacagtctaaaaatgacttcaacagtataattcaaatttcaaatctattcacatgcagacagatgcttgcctaaactaggcaatgttcccactccagaacgcatgagcatacaatgaaatagcttaacaacgatcaaagtttttttttttttaaaaaaaaaaaaacagattgcaaattgcgcataatgaaacttgaacaaaccttgaccccatctttgcaacagaaagtggagttggaggctctgaatcttgaactttcatatcaccatttctttcctgtaaccataaaattgcaagcaatgagcaaaagtaaaaaatccattaactgaagccaaagataaattatgactgattaagtgcacaatgccaatataagtggccaactattaactatccctaaaatagtatatattatttgcaagtaggtacttcagcaaaatcaaataaatttcagaaaatatccgctggccagtattgttgtttctatgtttatgaccaagattggaaaggcggccctttttttcctggtggaaagtatgtgtcacatttccataaaaaaataaaacgattaaatgaataggtaaataaaacaaaaactctgtagcatcccaaaagttgccaaaatgtgtgcatggattattccacacaaatgaaaaccagctttcagcacttccatagacaatcacagctactttagctcccactggttataaaacagctttggcattctacacataatagcatatcagttttgtacgctgaatttcctttgtttttttaatagatcttgcatttcaaatgggatccagtcccatctcacactgctctaaagagatcgatctcacatatctcatctcttcaattatcttactctcttcccaaaaaaaatataaaaagtaaacactaaaattcatgcgagaaaacgagcaaaaagagtcagtgacaaaccaaatcattattggccagactgctgccgttgctggcgaacctccaagacactgtggcggccagctttgcttcgcttcacaataccaaagaaaatcaaccaagaactctgcccttctccagatctgcttcaacaacaaagtctaaagcatcaaaccctcctgtcaaagagcagtacaaaatcccattgatcattcaactaagaggcagatcagaccatactaatggagctgaaatcaccactatatacaagaaagttcaagctaaatgaaccgcagccataaaattgaatgaatgcatagagcccaatccagttactgctatcaatgagctaacaaagctcaacaaaactaatctactattacatgcataactcatcacacgacttcgctttcatccaattatgctcaattttgatcatagagcaagcggcaacacaaaccaaagaagaaattaaacgcagcaaactcaattaacgataattgaatcaattcattaacaaaaaaataaacccccattaccaattaaaatccaatcacattcattaaaacaataagcttatagcaagatttggcttgattgcaatgaatccagagcagatcgaccacaatccaatcaagtcctaagctttcacaaatgagtcaaaacaaacaaacacaaaagaaaaccccgaaaacgaaagaagaaaaaaaaatgcaagaatcttattcaacatttcttaataagattccaaggaaaatcagtaggagaaacctcttcaccttaaaaaattcccggaaaattgcaatctaaaatgaatgcaacagaaagatagagagaggaagaagctgaccttaagagaaagagaaagcgaaggagagagaaatgtaggggcagcttggagtatcaattggtttcgtgaaatggaagcgagcgaaggagaggaagaagaagctcaccaccaaaagcagagagagagaagaagctatacatataattgtctttgtttctctctcttcctcctcaggctcagagagggatacgttattttagagagagaaacaagagagagagagagagagagagagagagagtgcgagaga

SEQ ID NO: 15247 - DNA, 7926 bp, Cannabis sativa
ttcatcatctccccaaataggagtctagttcataaaatccataataacatccataatcaaaactaaaacagaaattaacatagaaattaagagtttaagaaagaactagttcgcgattgaattccggattgccacaattgcttcctctacctcattctttaactttaggtccattttctccctccctttattctaaaacacgagcccctagatagaaattagagttgctacctctaaatggtgaaagtcaaaaactggccaaaaatctcgtgtttcgccccttgttgcgactacataaagcctagtcgcgaccgtaggcaaaatacaaaaataaactcgctgcctggcctcctagtcgcgaccatgaaaaagggtcgcgaccatggaaaatggtggtcgcgatactgaagcaaatttgacagcttcagtatctttcagtaaaatatgcataactttcacatacgaactcgaaacgagttgattgaagatgcgttggaaagaagaaaaataaatctaaaacttctatgttttgactttttctaaaatctaatcagaacctagtcaaattaatgcttgatgtttcagctttattttcttgtaaaattttgtctattatatagaatgttgttttccgaaatttgatcaattaatatattccaagtgtgaaacctgaaactaaagaaaacaagcgtaattatattccaaaaagaataacaaagaaggaaaacaactataaaaagtgacccaaaacgtaggctaaaaatagcctaacaccttacaacgacagatgtaggaggaacaacaggatactcagtattcgaatcagcaatatgaaataccattctccgctcctcctagtgttggaccgtcatcacatcgtcctgacacttagaataacgacaacaatgacattatccttctgtagaaccatagatattttataattaacaatagaacttgactttttttcgtaaacatcttttaatatttttactttagcacttttgtttagttgctaaccttgcaactcaaatatctttttatagtaatttaatcggaatactatttaattatatatgttagtagtgttttttttattaaatactatttttttaaaatataatttaatatttaaaattaattataatacttattacaaattatcaaaatatttttttttgaaaaaaataaagcagctttctaattatcgccgcaaaaatacaccgaaaaacttaaacctacaataaaatatggagggtaagagtatctccggtgtaaatgtgcactgttaatattgttgcccgccttatttattgcgcaggtaacaataatgtcaaagcatatttgcgtcggtaaaattttatccgctaattggaaaaaagggtgccaacattcatcagcgcataattgcgctaacaaaaattatttgacccgcataatggatgatttagtcgatacttaacgtcgacgagctcatttttgctggtgaagaaaattgtcaggcataaccccttcttgtcggtgcatttaccaattgcactgatgaaaattgttttattggccagaaatagaagcatacatatttatgctccagcaaaaggttaccgacacaaatttgggccgacaaaagccttctttcttgtagtgtattaacattttattgtactgataataatagtgttatgatttaatttattataataataaatatataacatgtcattcaaaaaataaaaactcaaatatataagaaatgtgaggttgttgtagtttgttaatgtaagaaataaaagtacaaaatacaaaatattttctgaaaatataataataataaaaaaataaatattatataattttattataacatatttattttaaatattttttattttttgtaatatacaatatataagtaaatataattttaatataaataaatttaggagaattaatccatataatattttttttagcttaattttttcaaatttacggtttgggtttttaaagtagttgcagcgctagttgcaataagggttttatatgattttttgtttcattttaggttgcaacgctagttgcaatagggtttcaatgtagaactataaaaatgcaaaaaaaaaaactgttttgaaatgtaaaaatgaagaagccatgtaaatttattgctgtttttttaataaaatagttttttttttaaaagttagatcaatagtaccagctgctttagcttttttagctgtaaattctctataaattctttactataaattgttttttaatcatttattaaatacttttttatcacaccattttttcaaaaatcagtttaattttttctgtgccaaacaaactcataatcattcatactggtgtaaaaggcctaacttatggtgcaacaagtatccattatgaatatgatttcagctaaagcaacataacccattaatgaaactggcctctttaccagtgtataacaaacaatgatttgttttgttatttcttttgtaattatatataagaagagtatcaatacattgatttgtggtgatgatgaaaatggtaagtttttaatgtcataggtggcaacttgttgaaaattaatgattatcatttttataaattattttagcagaacgtagaggcgcaaaagcgtaaggcagtactatatatctataagttaattaggatttttactcctgaattttgacattaactaaatcatacttcctgaacttttaagatcattaaaaatgcccctgaactattgagattgttaaatttaaggaattttctctaattttattcaattttactatttcagtgattgtttatatactaaatcatgtttcctagactttgatatatatatactaaatcatgtccttgaactttgatatgtactaaatcatagcttccggactttcatcatgttagacttttttactaaaattagaacaaaattctcaaatccaacaatctcaatagttcagagggtatttttaacgaccttaaaagtttaagtgtataatttagtacatgtgaaggcaaaaatcctaattagccatatccttatatacaaagtcaaaccatatacttttttgtatactctttaagtccacacaataatgtaacattcatcttaaacctcacataaaaaaaaatgagtttctattattcatataacataataatataacatggatcttaaatacacaaaagtagttttttttttttttttctgaacgaatgaattatgaattccagtacaaacaaacaaacaataactacatcgggaaagacatgtgtatctactagcaaagcagaagtagtatttgggtgaacatctccatccccaaaactaagtttggccaaggaaaccattcttaattagctatcaaataatgtggaactttatttacagatctagctagtcttaaaatgcatgaaatattatcctgtgtatttcgaatgtgtaaataattaatcataaatgtgtgtctctatcaataacatggtagacttaaaatataaattataataagacatttttatttagttaattggtgtgggtgcatctaagattcacagtagtttctgtttttttatgggatattcttttgactaataataacaaagcaaaacaaaaaatgtagtggcatttaaagttggctatcacttatcactaataaatatttgtattttatactatatatgtttattcatttattccttaacacaaaacatttatagatctactatttgacctctctctctctccataaatatatatatatatatatatatatatcaagaaaagttcatatcgtttcccttggaaatattgagtgtttcaaccagatcaggaagaggatggtggttatgtcaactctcaagctgaagggcagaattcaagttcttctgtcgtcaattttcaaaggatcagttctgctcaaagattattaattagactttcttcatcaaaggctaataatataccgcttttatatatatatatataatatacatcagcaatcgcagctcagactcatcttcaagcaaaattatgagaaggagttgagctgttaaaagagatgtaaaactctcggcaagtctgatttcttggctctctcactgaatttttttttttttttttcattttttttgttcttgatttcttttcccctatgtttattattatttttcgaaatattttggttgtgattgtatacatgtgttggtatatttgtgtatggagttgtggttattcctccatatatataatgcatgcatattgctgtgttgctctgacaaattattgatatggaaataaatagtgtgttttgattttatatgaataacgaggatatatatattcttctccgacgaaattctggttctctaaataagctacttaattttattttatttatttattttgaaatcactacttaatttaatttcaatggctaattaagatttttgttcctcgaattttgacatgtactaaatcatgcccctaaactttgaagacccttaaaatttattttccccgtaactattgagattgttggatttaaggaattttgtcaaattttagtaagaaaagtctaatacggatgaaagttgagggcatgatttgacacatgtcaaagtttgagggacatgatttgaaagatatcaaaattcggggagcaagatttagaacatggataatcaccgaataagtaaaactgaatgaaattggacaaaagtcttttaatttaacaatttcaaaagtttaggggaaatttttaacgaccaaaaaaattcagaagacatgatttgttacatgtcaaaattcaggagttgaaaaatcctaattagcctaacttaattactaattggaattctaactattttcataatatatttgagttagtgtatataatagtattatggttaagcacgagtacgtcatagcggatgtgacacatgatagtaagtgattagcgatttcccgtactatttgtttaatctatcgtactatttatttaatcaaatagtgtgggattccatagtaaattgtatcattaaaaataaatcacgaaagatggtattagagttagttccacattcttaatgtgtggaaataaattgtcttatataagatgaatgaactacttctcctattcccaattggttttgagatagaactttattcaccttatcccaaattctaacatagtatcagagccatttgtgagcccaaagtaccaccgatctaaaaagcaatcctttgtgagctaatagtgctattggtccaaaaagatacttccactgtctccccttgaacctccattgtgtgccaatttataatgttagggtcttttacatgtttcaaaatccataaatttttcgacgtttacactcacaaattttccaatatttggcctttatgggattctttcaaatgtcacattcggccttgtggtttctgaaggtcattcattatattcacactttctaagcccaaacgtgaagagggtgtattagagttagtatcacattgctaacgtgtgaaaataaattgccatatataagatgaataagatacttctcccattactaattgattttaagatttaactccatttacattttcccaaattctaacagatgcttaggacattaagatccacctcaatttttctcattcatataaatacattaagtggaaaatgtcgtcatctaattttttcttacgaactgaaactcttcttacaaatccatgcatgttgatccattcaaaatcagtataaaaatgtaataaatttcacccacagtacatgccaaaatattatatatatatatatatatatacagcaagactatggtaggacttagcataagttccctaccggtaaggaagcttttttgaccattaattttagctcatgtggttattaaaatataaggtgtatactgttaagataggactgcttgtatacaattaaaaacaatataaggtggttattatttatttttatttttttgaacaagagaaataattttattcaaaaaaacaaaacaagatacaagaacaactaaggcaaaaccagccccaaccaaactagtggagcaacaacaagaacaacacaaccagactaactaccagtttgatattacatcaatgaaataactgttctttctactactattgaaagggcccaaacataatattctaggcttcatcaatttcttcacatcctggctaatcctgcttggggaagaacaaaacaagttaaagagacagttatttctattttgccaaatgaggtagaaagtggcagcaaccactgcattgattactctgttttggatgtcatgccgagccaagaaacacctgttacaaagatcagaattggatgttggccaaataacttgaccaagccaagacatgagtagttacctgtttttcacacaaaccatcaaataagacatggtcatgcgattcttccttcagctcacgaacgggacatctgatgtcatgaatcgacatgattctaatcatcttgtctcgggttagaagctgcgagttgataagttgccaataaaaaacttgtgttttagaatcacaagtctgtcccaaacccagccagcttaatcaactctattctctatcacctgttggttatagaatcttgtagcactgaatttcccacctttgacagcaagggtcagctgataatcacttgtagttaaaatacaagcttgtatcaggtttggagggatagttccagatgggttgacctttcaagtagattgagttcacccatttcacccacatattattctgcttgcttgatatagcctaaaggaacttggccatcaaagccttgttccatttctttccttctcgaaagccaattccacctaactttttgggaaggcacacttttttcccaagaagctagatgcaacttgattctattcccttcttaccccataagaagtcacgataacttttgtctatggaagcagttatttttttagggattaagaagatactcatctagtaatttctaataccaagcaataccgagtgagtggatcaattgagctcttccagcaaaagatagatttctactagcccagcaattgagattcttatttattttatcaaggatcacaccacaatccaaagccttccattttgttggacgaagattcacccctaggtactttagaggaaaggaaccctcctccatttgaatcaagtcaagaatctatcttttcacaacatatttgactccgccaaagaagatctgagactcagctttatttgcagataatctggttgtattacaaaatttagagaaggcttcctgaattattctcaccgaattcaagttgcctttgctaaataatatgagatcatctgcaaaacaaagattagtcaaacggaggtttttgcataaaggatgaaatccaaagttccccgagcttgagtgaaggctgagaagcctggaaaggtactccattatcaaaacaaagagaagaggagacatgggatctccttgacggagacctttttcccccttgaaattgccttgaatcataccattcatcagaatatggtaatgagttccccttaggcatgtcataatccagttgatgaacctagcatgaaaacaaagctgtctcaacagatcgtcaacaaatttctagtcaacagtatcatatgctttgctcaagtctatcttcatgatgcatctccttgatatgttctttcttgtataccccttcaggtgataatgaaagatcatgatgttacgagctagaagtctattcttgacgaaaacaccttggttaccttggacaataataggaaggacttcttgttggttttatgccctaaataaaactctttacaatctgattagt

SEQ ID NO: 15248 - DNA, 1887 bp, Cannabis sativa
  modified_base (876)..(889): a, c, t, g, unknown or other
gaggatattaatatgagtaatcacctttgatagaaggaaacttgggaaaagagtaatgaccactagcaacaatcacagcatcgaaaatttcttcaaccaaaacattattaatattattattattcttttgccaattttctttactcctgacaacccatttgatagagtgatctttcccaacgacaccgttttgatcgtaattaccaagcatcccaacatactcaacccgagtattgaaccttatcatatccctcaacccaaaccactcacaaaagtctctcaaatacaagtaaacctctgtgtgaccaggaaatctcctagagtcacgaccttttttggtggagaaaggaaaatcagtgtaccccatgatttctctaggggacattatccttagagaagagtacatacttgaatgaacctctaagaaaccatcagtaatgtcctttcccataggatcaactccatctacattggggtcatacagccattggcctccaacgtcgtggttttgctcaatcaccaccgtgctatggccttctctccttagctccctggcagccaccagccccgatgggcctgcccctaccacgcacacccgcttcgataagcttgttgataataacaccatcttctactgtcgatctcagccgttgatgatcaagagatcttgtttggttgctgaagttaataataagttttttgttttgtagagactgacgacgggaaaagaaaggagaaatagtttggttatgttgttgtattggttgtgaaggatttatgcgtgttaaatgcattatttataaattatatagatgttgtcactatagaatgttacgcaatgattttaagatataatgcattattattattattatnnnnnnnnnnnnnnttattattattattattatatggggtaatgtctccaaccaaaagctagcttcatccaactctagaaaaaatattagtgtcagcaaccatattagttgtgcgtttgacatcagtaacatttattctaagaaaaaaaaaaaaaaacggaaagaagacaagatatatcaacaattaaatctttaaaagaaaagattgttgttgacggtgtattcaaagcattggcaaccaacaaagcatctgtctcaatatgagaaacaacaatttgcatatcaagggccatgccaaactatgaaacattatttagcttcaatctcataaaatgtgaaatttcctataatcggctttgcaagatcggcaacaacctgacctttatcatctctgatcactttccaactcctacggaatttcgacaagcattcaaagttgcatctacattcagtttaagtgcaccaattggtgggggcttccatggaacctaatctggcactgtcggggagagccttggggttgcactgtatgttggatggtactttatgcaagctgttcaaaaaatttgcagatagttttctccaaaaatgactactgttgaggctagttttggtggacatccatacaaccctgtttcttttggtccatattgcccagagaagacaaaagacatgttccattttagctttagtaagtattgaagagagatgaactataaaatctcctttacacataactgaagccttagcccaatctaacattatttgggaatgccgccataccgaacaagcatatttacatccaaaaagtgcatgttcaatagattcccaagctctcatacagatcgagcaagtagattcgttatcattttccttcttaccagcaaagtagctataggaagagcatcctagaggactctccaagcaaaaaaaaaaaattatttttagtggatggtgaggattgatccagttctgtcaaagatgacgtagaatgtgttggaattattttacc

SEQ ID NO: 15249 - DNA, 11000 bp, Cannabis sativa
tatattaattacaatacaataattaatttcatgacatgaaaatatcaattaaaactcaatttattttatcatttaaaataaataaaagtgtatttttaaccactaatcactcattgccaaatgctcatattttgagctttacaaaacctttttaagaaattccaaagcctatgcaatattttgtaattcatcttgctaatctgatatttgaaacacactaagtagtgaactcccttcaaccattgatgtgtgcttacttcctctcgaagtaaggcttaaacaaatcttctcccgaagatatatgctcacttccttccaaaatgagactgtgaaaagtcttctcccaaagactcacacttgttcaaagcttctcttcagcttattctatgaatagtataagatcaaaacaagcactaaaacctagttgaacactctaaatttttacaaaaggaactctctcgtcacaaagataaaaatatgaaaaatgatactagaagaggtgagtatcgtttgaccgctctctaggtcctatttatagcacatagcaatcctagagacatccagaaaaataatttttcatatgtacaaaactttcttaaaaaaaaaatatgatttgcagcatcagaatcggactctgcagcagcagatcagggtaagaaaggaatcttttcaaattggaccaagatcacgaatttggactttaaacctgcaaaatacagttttatttgatctgctcaagcaaaatcgaaattatcaattagaaaaatagaaagttaagtttcccaaaaataagcaattttccataagagaattttttctcttgcaagaaaagattcccaaacaaatacaaccagttgagaaaagaacttttcataaaagaaatgagcaattaaaggcacgaaattaacgcaataaaatcaatttaattgcttaataaaaatgcatattaattaaaaaatattttttcaactaatttgccaaattgaacttaacatcatgcataaggtgatcaaacttcaacatgtaataaatacaaaaatgaataaatcacacaatcaaagaagaaagaataattaactaatattaactcatgaaataatctcatacaatatccatcacatccctaaatataaagtttatctcatataatcaaatctataattaaactagacacaaataaaaacataaaaaatcatgagaagaaaaagaaactagatggaggattgtcacaaactcatggatcacccatgttcgctccaagctttttcttctcgtgtttttagggttccattctgtctatcccctctaaaatttgtgatctcttctcattaaaatagaatttttaagcccaaaatcgagaaaagatgaagttgcccatgtcgcgtataggggcggcgctgcaaccaccaatagcctcgttgcgacggttgcagaaaagtgaaaaaattgggtttacgtaatctcttgccacgaccaaaagtattgtggtcgcgaccaaaattgggctcgtcgcgaccacacatttttctactttgacctcttttagtaaaatataaataattttcacatacgaactccaaatgagttgattcaagatgtgttaaaaagttaaaaaagagatctaaaacttttatgttttgatttattttaatatcagattaaaacatagtcgaatttaacttttaagcttaaagtttcagctttattttcttgcaaaattttctctattttatagattactgtttttcaaaatttggcaaatttatacatttcaagcatcgaaacctgaaaccaaagaaatcaagcataatttcattccaaaaaatgacaataaagaagaaaattaactctaaaaataaactgaacaataaactaaaatggtctttttcatttttacacttcaaaataatttttttttatagaaacccttattgcaactagcgctgcaacttaaattacaacaaaattttttatagaaacctctatttcaactagcgctataaccactttaaaaatccaaacggtaaatttgaaaaaaaaaattaaaaaaataataaataaggtaatccctcaaactaaaaatagtctaacaactcatttgtatttctgaaaaaaaaaaaaaaaaaaaaacatacataaaattttcacttatgaaaatatctatttttgaaaagtggatggtatcatggtactactttgaaaccaaatagcgtagtgtaggatgaaggccggacttacgtggatagcgaggatgtgcagcgcaggaaataacgccctccttcgctgtattcattccattgtaagccttcacacggtctcacacctcacccgagcgaatatcctctgcataaaccctaaaaccgttgactttgacaattgtttatttatcccctcttgtgtgacaggcggacccacctatccccaccacttacattttagattttaacacatacgttactccaacttgtaccttgtcaaagtccactccatttacctgctgtacatggttgtacctctcttcccatatggcctaattatttatatttatactcctgccttataaaattcgcaaaatcaaaaccagtttctctcgcggtccactacggaaattctcgaaatcagttattattcaatctaactgaaccgaacggaaaatcagctttatccaaattaaataaaatttcgatggaggtcggtggaggcggtggcggctctgataagggctctgtgagttgcgggtcttggatccgaagacccgaaaatgtcaacctggttgttttggggaggtccaggaagcgaggagatgcttcgccttctatgctcgagattttctcctttgatcccaagaccacttctctctcttcttctcctctggtatatatctctctctagtctctacatcataattatacactctcttttagtgtgtgatatgtttttttttttggagtaattgttttgattattgttattattattttatcaggataagtatgtagttgaagaagtggaaggtgatttggtatcgattgcagtgcatccgagtggagaggatattgtgtgctctacaactaatggtggctgcaagtgagttattttctccatacatcactttcgaaattactgttgtacttgagcgtttaactcgtattattcgttcggttgagattggtatttgtgcatttcttgaaattttattgttggaaatgaaaatgttgtcggcctttgttggggagcaatttctgaaagtgggttactgttttgttggttcctgtttcgtttgaattcatgatcaactttagatagaaataaataagtaccttcaaattattctttctattttggtcattgcattatttgattcaattttaggtcagttataattatcatcaaattcacttcgtatttggataatagttcagtcttgttaaaagatttttttggctaaactttcactctactaattttgtgtcttttccaaatttaatcctaaaaccctattctttagagaccatttaaccgatttcaaatattaccatttgagaattagagcaacaacaattaatgtggagcagcttgataaactgatttatgcgtatattgtattagtagtactgatatttgctagtcatataggaaaacttgtattgttatgtgctattgaagttcaaaaaatataattttctaactgaactgatccaactggctttcaaaattcttgtagtccatttcaatttttattggatatccgatccgtggctgtcacatgagccactcttttgagccttcttctactctttatttgcttcgttcatctgatggtttcttttcccttttatgttttttgttgttgctgggtacttgtgaccctatctttttctattttcgacatattttttggagattgcataacattaaggtcagaatgtccaattattgagtacattttagtgtttcttgttgcccccacaccttcgtacataatactattgctgtggtatgatatatttgtgttaattgatttgcagattgtttgagtatggtcgagaatcaaatgcaaagctctcagcaagaaagctaacacctcttgaaggtgttggtcctcagaaatgtatagcttttagtgttgatggctctaaacttgccactggtggtgtggtaagtgataatccatactttctagtttccatcttattctttctgtcattgttcggttttatacatttgttgtagcatataacctgatccgataatttacaatgtacaggatgggcatttaagaatttttgcatggccaagtcttcgtgtcattttagatgaaccgaaggcacacaagtcagttcatgatatggattttaggtgcaacatcctttgtcttttattatgtgctttacttactaatttgaattttgaataaggctgctcatgtgcaacagataccaatgtggattattttatttttcctatacttggacaatcgtgaataaatgtgcttctttacatcaaactcaaagtatggttgtatgataaaggcattgttagttttcttgactaattaaagaatcagcgaacctggttttgcttaaagattcactccatcttattcataagccattgaaaacccttgagatggagtaatcttctaccctttagatataatggttatgttgaaaaattaatatgatggataagttttttttttttttggttttctttttctttttatgtgttttgaagtgttttgatggacaaattgtctttttcagctctaactctggccttcttttcactttccagcttagattcagagtatttagtttcaacatcaacagatggctccgcaagaatatggaagacagaagatggttatcccctgacaactttaacacgcaaaacggtatgtttgtttatttgaattttagttgttagtaggttgatttatttcctattcctgtatgttacagagttttgttttctgcagggggaagacattcaactatgccggttttccaaggatgggacgaagccatttctgttttgcactgttcaaaaaggttttccactttcctttagtagttaatgttcttgtttctagctgtttcttgtcatttaagaatgtgtgtgttctttaatcaggtgataaagtagtcattgcagtttgggatataagtacatggaacagaatcgggcataaggggctacttaaaaagcctgcttccataatgtccatcagcaaggatgggaaatatcttgctctgtaagcacttaaaactacattgttttctttacttggaactttgagtgtcaatggttcttaatatactttctgagtgttaattgtaggggaagcaaagatggagatatatgtgctgttgatataaagaagatggtgatctgccactggagtagaaggctacacctggggacatgcattgaaacgctagagttttgtcccagtgaaaggtaatccaactggataggctaattgttgagtgttgatgattttgacgtgttaagttaatgggattcattgatcaatactaagaggcaaaaggagtggtgatttgcaaaaaagaactttaatttagttttagtatgttacatggataagtgccattgtgcattgtttttgcacttcaaaatttgaactatattgcttagtgtcctatgctggagttacctaaaagtttctaatttggctttcttatcgtgagcagaaaattgctacctaaattttgaagatgcttcttaatgtcaagctcttaaataaaaactgatatttgttcttaattagttactgtgggttctatatacaattaattcattcacttgaactcatatttgttctcgagagtatcttttgaagttcatgattcaaattttcgatattgttttcaatagttccgtgtttgaactctcgccttttcatcgcttctttgcagggttgttcttactacttctagtgaatggggagctgtggcaactaaactaaatgttccagtagattggaaaggtctctctctctctctgtcccattaatgcgcgtgtgtgctttctgtttttcttttttcttcaaaagaaccctttctaatgctcttttcaaatatgtgcagaatggcaaatatatatgatgctattgggactatttttggcttctgctctggcattttacatatttatgcagaactcagattcattttggcagttcccagagagaaatcaaccaggagcaaccaagtataaaactttttttggtgattcacagtcttcggaggatccattttttccagtagatatgtgataatttccatgattctgttccactcattgtacaatgaatgaagaattattccccatgtgatcatcttaacattataggttctttctttctttgaggacaactggaacatgctgccaaatcaacgctgcttctacatattttttcttccctagtttattcatttaatttacccatctcatagaagtacaaagtttgaacttgtctcaaaattttgagcaaatttagttgtatgtttttggccgtgatgtatgtagtagaaccctcttaaactagtaaaagggaaatcatatgcggtttaccggcttctatcatcactggcattgtttatctgaagttgccaacctaaaaaaatttcttatttattaagttgagaaatcttttactctgttttctcgtcttttatataaaatttacattaacacaagtttagttttcttttttaaaaagattaagatattgaagactcaaaacaaaatctattcatggtactttcttttctaagtactgtttttattctttgaaaaatgaaaaatataccctaaacaatcctgtctgatttttcagttgcaaggagattttattcgctgcagtggaaagtatgacagctgataaagttatgactttatatatacatatgaaaaaaaaacagctgtaataaatattagatgatattgatttaaaattataaataaaaaatgaaatgatctcatatgttagtgtcatgaaactagttaagaagtgatcaaaaatagcttcaagaaacaaaagtactttcttgattttttttttaaaaaaaaaatgttcagaaagctttttacaaagctaccatgttctaatatccaagaggaacaaaaatatatgtcaaatctagagtctcatatccaacataaaaattctagttttaactaagctcagtttattgttagtaaaattagtaatttgtgttaccatcgagacacagacaatacttgtagtttcagtttaaaatgtgtctaaaaaatggtgtgatatgacatattccgaatggcgagagagatccgtatttcactccctcgaagctcctaataataaatatcccaattgtactaaaaaaaatatcagtaaatgttttggcgtcactacaaaaataaataaaaataaaataaatatttagtttccagaaaaaaaaaaaaatacataaataatatatgcccaccaaatcaccaatagccaatacaatacaatacaatacactgccactctctcctctctcttactcactctccttcctcttcttcttctctctcatttttctctgtttcagagctcagatattttggttgctggacgagatcagatatgaattgccttcacaacctttcaaggtcttttctttcttcatcttaactgtcttccatttctacaacaatacaaataataatattatatacatttttatatgtctttcgttgattccggtttcagatcaccagctttgcttctccaaagcccgacctgtcatcaaaggaagcctttttttggccccattaatactctggtatttctcattctctttctatatatgtctataattcatccgtattgtatataccagtaattttctttgttttttttctgtagagagtggtcaatacaactgatctatctcgaagaagtatggctatcaaggtaagtcttttttgaatgagctaaataaaaaaagcgagtcgaaagtgatgcctggtactgtttaattttcattttacatgagtaggtgtaagtggaacttttcgccatttctttttagagagaaaagtggtgtgtatggaatatggtataatacatgttgcatttttctaatcacaaattaaagaaaaatatatgatgacaaggttgtcactgaatgtctgcttttctattccaatctgatttatctattttttctaatttatcattcgtggtgtgcttgaaaatccaaaatgaattttgcttaattatgtatgtagcgtattgtggaaaagtttggaaaaatttcttccatttatcttttgacttcattgttcttagttcttgttagaatcccattcaagtttactaaaagagttcagcactacccatttgtcgtttaaagtatatcaatggttggttggaatgagatataacatttatcatacattttactgattcaggcttgggaattcttaaatcgttttttccttttcttactattgtgttgtgagtaggaaatttatacctgttttcattatattgcatgtgcaggtatttttgtgtgttgaattgtagtttagctatgattgcttgatgaagtagaagtatgattttcagcaagaagtattgattaaagctattagtctctttgggtaccattttatatagaaagcttatggtttttctataggcaacttctggttccacatctagcgctgagataagtggcaatgccagcggggccgatgtagaggaggtgaaatctgatacatatagtcacaacatgacagaggcaatgggtgctggtaagctcacttattatatgttgtagtttgaatatgagaaagctaaatggaaaatttggtggttagatactgcctttatatgttggaagctgcatttagtggtgcttcttgatatgtttggctaaaaccatacttggtactttaacgcttttcttgaatgacctaaatgtttgatcagcatttgtatcatctgctacctgtggtggctcaaaagctgttaaatgatccctctctccatgctgtatttattttagtatgttaatgttattttgcatcaagattaaaagttgttgctgattattactgtttttaaaatgatttgatgcagtactgacttatagacacgaattgggaatgaactacaattttattcgtccagatttgattgtggggtcgtgcctacaggtgatctttttcaaatatgaactacaatttataacattactcctaaaatgatgatctaacccttttcctgaattacagacccctcatgatgttgacaagcttcgtgcaattggagtcaaaactatattttgcttgcaacaaaatccagatttagagtatcctaaaagcatttgttattattttattgaagtattgaatgtaatattgtgttgtgatcttttggacaacatcgaacaagctttttattagccatgttataagttgtttagaacagtaacggaataggttccttaccttctactggaataccaattatttttatttcagccactaaaatattgctatggatcctttactgctatcttcagatattttggggtagatattggagctatacaagagtatgccagtacatttgatgatattgagcacttgcgagctgaaataaggttagttagtcaaagaactgtcttttttgtttctaaagcatgactaatttgttacttatcattgaaattataaaatagttcttagttcttagttgtatattgggtcatctctttttttgactgatcaccacgtacatccaaagtagttatttctgaactatgtttgctgtttgacttagttgtatcagtgtatctaatagtttgttgtatagaaaaatattaccttttttttattcaaaatatcagcattttgctgcaaaaatattaaaaaaaaaaattatcagcatttgtgtgtgcgtgcaaaactgcaaaaaatgcatttctgtacagctaagaggattttctaagattacataagttcacaaatgattggcactattttcgactatctgtctgttgtttgatggctttcagcctcattacaaataatagtgttcacagattttgcactgtttttagttttaccttgaagtggcttctgagtaaaggaaaaaacaaaagggaactctcctgctataaatgattacctatttgtattcttttgtttctttggcttatctcacaggctaatattttatttatcagagactttgatgcacatgatttacggttacggctgccagctgttgtcagcgaattataccatgccgtaaaccgaaatggaggtgtgacttatatacattgtactgcgggaatggggcgagctcctgcgactgcggtatgcgtttcagctcttttaacatgatactatgtagtccttacaggctgttatgttgagtttactaataggctctttcttatcacagttagcatatatgttctgggttcaggggtataaactagacgaagctgtgaagttgctgctggtaacattcatttcatttcatcattataacgcatcctattttttctctacttggaaatttggaaacactggaattacatatgttatcttgaagtgtctgcaatgctgaatttcactatccacatagaatttcgtaattgctaatttgtttataactgatgcaatatattgtattggaagaatccacataactgcaatggatgcatgtagtatatgaaaagtaaccatacatatttttgataatggcttaggagtagataattatgattaatagactttgaatactatgtctatcttcattaccttctgatgaacttataataataacttaattaaaattatggattgagtaactccaaatgtcaaataagtctctgaggcagatagttgattctcttgcagagcaaacgcccatgcttccctaaagtggatgctataaaaagcgcaactgctgatattgtgagttt

SEQ ID NO: 15250 - DNA, 14741 bp, Cannabis sativa
ggattaaatcaagggctataaattttccagccaacattcatccttttttttttttttttgtcttcaagattttaccctttcaatgggaagtaagactatcacatctttcgcattttctggtatatcccactcactttggtgttctatttggtacattgttccgtcataagttgctagcaaatttttcttggtgtagtaatctaacagagtttgtgaagtaacctgttgcacgtgcaggttctctctttgaggtctactgtctatgattctttcattctggttacctcaaataaatattctgtggtttgttaaacttgtgtaatttgaaagcaacatttactgaacatacgaaacagcagtggaacaactcaaaaataatattagaaacaacatgacagctccagtattaatggttttaatacgtttacttcatctggccgaaattaatggttgtttttcggttgttcggttgttcgggtattgctatggtagttctttccattgtgtggaagattgatgcctcgttttttatttgcgatatttacagtataaaagacaaaaacaaaagtcaaaacagttataagttataactttagctatgtgacagtataaatgtaaacttttactcaaaatttaatatttctgtaaaaatatatatataagaatgaaaaaaataccaaaatatatataaatatatatttatatatatataaaaactaatgttggaatgcttatttcccaaatacacttggttttcgaaatgaaaggacaatttagaccaaaactaaaaatgcctttttttgtagaagtagtactgtactggtaaaataattatgagcgaataggcactaggcagaccatataaatacatatataactatgacccacccagctgttataactacctttctttctccattccatcccccatgtgcttcctttatagcccatctctagacgacccccataccctttcgtccttatgtttccagttttatgtatgctttggtttagcatgccctaagatgaatcatatatgaccacttaatttaattaatatagtacaaccctagttgttttgcgacaaattatatttattttagataggacacattttttttaagtaatatttaatttggtgcataatttaggtgcgtacaagtctatggtacaccaactttcccaaatttatacaagagccctttaattcctaactttttctttgcatgaaagtatttattatagtaatagtgaatgtcctaagttttttcaaaaatttgaaatatattttacattacaaaaagtacaatgttcaagagaattacttttacaaatgtatatacaaaaaagaaaaaaaaaatcatgtgtagcatggcaatttaaacttagttttactactattgtaaataattcaatatctctacctacaaaacatatcgagaatcactataataacaatgaacagtactgcaataaaaaaaatatagaattaaattacatcaattatgccaatgtagggtcgtgctttactagtagcaacatggtgttatctgttatgtactagagacatgccctaatagattttagactaatttttgaatactcaaaaaattattgtttaattgataaataaataattcgtagattgaactatttcgtatttgttaaacataaaattattttaattagttaaataattctttttctaaacaatcattcatcacaatcttaccctatatggtatggtaaagacattattatctcaaattttagacgaacacacgtgccactaaagagcttgcctagtgggaaaagggccccgacttaacagatattgataataatcccaaaatgaaaatgggagccatgaatctgactctaatattccgataggcctaaaaaagaattattaatgatttattatacattataagtaaataagacaattagtgggattatgatcctactaatttatttcagcaagtctttatttttttcaataagtagataaataagtatatataatttattaattatgaagatttatttgaaatatatccatataatgtaagttatttgtgaaataaaaagattttcaagttcgacgaccctgaagatccgaaagtggataaataagcatattttaatagttacgaagatttatttgaaatatgtgactaaaatataagatattggtgagataaaatattttcaagtttggcaaccctggatacccgattggagaataaaaatgtaacaatagttttggtagaaatattgatgggattatagaataagttaattttagatatatcgggatattttagggtacttagagttggtcaaatagactaaaattaaagattttttagtggttaagaaatcataagataactattaataataaacattttatgaacattattattaatattatattatatattattattattaacttttatctccatatatatgttttaaaacataaattgaaaaacgaagatgaaatcatcggttcgacgaaaaccttatccctctctattcattttttttgattttcaacttaaaacctagcgattcaagctccggtagtagcgggatagaaaattattgaagagggagagcttaaggtaaggatttgtttcattttaagttgaatacgattaattttatgtagtgattctatgatttaaaatagttacggagattttgaccatatagaatttttcttgggtagttatagaactaggttttgtgtttacttgttgaatttgaggagattttgagttagaaattgagtttggaactttttaaatcctagtacgaatgtttgcagatgctttctttggaaagggtagagtcacatggatggttttaggaaatgtagcttgggacacactttgcaaatcaaaaaaagcagaaggcttgggatttttgaacatatcagactggaacatagcatctatcataaagcatgtgttgtcaataaccaataagaaggacaatctatggatcaaatgaatacacagtgtatatatcaagcaaactaattggtggggttacaatgctccatccaacaatagctggtattataaaaagattgttgaagccaaagacagagtaaggcagattgtaggtacccagtacaattttctggggaaagatactacattgcagttggttataaaatgctgaatccatctcaagaacacttccattggagtaaagaggtatggtgtagtataaacattccaaagcctagctttgtgctttggttggccatccaaaataaattaaaaatgagagagattatataagttcaaaataatagatgatctaatgtatatactctgcaacactgcagctgaaacaaaggaccatttattttttgattgttctgttacgatcaactgtctttcctaggtgaagaggtggctggattggaatgcagaaacaggctctttagaaggtctactttgaaagatcaagacaaagcaagtttaagaaacaagttttctctactgctgtggcagctttatagtgtattaaatttggtatgttagaaatgataaaatttagaattcaaatgatgttaacatgcaacaactactgtagcagacgaaatggttagttaagaagtgagttacttgtgtaatgccaagaaacattataaggaggaattgagattggtttgatggtttataatagatgtatttgatttattatcatactatatagatatctccttcgtatctgaaggtgcgaattggttgtagtaaacatgtttggtagtgaatttctcactgaacctaatcgcatgtgtaaaaagtccacttccaggaactcaagagtaaaaagtagagttccaaatggtttattatttataaaagttaacgattttaaatgatatttagacatgtactgtaaagtattatcatgaataatacatgtctaactaactagagagcaatatatataaatataatttgactattcatagaattttttttaatatatatagttccaatagcagaagatagctatatagtacacaaactagaaacagtttatttgtcgcctccccttttaagaacaaaacattatagtaaggagacaaggaacaaaaaaacaagacaaagtgtaaaattgatactagtaggtatagggcttttagagatcaaaacatccgcggtccactgaattacaagccatcaaattttgcattgaatgggctgcacccatattttcttggcctcttattcctgaattaacagtaccaccgtagctatatatatcgatgaaaaaaaaattaaaaggaaataaattagataaatagattgtatataaatatatttataaagacgagagagaatatgatataggtaagtacccgatctgcaatgcaatagtagaagtagtattatttgtattaatattattgtagccactattattattgcatcgcaaatgctcaaaactgagttccactggctgagttggatggtgggtacatccaacattttggtccccattttcactttcctgctcaggaatcaaaccacaaattttctccaactgctcaacaatatgaaaaattacaaggaatcagagtgaatgacccaacaactaatattgtagacttctctaagtgttgaacgaatgggaaaacaaacgtaaacccaatatttatatgtatatctatccatatatataatattacagttggtatatgtatagatcaaatagcttatgaattatgtatgtataatatttattaattattttttgtttttagatcaagtacctatatatatataaatataattgtcaagcattggtatttagtctccttttggtaaacagcccgaaagctaaagtggctgcacgctcatatatatgtagatatatatatatatataaatatacatatgcaatataggcgactcttttgaggaacactacaaatataagaatatacagtaatttttatataagttcaataaaagaaggtcacacgcgactgcaacggtcactaaaaaaaataaataaaataaagccaaagatgcattgcatggtactgcaaaagaagaatgttgaaatgagttcacttacaaatgtactacagaaataactaagtaaggttacgaatagctacataatatttaaggaagtatttgttaatctctctgatctctcctgattatcatttcatgttcctgccagtttctggttgctggttcatttatatacatatatacttacatttatcccaattttaaaaaatttcaaacatattaatcttgtagtttcaaggttcataaaatagttatagatatattttcgataataggcttcttagttagcttggcgatgagccaatttattcacaactctttctttctctctttctagtttctatagctctctcattgttatatatagctatatcttataggcttatagcgaggtctgagaattgaaatataccttctttttcaattcattgttttcttcaagcaatgtctcttcctacaaattgattaaaccataataatgagtctccttgattagaaaaaattaattaattgaccaaggacttcgatatgcttacataagcacctacatatatataatactctttccaaaactaactaacattatttatatgtataataataataatttgatcgcacatattattaacacacattattacatatatataagaaagagataagtaccttcccccgaagaagagaaagctcatcaatcatatgctgtgtctgcaataaaatcattgaaagaaaaatccatattaacgtattttacattttttttttatgaatcagaaaatcattacttcgacaaacaatagcaccattcaataaaaggtctgtacgtattttacatttaatgtatatgtagttctatttggatgactttataacagttaatttgttagaatgtttactgttcataaattactgccaccagtacccctgcctgcagtatttatggcatgcttggtaatttttcggactaactttgtaaagattgtttttgttccaattaattaattaaattttggtttatgtatttgttaaaagttgaacatatttatattggtttagaatgatgagtagatatagattatatatatatctcccaagtctcatctatatatgtatatacatatatctacaatatttgtttttacaatctgaaataaataagaatattttatataatttttatttctataaaaaaagttagaaataatccaaataaataattttatttaattttcctataattgtttgctcatgttaataactaaatcgaagtacctataatgtatagatgtatatactttcattgtgacacatttacttcgtagattttcattattatttactttccgaagtaactaaaaatataatttatatatgccaaaaatttaagttgttaagaataaacatatatttgtttcaacatcaacctattctgtaggtagtttgttactagttttacaaactatttaggtaagaacaacttagtttttagggtaatataagatttgagaatttattaggtagatcaatttgaagttactacacttaggcacgctttttcaaactagctaattactaaataaaaaatgccaaaagaaattcttgcctaataatatttaagctttaatatgtcatttggtacaattagtattaaatctaatataatttaatttaataatattataaaatattattgagcaccactatatgtaatagcaatcgtgatttgtttagattaattaagatggaaacatttattgtgataagaaataaaatataggaaagatggagaatacggaggatggagagttggtagagaggatgtagaataaaaaggagggagaggagagcagtaatgttttaaggtgtttggtggaagggaaatgatagaaagatgaagagtatttatttataaaattattatattatttgtaattttttaataatatattttgaaagtatatttgtaattttaaataattaatgaggaatgtgtgaattcttacatttatgtaagaattttaaattaaggatttagaaggatttactctccatctaactatattccttccctcccctcccctcccccaatctctcttgccaaacaagtgaatttgttgtctcctcccatctctctcctcttctcttctccatctacccaactctccctcctaccaaacatagtgttagtcttttctaaaatttcttaaaagatatatggtttatggtcaagtattacaccttttagtataattaataactatagctttattatccgtacgtacttcattttataaagaaatctgaatgtaaaacaagcgtacggcctcgctgttgcatcatatatacataaattagttaagttgacctgcagtactagtacccttcctatcaaaaattaaatcttttagtcaaatatatgaaacatttcaattgatcattgctctatactataaatatcatcctataataaaaagtgatattttcaaaacatattatctcaaaaataaataaatatatataattttttaaaaaaatattcatttatattagaatagtatgatgctaatttaaaaatgaacatgggaagtttaaatagtatgccaaaatcaatgaatgtaaatttcgtttgttgcgtcaaataatgctcgtgtggcagaatatttattacaagtactggtcagcagaattggttaacaggttttttatgatttgttactttgtacagtattgtatatatatgcaagatgcatgaatccgttcaaattttatatatgacagaattaattctgatgaagggaaaagctggttgtcctatatagccatggtaggtacatatgtaatgtactaatgtatatgtacacttattagtaaattgcagaaataaccagtaaattgtatttaacattatggcatcatcgttttaactaagaatgtttttttttattattttattcaatgactactttcattgaaaataataagaatattactattcaccagtaatgcccaacatacgaccatcaccataaataaggtgacaccttataaaatattaacagttttattttgataataattataaatttaaaatatactaattaaacccaataacgtaaataaaatatggaaaccaaataacgtattatacatgtccatataacggttacaatatcaacattcctatattacatcgatgtattcgtttcttcgaatgcttcaacataatactttactgataaagcctctcaataacaaataatatggaatatattttgaaaattctttattgattgaactcctaattaatagatatgttttggtaaattctaatttttactatttaggagaaatttagaatagttgccggcctacgtgtgtaacaaacagattaaataaactcaatttagctcctttaatagttttaaataattatattggacactgttatattattaaacaaaattaaatttatattttttcatgaggcaaaactgaaaagaatgcactaaaggtacacatatagttttctagtgggggaagcccatctaaacgaaacatgcaaacgcaatctgttctcactcatttgtttaattcgttcattatctattttactaaatttaacaggattgcattaaataaagttttttaattagatgcaaatccacttgacaataattaatccacttaatgttttttaattagatgcaaaatttaacaggattgcagtcactaattttacaaggtcctagcatattataattaattagacatgagtcaatatatctatacaattatatgctaaccgtatagaaaaaattgaatattgaaattatatatagttatattttccgtcgttctccattttattatatactttattatataaatatatttccagcaaaaaaaaattatagaaatatatgttaattataaacaataagttgaatttcacccgctctcccctctcactccataagtccatagatatctatatataattctaaattccaattattgtaatcaataagctggagctttaagcttctttcaaaataaaaaatgaaaaagttggagcttcatgctatgtaccttagttgacctgatttgcttcaatgacgagtcaagtttttgctcaagctgttgaatctcctttagtcccaaatgctctaaatcctccccgagaagattcctgaacaaaaatggcgttatactcagtgcttattatatatatttttatatagatatatagatcaaacacaggaatttttggtgatttaaaaaaaaaaatagaaatatcttttttttttttcaaacttaaaaaaagaaataccagatttaaataattaaatgttaaaaagctaattttgcaagcatatgtattattagaaaaagagaaaattacatgaaatttctcagttttctttttcgctggcaaattttttgtttagaaaaatccaaacaccaaacaagcgtgtattgatactaaaatcgaagctccatactttcttttatatacatatatataatgagtttatttaataagtgttgaataacatacctctgcgttcgtctaagaacctcaacttttgctttcagcttgagatactcttgatagatgctctgtatatatatcaataaagataatgaggtctttcatggagtttaacatatattatatgccaaaaattaatacatacctatatacattacattaattttttttattgggacggaaattagaatttgtacctcctctttatgagagaaaatgtcgatcacatatttatatgccattactgataaatttaattaatagtacccccatggtcgagaagcatttttctgttcttttgtttctttctacgtataaactagttattaattaacgatagtgatatatcacttcaagtataatggtacggcgtacctctgtgtcgtttccagccagttttccttcctgtgctccatagctgcatctgtcatacctctcaagcgtcttggtgatgcttgaataaacaaaaatgtctcgattaattattatgatgaaaaactaatcaaaaaaaaaaaaaaaacatacacatatagtttaaaaacaaacaataatacaagtatttcttcccacactactgtcatgtctgatacaaaaagcgatgacaaacgactgtactgtatatatactatataaaaatatacatatattatatatatatatgtcgctgaacaagtacctaataaatatttgatcaaatataaatccctgaaaattgactactcgaagttaaaactttcaactcaaagttaacaaaatgaaactagtattattctcagtatattacgctcggataattgacctaatagtcgaagtaatatctatgttaactcttgtccgtatatactcagaacacttacatttaagtagtatatatatatatatattgaatggttcagttaattatagatactgtcatgactgcttaatttgttatacttctaaaccaatgcaagtaattaagcttttagttattatattgttatgcctatatgcttacgattgaaacacaatttagtacgtactatctaagaaattgaaatatatatagtatatataaccataaagtcaaaagtcatcacgactttaacaacctgatgtatataattaagtacatgtatataatatattgttgagtagatttactaatcatatttattcctatgagaataacaaatgaaatgtgatgatggtaatttgaactaatacattatatagacaaaacaataaatccccttgatgtacaaagtcaaaagagtaatcaaattaattatattggcattaagaaatcatttatcattataccatctaataactaattaatagaattcaatttcttattcggtccaattcttctaaagtagatatcgtttaacgtacgattagtttttaattagccaatcagatttaattatatacacaaaatggtaaaatgatcatcacataaactccatgttcactacgaattgtaactaattattctaaagaaaaaaaaaaataaccatggtcaagcagttcaattattgagcagtttttattttcagcatgtcaattacatcacaaaatttcattcttccaaactatgtatatgtatatatattagcatatattcttggtacagatgcatacttattgatttgataactaataagatattgtgcatgttgatatatatatatgtatatatatatatatctgtttttttagtaaatcggctgctattatatatatatctataatgaaattgctgagcacactcaaattcggaataccgtatgccaaagtagaagagagagattcatatgaagatatgggtcacttgtcaaaaatcatgatcatgataatgaaagtgaaattatataaatggtggagtaggaaaaatatgttttgaagttttagggccaaatgggtaatattttcttttttgtctttggaacgaatatattcttctgatctcgatttaaacatcaatataaatgaaattttaaaaatataaaggtagttcttcgcaatcgacaaccaatattttatatgtaatttctcaacctagcttggtggaaaaaccacatgttcaaagctgtcttaaaaattatatatgttgtctttcctctcttgactagaattaatttatctatatatatatataattgggaaagatggaagaaaaacaaaatcatctgagttgatatacgatggatgacaaaattgggaactgagagaagttcttatcttcagatcgaacagattaattcctaaaacgtagaatcacttataagaaaacttatctccgcggggagcacaaagattgaaaaaccagaagatatatattttttttaaaaaatgaatgtatagatatgtaaatatcaatacctaggaccgctgcaaaactcatagagcttgcctcgagctgagaaaatgataagagcgacttcagcatcacataaaacggagagctcataagccttcttaagcaacccattccttcttttagcaaaggtcacttgtcgatttatcttgttttcaatcctcttcagttccacctttcctcttcccatatataaaatatatattatatagttctttcaaaataaaaaatagtatatatatttccaaattaagtatgaaatatatatattaattaacaccaccaatcttctactgcaaaactactatatatataaaatatagttccttatatattcccccttcttccttcttcttcctcctctttagggtaaagtttccaatcctcttttacttatcccagccgtacttttaccctaaccaacgcatatatttatgtataatagataattttattttgagaagagagagagagagagtagaaggaaaaacaaagttactaaattctgttttgtcctattggtataggatttttttatgtaatgaaatgtgtcctattgatagttgctgatatataaagagatgtcatatatatagttatactattagtaattaatctcagtttttctgactaaatcatcacgtaagatcacattaataaaaaagtttcctttgatcttttattataaatcttttttagttctgataagattattttaaaactcatttactacaaaatgatttagtacgacaagtctagtcctatacattcctgtcatttagggccatgtacgtgtcgatataagaatggtgatgggaccctcttgccatttcgaataacctcattttttactttcttcctcaatcttataccttcccttcctttaacgatatcattatgtactctttactctttaaaaacgtttattattgttcattaaattctagctataatagtagatcaataaataatcagtgacgtacaaacatccatatggtattccccttaaaaaaattaacatcttattacaagaaaattttagttaaattatgtcttcaaagaactctacttaattagccaccagaatattttattactttcatatttgttatttattatttgatgttttcctttttatttaattaccttaacaggacttaaactttaacttcaatgttgaataagtgtggttataatagtattatgcatgcagcacatacgatcatatttattaaaaactctaatatttttttgttaatcaatctttgaatttctcatttgttgtttgtaatttcatgtatataaatatagatatataaatatgtactgtccacaaaaaattgcagctgctttactgtgtacttagctagctttgtgctttgtttgtgtaaatattgatgtggagataattaaaaaagaattggacttcaagtttctggaccccacaatcacatggcatgccgatccaattttttgttgattccatgcacgctaatttcattgcaaatgtttaaaagaaatgacaataattacttgtaatatttgtgaaaacattgcctaactacattcaattacttactgcttttcttaatctcgtgattatttttatctttttgaaaaaaacaaaaaaccactacgtgtcaatcgtcaagtctaaataaaattgaaagaaaccaaaggggcaaaaattgattttattaaaaagtgaattgattattctatgttagtagaaattggtcagatatgtatattgggtcttattgtttttttttttctttgtttgtaattacattatatttgatcagttctagtgcgttattggaaaacacgtacgtgaagacccaacaacaaatgtatgatttatagggggacaagatttgtggttctcaaaagaattagaaccatggactgatcgaattgcctgatcactcaatacctttttgtcgagtacgatcctctatggttaaattaagaaaaatgctaaaacagcactaagataataaattatattgttaaaagtgtaattaattattggattttataatatttaatttaataattatcataaaatatcgttaatcatttaaaagatatttttaagataatttttgacaccactagtaattaataataatcaataaacaaagatcatttaaaatatatatttatatatacatgattcataatctagaaacatggtgacgtgatcaatgcatgatcaatcacctcgcaaacaacacaatacaaagaatttgatcaagaacataaataaacaattgaaattaaacaatgcagctgtgaactaaatgcaattaaaaaccagtaacagaaccagtaaaaaaaaaaaccagagttgagcaagaatagttaatcaattaaaagcaatagaagtaaaagaaagaaatcaaacacaatgaatttacaggttcgaacaagtgattaagaatcacttgcctactcctcggccagaacagccccaatggctttgtctttattgatgctagaagagaagattacaagttgtttacaaagtgttctttgacacattcactcatgaagcaaagcttcaattacacaacaactcatctcaccaaaactctctttatcatacactaatctagctctcaaatatttcccaaagcattgctgctcgaatgcttcagcagttggctatttatagcctttgtttcaggacccgatcctaactgtcataactgacagttaagtaaagcagttagggtagttaaat

SEQ ID NO: 15251 - DNA, 7494 bp, Cannabis sativa
aatgtttgggtttgggaatctgaaaatgggcaagtggtttcgggtcttgggaatgagatgagagttggaataagtgacttagtggtggcttcgggaattagaagcgggaaagatattgggttagggaatggaatgggacttgggtacgagtatgggtcgtttgggagtgaaggggttagatgtttaaatgtgaaggaaacgatggaaatggaagacatgatggcggtggcagagaaggatcggagcagggcaattggcatgttagagtccgccattgctatgtatgagaggcttttggagcttattcttaaagaagccaaaaaagctgcaacttgcactacagaagttactaaacaagaaagagagagtgatacataattacacctgaagaaaattaaacagttaaccatatttgttgaaaaatattagtttaactcactaattagtatattagtgaaaaagtgatacataattagtatattattattatttctcattaaagaatgtcttacataagaatgaactaatgttttattttattttctcagttgtttatatgaaaatgacgcagtctttttgtcattttttaagccaattatttcttcaggcttcacttcttcctaaggaaaaacttcacgtaggcctagtccatgcataaactttaaacaaacgtaaataattttcaaaaagaaaaaatacaaggaaaacaacgtaaggtatttatacagtttattttgttcagaaaatatagtaaatataaaaaagacaacttatcaaaaaaaaaaacacagacaaatagagattttatcatttagaaccatgattcagtcaccaacctttgattttggtttttgtctttgatatgattatgaccttgaaccgattgcaattcagcagagaccagttaccaccataattatattgtaatatggttgtacagaattagacatacaaaggtaattaccttttgggaaatagagtagcacccctctcctctcatcttatatttttattacagcagcaataagtaatctctctccactaaaatgaatgagaaaataacatactttcctatccaagtgaagacctacactacatgtcgatgtatatatatatctaagataccctacatatatacatcaacgaaattatagatataataactaatacatatattaaaaaaggaaaaaaaaaaaagtgaaacgacaataacgtatgcgcttatgcatgaacctaaaaatatgcttatagcaagtgaggcgacaaatcctcatctcctgcaaaacaggggaatattgcccatcccaattgctttcatttcacgagtaaaagcagtaaaaaagacaatggccaaactgcaccagaaggaacgattagcaatgttcagaattgcctctgacgctttgcgattgtgccattagattgagaaaaggatgtattttgcagccgcgagtagctcatattggggacagaagcagcataatctgatgaactataacttctaggccagcacaatcctgaagcagtgggtggagatggcatctgtggcacagtccaggatgcatctggtaccagacctaagcattcatcatcgccaagctcctcctcccctgcccttaaaattggggactcagactctccaagcttaccactatcagcctggcacaaagtttatcacaagaaatacacagttatttactggtgcaactgtaaacactgagacaaatgaaaataactgcaactaacaaatatgattgcctaaacttgaaaggctataagtccagtcactacgaacatggttgagaagcatgtaatcatgcttcactgaaatgatagtgcaaacatataacgattcttattggattatgagtaaatcaaaatgtccttgtcctaaaaatataagcagttaacaatgtttaatagtgtcatagaagagtgtacaattatagtgctgaaccatgaaagggattttgtctcaatagctgcctgtggacaaaaagggtaactaaagactgcattggctattcacataaaatgcctataatacaggagaataatcaaacaggctgaagttcttggacaacaaggcaattttcactccctcaataaatcaaacttaaagaatatatttggactttacaaacaaagtgaaacatcgtaacacagttataatccatttttccaaacagaggatacaagagagaaatatgtccacaaaaaacacaaacaagatccccttccccctatacactctaggatgctaattaatgacctgtaggtacactcaagttaaaggcagccaaattagcattcgtccaatgtatacaaaattaaattataactaaaaggtaaaggcataccttggaggatcccccattacccaagaactcgtaattctcattgaagtcggttaatccaatatattcatctatgttccattgtggaatgctcccagcagtggaacccccagtaaatgacatcttcggtgctgcaaaatcttgaacaccactgccaacatggacagttgatgccttatactccccaacaggtgggagttgggtttcgctttttgatacaggataatgttttttttcaaggcctttttccccagaaactgacttggactcaacaggtttagtttcctctagaccaactttcaccccagtgagcaggaacctctggtgaccggatacaaaggaattcgcagtgtgtatggccacatcacattttctgcagagtaaagctcggtcctctaaacaaaagaaatatccaactgtatcctgcgaagacaatccactcatttatttaagttgaccaaaataaaaggcataatttaattgatgttaaataatttttatgtataaacaaacagaagtgatgaaaaaggtagaaaattaacacaatttgttcttatttttttctatttttttacatgacaaaaaggatgttctttgaatgtcaaaattgattgtataaatggaagaagaataaaagaaataaagaagaaattatatggcctattagataaaggcaaaattaaaaatttgcaaagaaagttgaaacaagaaaggacatatcaatgtatcatcatcgcatcaaacatgacccaaagactgcctaagtgtaagatcttgaggcttaaataaggattattatgcctatcctgtctggattgcatgtctctaatccttaaacctcacttgttaaggaacttcgagctgcctagccttgaggtttacaaattccaacacacaagcagaattgcttctgtattccttaatctgaaagattaagctatatcttattttctaaaaacataatggcccataaggagtagaccaaagaccaccagccttaaaatacaacaaaccgagaacagttccctccattaaaatagaaagaaaaccatctcatacggcacattatgtacatgtacatcacaataagtggagtctaatacaaaactgttcttttgtttcaattacatacagtcatgggaattctagaaatctcactcctgaaccatctcaaccctatttgtctttaacagtctcacatatccttaaattaaacccacctgcgttgatcaaggtctttgtcaacaggttgattaagctagactaatcaagtaaacaataaaatgcgtacactagcactaatcttttaacgtgaatcggttcaagcttggccaagtaacacaattacctcacaaaagtctctagagtaatagtagatcaacaagaatcatcctattacaaatagtgctctgcccctatttatagggagaatagcttagatatttgtctagcttataaaaagaagaggtgacatctggtctagttgcactcgagttaaacaagatgacacacacttgacacttcatgagcttgctgagactacactcatgcagggggagctcattgagatgagacaaattgggagcttgcagttgcatattaggtgctccgaggaaaaacttgttgagacagcactagaagctcatttagacaacactcgcacgggaggagctcgtatatagctaagaagagataagattgtattattatttaatcatcaactacataaattatcgttgctcaaagatacttgtggaacgtactaatacaggtggcaccatttatgttaggttgggtgaaatggagggaatggagaggttttatgttgattgtattttttgtctggaattgatgtaaagtaatggaatgtcaaccaacaggaatgacatttttactattttggtggaactatttagaaaaaataagaagaaatataaattcaatgtgcaatattttttattctattttttttgttcatattctaattgccaaatctatgtcaatattttcattactcccaatcaaaatagattctcataggtgagtctcacacccttgttagtagtgaccagcaccactgtagtgtccttaagcactttcctaacgggttcatgttataataaaaaaaaaatgatatgatatttcatgatatgtattatgtagttttcttctttcatttgaaaggtcaccatgaagatcctttcatcataatttctccaggaattcagaaacaaaataccactagtctacaactattctcctaagattcaatattatataaatatatatatgcaggaaaatcgtgattttccctggctgttttgaaaaaaaaaaagtggcgttccgttgatttattacttattatggaaaggccacccaacagtatcacatgatcctaatttctccggagaccaaggaacatcacgtacaaccaatctctaaaaaaatattattgacaaaattcagatggaaaacttggataaaaataagaaaacactaactaagaaaactaaccagaatttgaatcgttcagatcaaacagcaaaaacaataatagtcacaataattgttaagaggaaaaagctgaaattgtgaatttcaatcggtacctggcagatatcgcatttgggcatgtcagaggaagaagtataaagaggaaccctctggtgcttactggcgagtttgttggcggcgtgaaccttctcgtcgcacgcccagcacagcgccgcctcgtcggcgcagcacagcacgttcgcttccgccgcctcacacacgttgcactgtatcttcatattaatcccttgatcctaacttgcttcaattttttccttgtctgaaaatttatgaacaaagagagaagaagaatccagtagtagtagctagtaccgcgttatttctctctctctctaaaatcaaaaggagcgagaggaaagcaaaaaagggggggcggggacgtgattttcttacacggaagtgtgggcgagtacaaaatgagttaaatgtgggtctgttgatattttttgaggcaattaaggtgtggcctacgtggcatcaattccaggctgtcgtggcacggaaaacaaatatctgattggagagtggatttcacgctcttcttccgagggtagggtagggtataggatagggtagggtccacctggttcccctttcgccttacgccgaatcaattctcttgccttggttcggtgtacacattcaatttatccgtggctttcatttccagctgtaatttaattattattattattattttaaatggtaatttaattatttaataaatatatagtaatttatttaattttaatttttagcggaaataatatttaagttatatttttaaaattctataagtatgtgaacattgatgtcatatctttatccacttgtttttttttattggtacatataaattatttttaaaaaataaaaaataaaatttcatgacttggaccaattagaaattgtcacgtagtaatttatttaatatttaacaactaagtacctataaagttccaaaaatataacttagatattattgtcgctaaaaattaaacttaattatttataccgcaaattactcatatagatataacatgtgctcgtctaatacaagttccaaagaaaaatgtgctttgagatagagaaattttcatgaaattgtctaatatgtaattttagaaacgatatcaatgcacatgtaattttctgatgttccttttcctaatgtatatggaagcaaatgagtttttattttcttgcaagcccaaaagagaatttaaattttaaaggagtgctactgtatgcatcaaaaatacttaaaaataagcttttgagaaattgttaatttcagcatggacaatataatttgaaagaaataaaaaaactcacggaagaaccataagaacctcacaccaaattaagatatggatctcttcctattatgataaaatatgtcaaaaaaaaaaaataatgaaactaagaaaggaagttcaattagcactagtgagcaaagtaatgcagagacagagttcttagctattaattttatgtggatgcagtgatatcaactcctcaaaatgttattgaatttagagctattattttcttctcagacaaacaaatagaggcggctttattcaaagcattacaaagtaaaccattctagtataatatgtattgtgttattcttatagctatgattggataacacatacaattcccaaatatgtatagtaaatataaatttaaattattcttttaattttaagattatgcttgcaattttacttatgaacgtacaaagagatgaaataataacaagtgtgactgaaatttaaatagtttaattaaataattttaagtgtatttttatccggataaattttaaagaattttaataattataatatttttaaaatagatatatgatccactttagtgtggtgggttattaaatttatactatttgttaccattaaaatactatcaacaagaaattaggtaaagagtcaaactaaaggggtttctttttggtggttgactatattacttacaattatgttataatattttttgggtttgaaaattaaaagtatttattgtttttaaactatttcgtttgcaggttctctttcagtttttcaagcagaaacagttgctctactaataggtttacgttgggctcaatatgtgggactttcagtggaaaaagattcattttctttggtctcagctttggagggtcagactgtgtatttgaatgaattgggggttatcgataataaagttttattgtctagtgggcatctttctcccatgtcagccctcattcaatgttaaggcttagatgccattaggataaataataaattttcttagataaaagaaactctctcaccaactctctagtttttgttatctttgttattttaatctttatgggttacaaaaaaacatatgttttccttttataaaaaaatgttttttttttttttttttttgcaaggtgaaatgctttctaattcaaaagataatgtgtgattttcataattcattttggtttttttttttttttttgaataaataattcattttattttaatttctttttattttt

SEQ ID NO: 15252 - DNA, 3648 bp, Cannabis sativa
aaaggatatgaaataataaattaaccaataaagaaaaagaaaagtaagaaagaaaggtggttgtggttgtgattgtggttgttgcagagagcacagaggacagagaagaaggttgtaacttgtattttgctattctcattgtattattgtactattgagatattgttattggtgatgatgatatgtcttgaaaaaataccttccgacacttcactattatattcacgtaattaaattagtcattattttattatgtgggtaatgtttattttattgttgtatacaaaatacaataattttttatacatataataatacaggagagaggacagagccatgatgactaccacaacaacaatctcttctccaactctgagtttgagtttaagtcccacgtgccactcaagatttcacccaaacccaatctcatcaatctcacccttcaataagattaaactcatcacccctcaaagaagatccatattctccttcaccatggaggctgttgattcttcatcatcatcttctatatctaacaacaacaatagtaatagtaatagtagtgtgtggaagcagcttcaaaagggtatagctgaattttacgatgagtcatccagtttatgggagaatatttggggagaccatatgcaccatggtttctacgaccctgattcaacccaagtgtcactctcagatcacacaactgcccagattcgaatgattgaggaagccctcagatttgcaggaatgaccagtggtgatgatgatgaaatggaggttgtggatgtgggttgtgggattggagggagttccagatatttggctaacaaatttaatgccaagtgtgagggtatcactctcagtcctgtccaagctcaaagggccaaccaacttgcttttgctcaaggattggcccataaagtaatctacacctgtcatttttgttgttgctgatagactttgtgtgattgcaaattacttattttcctttctcttttctttcttgtgatacaaacacaacacaaacaccacaccaattgcttgtttccccctttccattatttgtgtttggttctatgggatcgtgtttgggttgacttgtctatttcatttaataacgggttgtgttcagattgacatggttaacatttaaagttattttagtattttaaccgattatatatggattataaacgtgttatcagttcacatgtttaaacaaaatgtgattataaacaggttacacgggatgtgttatcgaccagtttataaacaggatatgttcgggtttcatttgtccgtttattaaacgggttgtgttcgagtcgagcatacacttattatacataagtctcgacacgacatgaatgactcacaaacacgaattgccacccgtaaattgtttgtttccccccctttcccttatttgtgtttggttttcttatcatttattaatatcacctcattctcattgctttatactcaaattatactactaaatgataagatagatactatacatatatttgtacctaactgagacacaagtagacaacaacactgttgatgagtatgatatgtccttaatttaacaagaacaacccctttgtttgtgtttcacttcctactaataattagttgaaatgattggcaggtatcattccaagtggcagatgctttggaacaaccatttgaagatgggaaatttgatcttgtttggtccatggagagtggagaacacatgcctgacaaacaaaaggcatgtcttaaatcttaattaatgtaaaatcaagtaactcataattatgtacttaactagtaaccaatgtgagtgtgcagtttgtgagtgaattggttagagttgcagccccaggaggaagaatcataatagtgacatggtgtcatagagatcttgaggaaggagaggagtcattgcaagagtgggaacagaatttactcaaaaagatatgtgatgctttctatcttcctgcttggtgttccacagctcactatgtcaaattgcttcaatcccactctcttgaggtcttaaatcaaaatcccttttatataaatttataacaaaacaaaagaatgttactcattcatacatctcttaactaacaaattaacattataaacaggatatcaaatcagcagattggtctgcaaatgttgctcctttctggcctgctgtcataaaatccgccctcacttggaaaggcttcacctctcttttgcgcgctggtaaccaatactaataaatttctacttccgtttatttttactgtttcgataactattatatgaagatcattaaaaaatatgttttgtgagtaaattaaagtccttttggcagaagctacaaaaaaaccgaaagagtttaaggactcatgttaaaatggaagattgtttgttactatagatgattgatgttgtttgttgtgttgtgttgtgtttgtttaggaatgaaaacaataaaaggagcattggcaatgccattgatgatagaaggattcaagaagggtgtcatcaaattctccatcatcacatgtcgcaaacctcctctttcctcatcatcctaatctctatcaaaaagaaaaaattattattatttagggaatgggataactacagaactatcactatgatttttatgactattcagatgaattattatcattgttattctaaaattacatatttttgaaatggagaaaacaaaacccaaccaaggtttcccacaccacactcaacactcccacacaatacacatgcaatgcaatgcaccattttcttttccttttctttttccttttccttttgaaagtagaataatttagaagtgtactagactttcatttcatttgtccaatgatagtaatagttgagaattgttagaggcttagagcacaccaatagtgcttaatatctaagatagtgttaggttggaggtgatgaaatgaaaagaaaataatttttattttatttatttgtttggttgcattttaaaatactagaatatcattccaataaaatgatttttcggaatgactatttcattttaaaattgaagaaatgaatatttcaatgcaatttatgctcttttatagtctattacttatggaggaataaaaataagtattttttattatgatttttcatattttattacatacacgataagaagataagaaaaaaaaaatcttttgtatagattacacaatataaagcatagaaggttatcttattgtgattttaaaattttgactacaaatatgtgttaatttgacactgtaatagttaggtttgttggttgtattaacttggttgattaaaatcattttgttattgtataagtttctataactattatctatatctatgagaacacttaaatagtaatagtatgtaattgtgtgtgatttgggggacaatggctttcaacttattaaaatttgtagaatagattcatgatagcccccaaattggagagtagagtaggtagagaacagaaattagacacaacaatatgaatataggaggatttctctttctcactctttactctttaattaattaaaaggacaaaagaaagacactaataaagaaaggggaatagatactagatagggcccaatccaatctact

SEQ ID NO: 15253 - DNA, 9803 bp, Cannabis sativa
aaaaaaaaaaaaaaagacaacctttgagagccacaaaaattggataagagcaaaatcccaaaactccattcacaacaaaatcacaaccaaccattaccaaagccttcaaaatccaatccaaataatcccaaaaattagcaaaaagatcaaatttttatgacccattaacatggccactctattctctccctcagcccttttctctaacaccaccaccaccaccactccaaccaccgcaagaccacctcaaactccaccggcagccaaaacccacctcccattctcctccaccaagtccccaatcaccaccttagcttccactttagccgcaaccgccgccgccgcggttctcatttcctctgccccactcccttcactagctgacccttcttttcaaatatactacggcacggcagccagcgccgccaactacggcggctacggtggaaattccaacaagcaagactcggctgagtatgtctatgatgtgcctcagggatggaaagagcgattagtatcaaaagtcgaaaagggtaataattatgttatgttaaaaatggtttttttatttatttatggcattgggatttgtacttgggaaatgttaaatgtctaaatttagtgttaaattaacaaaagaatgagtgaaattttagcactaaatttttcaaaattccaaccataatagtagtttggaggaattcaaacttggaccgaggagaagtgtgaaactactaagttataatatcggtgatcaagcttcgaggcttgattaacacaaggggaattaactccaatccacgaatttaatcatgtactgttaaattatttattaaattatgattgtattatttactaatattagtaggatactgtatttgatcacttactatcaaactaattaaatttagtgctaaactttttcagatttgacattttgaaagtctattggggttgaccttagtattgttgttgtttgatataggtacaaatgggacagatagtgagttttataacccaaagaagagatcagagaaagagtacttgacattcctatctgggtttaggcaattagcaccaaaagatgtggtcttgaacaatttggcattgtctgatgtggatttgcaggacttaatagccagtgcagataaggtctcatctgaggagaagaaagatgaaaagggtcagctttattacaattatgagatcgatggtgttgctgcacatagcttaatctcagttacttgtgctaataacaagctttatgctcattttgttaatgctccaactgcagagtggaatagagatagtgacatgttgaaacatgttcacgagtcttttaaaactgttaactcttcttgagtttgattggtaaatcttttcttcttctttttttggggggaaatttttgtctttgagggcatcattaaagatctcatccttgtacttggtctcttttacttgttgctgataagaggttgtgagaacaacataatatttgtcattgttgagaggtcatgaaatatgtcagatgtaaaattattgttatacatgtaaatgtaggaatgaagtgtattgggataggcatgtttgtgaattgtgacattgagtttcattgttcttgccaaagttatccaagtgtattgagatagacatgtttgtaattttttttatggtaaaatggggacgaggctttaaggtgtggctcctctctctctctctccacttctgatggggtgcgtcacttgaggctcaatcgagcactaggtacataaatgctctcgagatggatgtctagggtgactaagctgatggatattgtgctcacatttaaatcactcaggttcaaactcatgacctctaacttaggaaatcacgtgggagcagggccagccctaagtataggcgggctaggcccgtgcctagggaccacacttttcgagatcccaaaataaaaaacaaaaaagtttcactaaatttttatttaagtaaaattaagtatattgtaaacaaaaaatatttatagtttagtcggttgaagggtataacatattatacaatgttatgatctcgaattccatgacacttttttcaatatatttttatatatattttttaggactccgaaatataattcgtcttattctcaggaccgaccctgcagtctaacttttttttttgttcttagattttgtaggattaagctctctagtgcctcttatggctgtggaaagtaataatcacatgacaaagatcatattgtataatttagcatttttctttgctacaacagaaactttgatcaaatacaaatctttatgttctctttcatatgattatgtattaatacaaagtgtagccatcatcataggaaacatgacaacctgttctacaaggtggtgcatcttcaccatactcagaacaacagctccatctcttcttccaattgccacttccagtgtttggtctgttattcctctcattccatctgtaaactattacaccagaccggtcactccactcaccatctatcccttggtgtggtggagccaatgccaataaccctctttctcctattatacattaaatactttagaaagagcccaattaagaaaaaacttcaaataccttaaaaaagtcttctttttcttggttatgtagaatagatgctatagcacaaagcaaaagacaaaaatgatttagcaaaaacacaatctttccaactttgaatacttaaaaagataaactttttttgttagcttcatcaacaaatttaaacatataaatttgagaaagaaaaatgtcttctttttctttgagctaaaaacccttttggttatgtagaagacccatataagaaaaaccctttttgcttacaaatctaaacattaaagaaagaacccatataagaaaaacttgcaatagcttaaaaatgtcttcttttcttaatttgaagaacacaaaaacaaaacccaaaagttgatatgtgtgtatatatatgtggttgggaatggataagaggaaggaaattattatgtaccagttgtgtggccatggaaggagcaagcagtgggtgaattgtcttggtctgagtaaagagtattgcatctcaggcatcttttctttgtttggattattagtttgctttcattatgattttcatagcaagacttgatttttaagctcctaattataacagtcttgtatggcttgcaccagagcatggtttggcaaagatggtatgccatggccatactagactgctggacctagcttgtggtagagaaagagagagtgtgtgtgtgtgaaagaaaagtgtgtatatgtatatatggacaatttgacaccatgagagaattgattgactgatccagcccaattgcctctatggatcccaaaaatgtacacatagaccacccttattatattgaaaaataccttttttatatatcaattaatcaaatctatctctaatttatatttaattgaaacatatctctttttatatatattgtacccaaaataccctgacataagggagtcacatggagagtgtatagaagtacaaaattggtaaaatgtttaaaaaaaaaagagataaaaatgatagactttaaaaaagaagataaaaataaaagaggacaatataaaaaaaagggtatagagtttaattttctccaatcctcttgtggataaatgtctactttaccacattatgggctaaaaaattacaagttcttacaattatagaaaaaatataaccaacaaaagaagagaaaagtcttttacaatacatagtatagttatcaatctcacatctagcacaaataccattaagagtgttgataactactagagtcgctttccacaattacaaaattgtggccacgctccaccgccttatccagagccaaacaacaagttgtggcctcgccacaaagggactcagtgaaacataaactcttagtcattacctagaccacttgatcaccaaggtggttacgagcaaccaattgctaaacacatcttccatcccacacgaacatcacaactcaatttgatccagtcgagagggggaggggaccatttctccaccaagtcaggagaagagtgagagaagagggaagcacagtaatatgcataacaataagaaatgaagtcattaatatataatactttatgctacccaaattattattgtgtacctcatcatttcaagctctccaaatggtgtccatgataatagaggcacacaagaaaacctcctccacattaattctttttttactcaaatcccagatctctgatcccgcatacgaatgccattgtcagaaattgaatatataccctacgagaaagatctctaaagatagaatgccaacgaacaatggagaaagatgtattctgtagatttctcgtcacccgataaataggacaaaaattgtcatcgatttgtcgttatatttagagctaaatagttatatatgcatgcaatatatatttgtacatatatatattcatgcagcataaattttcacatgatcatcaatcttcttgttattgcatacaagtataaaaaacaatattaattaacctaattacagcttcttcatataataaagggatcatttaaaaaaataacaaaaaaattacaaaaatacggttgtacaaaattttaaataatttacagtttttaagatttaatttatttacatacaatatggtcttttgatatattttaatattgtattcttgttattttgttgttgattttttattatttgtatagtattttaatattgttttgatgttgttttgttgttgttttcctgttactttcatgtgattttgtagttattttcttgtatctttgtagaatactgtaaaaatgtaaaaaaaaaaaacttcaaacataaaagtataataaaacttttaccaaaaatagcagttctattattttctctaggagagtttagaatgagtctataataattaagttattgtgtatttattttagttttatttgaataaaaaaataattagtgaatacttcaatctaataatattatataagtggagatagttttattatattataacgtcctacatgttattatcctttagtggtatagtttcattaaatgaaaagatcttcaaaagatgttcttatggaaagttagatgtcatccggaagagctctcccggaagtctaacttgtccattcagaagagcgttcccagaagtctaacttgttcattcggaagaaatctccaggaaagctaatctgtctctagaaaggtgttctggatggctagttgttctttcttggagggaagttctagatagtcaactccaactgtcttattcataaatgggaagttccttcagtgtacgctttggtcctttatccaggaagtgtgcctctcatccggaagagctttttcttgagctgacgtggagatattgttacaagaactttgttaagtccattaagcacgttgtaactgacttaacaacttagttgttgtagccaccgactttggggatccatatcccatatctataaatactaccattctcatcatttgcaaaggcgtgatttttggaaggagtgaattcgaggttgaagattgagaatgtggagagggattgagaggtagagagagagagagatacatataaaagagagagattgagttttgggatttgtatgaagaatcttctgtaaataaaaaagactcttaagtaggagtgtgggagataaacactttgagagaatccaaataaaagaatcctctcgactgtattgtacctgcgatcttgctcaatcaataaagactattcgacggtattccagaattgggtagagtcattgttcacatcgatctataagacttgaactggtatatatcttggtgtttattttattgttttaacgctttattcgtttctggttttaattactatgttctaccaacttttatctccgattcttggttcatctcttttgttaatcttgtcattcttaattattttgtgatttaattatagttaatttggttttacatatttgtaattttcccacaccctctagtgtactatcccacaccactcatgtataattaaaattaagaaagagagagaataattatttactcatatatataaaaatattaataattactcatgaaatatcttacataaaattacatgaattacaaaataaagcacaaagatagagctaattaaaaagcaaaaaataagaagcaattacaaactatatatattagcttaattaacatgatatagatcatcatgatgatatcatatatagtcttcttctaaaaagttacatgaattaattaatacaaattttcacattacatacacataaaattaataacaatatataattattaatattaatagtattgatgatgatgatcatcaggatattgttgttgatcatctattaattcagaataagcactaggctcatcttcatgatcatgatcatcatcaatattaacattaccattattattattatgattattattattataatcaagtagaggagcatggccttggccaaaggccttgacatggtcttttagagacctcttgtgcttaaaatcagagccacaaagacaataccaaatcttaccacaattcttctcatgagtcctccaatcacctttcacagcaaatggcttagaacattttgtacaagcgaaaggcttggcgccatgcttgcgcttgtagtgagtttgaagagttctaaagtccttgagaggccttgctcgggggtgcgagatgttgtgcttgcacccgctccaacaacaatagcacgccactctcgtcattcctcctccttgcttgttgcttcccttcagcgattccgctccttttcggtattgagatccatgtccccacatatgcatctatatataaaagtaaaaaaataattaaaaaaatatgtattaatttagctaagtactatttatgatcgcgaaataaagatgggttactcaaataatcaagtcagtacaaaaatattaatagaaatatttaatgtaaattaatactctaatgcatttctttctttggcacaatgtatggtttcatgtctaccaccacctaattaatttagattaaccatattattgatgagagtaaattaataactaatgagttagagatattaaaaattatctctatgtacatcacagtgtactaatattatattgatatgtaaacacactaaaagatattattggtgtgtaatattttgtttggtgtcatattattggtgtaattaagtattaagtctaatataatttaagtgaataacttttaagaaatattattaaccaattataaagcaccgcctataaactaaatactactactaattactaaaaacccaataataatgctctaatgaatattatctctatatatatatatgtgtatttatttgttttgtttgtacactacaagaaatgttacttttggtagcacatttttgtgctgacaaaagttggtattgcgctggtaaaataaaatttacttgtgatgtgttggcaaaagggagttggcaaatcaatgttggtattagaatttttgccagcataaaataaaaagcggtgacaaaaatgatttttctcatagcgcgtaaatacgctggtaaaagttagattttagccattgcaaatatacactggtaaaactttgacctctttgtcagcccaatttgcgaaatgtgcgggtaaaagttaccagcgcagtaatgaactgtgctagtaaaagtgacttttcttgtagtggtattttatcaaaagaaaacgtataatatatataagatatagctcaaattaattaattataaccaccatatatatatgtgtgagttatgattaatcaatgtacgtatatagagagatatacacacaccatacatatatatatatatgttcatagtatatatattatgattcatgcatcatataatatggatagagatatggacaagacaagtttatatatatatatataatgtagtgatgatgtagtgggaaggggcctggtttttcttcttctcttaaatttgtagctttgcatatgcaattgatcagaggattattaaaatgtgggaataatatctaactctaacctctgaattgtttttgtcttcttccttttttcttttgatgaaattaatgtaatgttagatattcatctaaacatttagcttaatcaattccctattctattcaaaaaaacaattatgagtacaactacaaacaatcacttttaagtagtgtgcctctaatttattatgaaattaaatcaacaataatatgaaggtcaataataaataatatttaaggaaacttgtactaaggaaaattaatatgcatatatacatatatctactgtttgtgtgtcctttgtatgattatatatatatatatatttatatatatattagtgttgtatatatgtattatgtgtggactattggtggttggtttggttggtcttcaaagactgactgtgaagagagtcagtctactgtttattacatatatattattactgttcaggtagaattttctgagacctcataattcatatatacatatttatatatatatgtatacatacatatatatatgatgataccctgggtcaaactactgtcctatataatatatatcagtttaaataatcaataatatatgctatgctcaatttgattgtattatataattacagtgaatctctctctctctctctatatatatataagaaaatgaattaatcaaagtatataaataatattaacaaaaatttaacaaagtccctcatagaaaagaacatgttctctctcaacagaaattagttaaatatataaataaataaataaaataatcatatatataatactataataataataataagggaaaagggttcaaaattaattaatatttattatatattattaacaaaggattatactttacatactatagatctaatcatcaattaataaataaaaactctaaattaattaatcaaatatttaatatatatttatataattaattacctgtaaattgttgtatctgttaaaggatttagagcaaagagggcaatgaaactgagttggaccaacaagaatttgagatggggtaggaatccagtactcctcacctctaccctgttcctcacttccttctaaatcttccttttcattatccaaaaccctagaaatattattatcattattattagggcttgggattaatcccacgtgtaaagccacagtcacactagtattatctttctcacaatcttcaatatcttcatcatcatcatcatcctcatcatcataatcatcactattatgattatgattattggttggtaataataagctttgtggacttaatttgtctattaaaggaagtgcttctcttaaaggaggagattttgatgaagaagaaaaagaagatgaagaagaagaagaagaagatggtgttgttgatgatgatgaagatgagtaatagtagtaatgattattattattattagggttagggttagggttagggttatggatgggaatgaagttaatccatcctctttcattattgaataaagtatttttggagaagtgatgagggtttgtcatggccacacacacaaagaaatcaaagggactctctctatagcttttgattgaataatatatatatatagtactattcttatatatatatatatatagagag

SEQ ID NO: 15254 - DNA, 5425 bp, Cannabis sativa
aaaaaaccccacaaatttattcatcaagtcaaaaaaaatgattcattaaaatataaaatattttaataaattatatataaaattattataataatagtatttacatgttgagtttaatttcaaaaaaaaaaaatagtatttacatgtttttagatttcaaacattttttttaaatattatttgttcaaaatattaaaaatataaatataaaatatttcttattaattacggtataatttcaattttttttaggttagaaattgattaagagaataattatattatgttcataaaaatattaatgtaagttttcaatttaacaatattaaaaatagaggtaaaacaaaattaacttcgtcatataagaagcaaaataatactatgtcaaaaatgaagagacaaatctactaattgttcgaataaatattaaagagtatgaaaattgatgaacaaaataaattgtaataagactagcgagatgaatgagaagaaaagtgagttcattctgattagtgatttcacttcttcttccctcaaaatacatcaaatctaattcattcattctccttttgttatgtagattcatcgactgttgacaatcttgtccatcatcggagatctccgtttcctgtcaagtgaaagaaagaactaactataaggtttttcagtgaataaaacattgtaagatcaaattgaaacccaactctttatttttatttttattttcttttaaggtaattgaaaccatccttattaccaccatatgttgcagtaatcttgatgcagaatttgtaagaatgtagacagcatggtaagaattaatacaaaaatcaaagatcatgattcatgactcattatgcaagtagaattattacatgttgaagcagggttttcaaattcaacaacgggctcttttttcatagtattattatcatcaagattcaatatagactacactgtgttagtagacagtttgccaaactaaataaccaaaaaagttgttaattaccaattttacttaagagagagaaacatataaaaatgagatactgataaaccaatcaaatgagttatgcccttcgtcacaaagaaggccaatacaatatatgttctatcttgtaaaaatgttcctaatttacgattgaacacgtttgtgctgaaatggttccacattaaatgcaactattttcaatttaaaaaaacctacttatgttgggtgcagagaaatatagataactaccgaacatttgatacaaaaagagtgacagaaattatctaactgcatctgaaggtgatttcctaagaatttccaacttccaaacataagcaatgaaggaaaagggaataaaaagaaaagggaaagaatgaaatcaccacacaatttaccttctgaacttcactaagatgacagaattgctcctacataatctgacattcgcaattcatatttttccagagcaaatattcgaagaggaggctaggaatgcatataaattagttcatcaaccccacattgtcgaatgttaattatcattgaattgttgaaagcaggcaaaatgtcacagcactggcgacgtatagccttcatctggaaatgaccaagtagcatgtaagaatgtagtaactacaaaatgattgaacaaggaacaaaaaacatgcatgaaatttattcgtttcaaatttgtatttgtaattcgaaatttacctgttcaatgtcaagctctagcttctttgaatacactctaatattttgaagattttctattgcattagctttggggcaattccgttccttaaatctggcatagttgctttgaattccatcgtttacagaggtgacactttccataaaatagacagcaggtctcttacatgcatctctgggatagtctctcgttgtaaacatatattggcttgcctctacactaccactcctccgccatggtgtaaaagttttctgaagagagaaaagatctgggaggagcttgttgccttcaattacctgaatagcatatccccatgccacagaaacagtcaacgaatgtgaactatcataacagactgtttgctgcaaaatccgggtagggtcaacatttacagcttcaaacaaatgttcaaaagcttgagttctgttcattttggggaagattgaatcaacagcatccagatgatgcagtgacaacaaaggtgacaatggatgcgcagacaacattccaagcagattcccacggagatcaacctggtcagatgcagtaagaccataaaatatagggacactcagcccgacttacaaacaaggtttgagcataaatcaaggaaacaccaagctgggatcagataatatacacaacactcgagttcaattaaagaaaagaaactgccaaatcgagccacactccaatctggtcaaagtgaaaaattgggtaaatatcacaaagtcccaaaactgaccatctaatatgcccacgaacccctaaacgcctaaacagctttctatcattcgagtgagacagaaaactaggtgctgcatagcaagcagcaaatgtaagaatatcagcttatactgtaattgtattattatcctttcccttgttgatggtttagtctgtaatgtttgaaaaatctgttcttcccatattttctacatccaaaagattaaacccttttttcttaaatctttaaccttcatttccatttacacttcagaactccccaaaatcagtagataggactaccctttccttttaaatatgtaattacccaagttgtagaacctttctcatccaacaaaagaaatgcatcagcagtcaacaaacttaattgagctcattaaaataaataaatacaaagaagacagaaaatctaattttaaaaatcaaatatttgattttgtcaaaatactataataaaaatcaaatcttggataaagaataaaaccaaataaattcttatattaacataaaaaaaacaaataattaatgcagggagaacacaagtacatttcacaaaatagatgtgtacctgatgaaacccaggttcatgggttatcccaacgccaagctctgccacgcacgagaaaatcctagcatcgcttccatacaagtgggcatacctcaccaagcaagaatcaaaaaccttagccagagccttagccagagagtggctaatggcgaagcctccaccgccaaacgccatgtcaaatgagtacttcacattctgctgatagctctccgaattgctcccgacgtaaaaccaccgatcgtggtcgtatttcgacagagtcttgaccaaattatccacaaagaagaccgtgtcatcatccccaaacacaaaccacctaacatccggctcaccgcgatcgacgacctccttcaccacacgtgcgacccggatagcagaccggagtcctccccggaaactgtacggaaagcgggaagtatcctcggacacgattaccggcggcaaggaactgtcgggtccgtcaccgagatctgactcggcaagttgatcgagaaagacaaaggcacgcgtcgatttaggggagtaccattggcggacgtagggtttgcggagtggccaggagcgggaggaggaagcgacggctatgacgaggtggcggcgctcggtggggccgagggagacgtcggaggaaggaagcgggagctgcggtgggatttggcggaagagaaggtagaggaggaagaggagagagaagatgaagagaaggtctttgaggcgagaaggagtgagggctttcgataatggattgggcattacttggcgtctgagtctgatcgtaggattataatttctgtactgatttcgcatcacaacacatttattttattattttatttatttttcaaatatataaatatgaccgtttatcgaaaaaaacaaatatcaaaatcaatatgaccggagaagacggtggcgatggcgaggagtgccgaactcttttgacaattgactcaagagatttaactgttgttgtcgttttcggaaggatttatttatttcacaaataacccttcaaatattttttactgtactactttgccactggatttttagtttacgcattagtgcccccaaattttcactttcttgcgaaaatagccaaaaaaaattttatttttagaaaacaatagcattacccaagtcattctgcgttggggatttcttcataggaatcaacgctattcgagtccccaaaaaaattacaaacccaactcaccacctttggccccactactatactctaatatttctgacaaaaacttgggatcatgcagacttatcaggatgtagatgggagatttacctcctattatatatctttgtaatgtgcttcttaagctgggttctaaagtgttgttgataggatgaaggtcgtgtgtaatatgcactatttgaaacgtagtataaataagaaaattggttatatgatgcttaaattagacattagcaaggcttgtgagttgtgattgtattgactggtctttccttagtgcaatgctttttaagatggatttacatgaatgctgggttcagtttgtgtgagtacggatggctatcaggtggatcatgaaggcccaaagtatgggtcccgttattcctacttaggaattcaacaatgtgatcagttatcacctttatttattttttatttgtgcttctgcacttattaataagtatgtgaagaatcatttgctcttgaggtgttgtgtggcaagaggtgctccattgatgttgttaattcagaattttattaatataaatgagacttttaataattaatgaatctgtaataaatattataaagatattaattataactaaagacaggattttttacttgattttgtagtatctgctactggttattagccaaagacttggtaggctctcttgatcagtacagcgacctacctagaatgattgccaatcactccttgttgggctctcatgattcccttctctcgatccctcaattcttcgaattgtcgtcattattctacaaagtaatgtatagttgctcgagtatcttgttgatcgtaatgaagagtgttattatggccttgtatttgccctcgtgtagcttgcaagttatgtagtttggtgtcatcaccaattggccattgagaatttatagtagatgggattttagtagtgggggtaatttgcttggtctgagtactagtggttaaggttttttgcacgcctagagtaaacccagccagtggggtagtcactccttgacctatagtttgttggcctattggtggttgaggattagtcagagtggggtctgtcttggctggatctctagggtttgcaggtgtctgcccgtttggatccatagccattagattcgttgtttcagcctgatttctcctctgtatttgtacaaccatctcgtgtc

SEQ ID NO: 15255 - DNA, 8591 bp, Cannabis sativa
attattctgacttaatttaattaaataattaaactaaactgtgtgtgaatattaaaatacggaatttcagaagaaattaaaatagggcactttaaggtatttgtgagaaggttcgaaagagggtgcgaggttggaagatgagtctttcctacactggtgggagggaagtgcttgtaaaggcaattttacaagctattcctacatacttgatgagcatttttaagttgcctgtgtgggtttgagagaagcagaaatctataattttgcagttttggtgggattctttggagtataaaaagaaaatatcctgataaattgggaagagatttatcggcctaaggtgaaagatggtatgggatttgtatttattcaattaagcactggtagccaagcaagtgtgccgtgtacttcaattttcagatacacttgcagctagagtcttaagcacaaatattttcaaaattgttatatacttgactcttttgataaaaacgattcgtctcatttgtgaattagtcttatgtggggtatggaactttgaaagcatgtgtttaggctttagaatggggatggtagacttacaagggattttcaagattcgtcgcttctaaggccatgtttgttcaagccaattagtgtatgcggtgatgataatagattggttcatgattatcttaatgtcgaatgggagttgggatgtggtgaagctttgtaatgatcttcttcctagggatgtggatgtcattattggtatcgctattggtgtgagggtgatagatagtgctagccctatcataaggatggggtctactctgtgagtagtgggtagtctctcgcttgtcgcttaaattaaggatcagcgggtgaattctttgagggtagatatgtggtgagaatgggttgtggagtttgaaaatcccgcctaaggtgaaagtgtttgtgtggacattgtatcattctgcgttaccagtggcttctctgttggttagaggaaaggttcatgattctttttgttgttcgaggtgtggagataagactggaactcctgagcatgcactcgtgttttgctcttccttggttctaggctggttgagactaggtttctagtttgcttttcgtcttcggcatttggggtcgctgcctagtagctctatttgtagagttgcctagtgcttcttttgagctctatttgtaatgatgctttggtgggtttagttttaccaaaattcagtcttgtttggtggtgttcagtcacggctagaggtgcccgatgggttggcttgtaatgcactggaggagttttagcagttgaggcgtcgggtctgttccaacttggtggtggtccacgatggcttttgctgccgacggggtttttctctttgtctatatatgcctctgttgtttcagtagtgctttcgttggccttggggtgtgattttgggaaagccttgcttatctagtattactcatcaattgtatcatcacgatttgcatttcagatgtctttctatgatcttgaaaaatgaaaaatcaaattattatgctgttctaaacaaacgaagaggctagatttttgtttttaatgcctacaaataaaagctcgaaaacaaatttttgtggtctaaggatatcgatttttccttcacaaaaacaaaagaaaaaaggatatacattttttttttttatatatatatatatcgattttttgaattgatagtcaactacattttgccatattcatcattttatttttatttttccatcccaaaacgttatcataaatgtgatgatgatgtagtggaatttttttaggaacaaatagaagttataattatagtgtagcaattctcattttgtggagagatagataggtagatgaccaaggcaagaaaggtataaagaacgcttcccactaacatctactatattccaaattttgatgccactttgagttggaagagaattaaaagtggtggtagtgcatgaggttgaagattaagaggatcttatgacttcaattttagctgtgaaagtatggttttaatttgatgccgaccaaaatatctcttatgtttattattgaaaagaacttaacatacacatactactagtggacaattccaccatgggtgtttactttttagtttttcctaagcctactatttagttacattattattgaaatgcaacatatttgctctctgttaaaatattatcaaatacgagttattgtcattaaggcatatttgtccattactttattttttaaaatttttaaaagaaaaaatattctaaacaaaatataatagtatcaatcaaagttaaaaaaaaaaaaatatatattacattgtttgtcctatatttttagaaaaatattggacaatcagcttaaagggttttatgagagagctaatgtgactctttctaattggttgagtgcctctaatattttgcaaaatattgaattattattattatttttctgatatgtttgcctcaattgaccatttcaaattgttacttgtgaggggtatgagggattaaaatattaagagattctttgcatacttaatcttttgaagtcacaatgtttctcttgagttctctttcatatttgttgagtaatagtttacacaaataacacttgatggagacttaacgtaacacgctttaattgtgtcaacagttccattttttaagtatatcttacttagctaataaggattggaagtggagcatcatagcatgctacaacaaaattctcttgcaattaaattatagattattatccaatcaagcatagagaatgactcctattttgatttgccgaatcgacacagctataccactcaatattaatttaaaacattaacaagcccacgaggtagaaatggtaaggaaacaactttgttgtagaaaaaaaaaaaattagcacttctatttttataaaattttcaaaatacattaaaacctacataaatatgatcatttggaaatccaatttccaagtccactgttctaaccaaatcttgaaaaccagcttttgccacatggaactaacaccagaggccctttcagtgaaatgtgtgtggggacagatgttttttttgctaagagtagtgtttgttttgttccataaaaaggtgttgaatattgagaaaggagaggcgacctctagactgtccgcttcgagttatagtggtagttcacctttacttgacactttgccaattttacttggctaattagcatttgtttcccttaattttgacatataccaaattatattttctgaacttttcaagctaaaaatatagatagaagctccaaaggtacaatttagtacataaaaatgttcggtagacacaatttggtatatagacaatcgccacgttaaacgtctattagtaaaattgaatgtaaatccctagaactaacaatgtcaatagtttagaagagctttttaatggcataaaaagtttaaagaacacaatttgatatacatgtgaaaattcaagaagaaaaaaatcctaattaaccgcattgctttcttccttttttattttccatccatcaaaagggagctacaatcttgacaatatacatttacatgtgaaataaagcaataagtaacccagggagccctctggtcaaaagaatggtaggtaaaaattccctcgcttggaagaagttttaaaattgaaacaaaactttgtaacaattatatctaattttctttgtgaatgttgtcagtgtatcaggctgtttttgtagggtttccagcttcggcagtagcatgcttgaaattgaaaacaccactgagtcctcgtcctttcgaaagttgttcgagttcttcaagtttgcgcttaagactttccacttctcttaacaaatcatcatctctttgcttcattgcctaaacaacattaccaggtgatgagtgttaagacaacagactttagtactgttcttaaaaacatacatattcttacataaaagcttggttggtgcgtgtatttttatttactttttacaacaaaaaataagtcatacaactttgcatagccagcactgcttcaattttatgtaaaaacttatcttccacattcagcaaaaataaagtaaaaggtttgagtttggcctgatcatctcttcctctctttaacagtgagtcaaagacaagaatatgtcattttaggaggaaaaatagtcttacttcctatctaaaacttccaatcttactcctatgcttcttaaaaggttgaacgccttgttatttgatcatcaaataatatttgttcaaaactctgctacctcgtttcagctcttctcaaaagaacacacgcagatttaacaagcaacacaatcttttttttgtttgaccaaattgtacgaaacagctggagaacaaattagggaaaaaaatagaagcgtttgtttgtaagtgtattacttatgttaattggagactaactggggaagctcagcgttaaagacaaattataatttgtattacacaacattgcacactctaatcatcaccctatcacattgcaggtttaaattaaatggaagaaataatataaaaccttaccgctcccattatctcatgtggtgatccaaaacattcaattgctaaatgtaaatgcccaagttgggcaggtaatctttccttcatcctacagattggttatgcagcttatgctctatgtggtttgccttctctagtgatggttggactagtgttttggtgatggaaatatttatccataaagatgttttgaaatgtcacgcgttaccattatttcttccacagtgaaagcggaatgcgttttgacatcgtaccttctcattgaagaaaaagattcaccagagtcgagtattttcaacccagagaaataatgcagatcttgtattatcaaatcatgattttatatgtcattatttcataaattaggatgttctataattattctatttgtcatattgtttctgagtcataaatcactgagatctatgtcattgttaaatgtactcccaaattcttcattttcagttatttttatctaccatttcttctatttcgacctatttgctttcatctctagaagttcttttttttcctcttcattccacatcacaaagtcaatgtctaatataaatacctataaaaagccattattaatattacctccaattcttgcttccttatttcctccttcctggcttctgatctagcacttctttgcacttcaaagatgagagcaattcctgctacctaccaatgtaaataacaaaataaataaacagactttagatatatgtacatgttaatctttatacacaagtaatttctgatggaaaaacatgtttgtaaaattttagagccctgaaagtggaacctatcgaaatttcagctagtggactatagccatctatgacaattctgcaaataaagtagctaggggttgaatactaccgtgaaaacaaagagttcccctataaggtctacagcagcctgtacagccttttcctcattcagtggacgaatttcaacatcagttgcatgaccatagatacgcctttgcatttgtgtggtgatttgatggtttttctgattgaaagttagcaatataaatgacactaagtatttgatgacaagaatggatactcaaaaataatatattaagaagcaaataaatagaacaagaaagacaaatgaacataaaagcataacataataataattattatgcactattagagatatactatgttcattatattgattgaaaaacaatcaataaccacacgtttagcaataaggtaatgcagtcctgatataatgtactagctccaatatcatgtaaaaaagaaaagcaataatcttatatgctcaaaaattaaatcacatttattaaaaaaaaaaaaaaaagagtgtctgtcttaaaaaatgtgatattatactgatgggatatacagaattaactaaattagattccaatgtatgaatgggattggggtatcgaacaaaccaatgaaccaagcaaaccccagatgagaaaatgagatcaaaggtgtaaatatcaaattacctgagccatattgatgattgactgacgaaaccttggatgcagaccagcttgctgcttgattttgctagcgatgggtttactcacagtcttcaagatcaaagttccgagcttcacaagcgggagtaccatgcctcttgtaataaaaaaaaaatggatctgggaatgggaatttgtgattttggaggaaagagaaccaaaaagtttcttcaaaatcgaaaggtcaaaatggtacttgtcgttgttaattttgactagaatatcaatatatatgagagggagaatgagtttgttttcttgaagaagaaggcagtagcgcaccgaaacgaaagagaagagtagagagctggtcagagggcgtgtttggatttgggaaaataataagaagaaaaaagcgtggggaaggcgcaggtttgttgcccagacagactcctggacttgctaggctgctgccctttgttgacttttctttttggagaacaacaccagagctcaattaggtttttgtttaatctgaaccgtccatcactagacaagtataagactttgtttggtagaaaggaagtataagcttttgtttattaggaaggagaagagtaggatggagagcttgaaagggatgtggcgaacgagagtaggatggaaagagaccttagaggggatggagaggattgtgttttgatttagtattaggtgtaaagttggaaggataaagagagaatgaataatacactaaggtttatggaatctgattagcaaccctaattagtttaattatttattaataagaaattatattattatgtaatttaatatgtgaaactatactgataaattgcattttaagaccctgttggtgtcgtagaggtattttcgtaattttgacatgagatgggtacaatcgtaatttttatgatatatcgtgcttataggctatattattatatagtatgttttattctgtctatctgtaggtattttttgacaagtcagggcggtatagtcacaaccgggtattttgggtcgaaccggattcggggcctaaaatatattttcgggatttatttatagcattatattgataaattagaaatctgaatttattgtattatatatgaatgtttagaatgataactttgcccttgactatatatggtggttataattggccctgcggtattttggtcatttaaccacctaagttaatttccaacagaagcaatttttgaaaaagagaaaaatcattttctggtttctctagttctagtcgaccccctctctctcccttaatcccttcattttgatttccatgattttgaaagaaaagcctttgattggagtggaattttgggtgatttctagcttgaagcttgtggagattgtggtaaattcttatctcttttaattgtattatttctgatttgaaataaagatgtttgaatctgttcttatgttcttatgagttattgatgtatgttgaagattttaagtgatatattgatgagttttgtgtgtttgaatcattggaagtatgtttattacatttagtatgttttgggggattttagtgcaaaaaattgaggtttgaattctgggttttgattttttttttctggataattctttatggtttaaatgctttgtaggttgtgattcaagtttgttgagtattgcaatttggtatggcttgtctgatttttttttttttttttgtatctcaagtgttgtgttgagctttgtttgatgctcaaatagataccaaagttagtttagtttaattttggttaagatttgagcttatgcatgttttggttaagttggtagggattgttaggtaaaaattcgaagttgtgaaaaaatggcttttgggggttacaaggcccctcgccgcggccgcagctgggcttgcttcaaggtgggcaacatgtatgttgctcgccgcggccgtggccttgctcgccgcggggagacttgctttccttgagaatttttgggtttttgtttttgtcataacttttaactcgggattctctttgggacgttcttgatatcgttggaaagctcgttttggactcgatatgcttatttgtaattgaaatgcaaattatgtgaatacgtgaaattgaattttgggattaaccctatttgtgaaatcccaggaatgtgtgactaggaataccagtgcttgctcaggaagaccaggaggttttgaatctccacatacttgggataccaagtaagacaatagttagcacgtagagttaagcactctggcactcatatttgatattatgcttgtgattaagtgagaaaccggaattagggttattaccctaaagtgagcaattatatggtctaggattattactctagtgtttaaataattttgaatgcaataccatgctctacatattgagataaagaattatgcgggtaaggcataattaggttagactcggtaattagaaccgagacaaaccaatctaaggctttattgta

SEQ ID NO: 15256 - DNA, 4050 bp, Cannabis sativa
  modified_base (161)..(165): a, c, t, g, unknown or other
actactagaatttacacacgtgttatggtttacagagtatattaccttaaatgacagattgaatttgttaatcagttaaatatgattaaaaattaatataacaaatgagttaatcctcaatattatactttaatttctatctaataataataataataatnnnnntaataataataataataataagcacatggtgtgtttatttacacgtaatcaaaatgattaaaaattaaattgaccatgaatcagatttaccctcattcggattaatgaatcaaaataaaataaaaaaatcatttacttgcaagaattggaatcgaaataagcaattcactctcaatcagataaatgaatcaaatcataaaaaattatttacttaacttgcaagaatcgaaatcgtatgtacataacttatactttattcttattcctttaaaaaagataagaaagtaaatgaaagaactctacaaaacagagttcaagattgagcaaaaaaagagatgagcgagagaatgagagtaaaagatatggaaatgaatgctcattcttaattgattgagtagtactttatttatattgatttggatacaaatacaacagcagagtaaagactctaactaacactaactacctctaacagatactaactgtttttttaactatttccaactgaaaacagtaatagtattaactgtttaatattctaacatcccccctcaagttacgcttgtctaaaccaagtgttaacttgtcaaacaaataatgaaaggtggcagctggtagaagttttatgaggaggtctacaatttaatgtttgaattcaacatatctgacatccaagttgtgagctaaaactctatctcaaacaaagtgtaggtctacttcgaagtgctttgttcgagcatgaaaaactagattggatgcaagagagcctgctctgagattgtcacaacagagaatagggcattaaggtagtttaatgttgagttcagcaagtatagattcaatccaaatcaattctgatgtggctaaggctaatgcacggtacttagactttgtgctggatcaagcaacaacagttttctttttggagtaccaactgaccaaattttcaccaaaatatatgcaatagcctgaagttaatttattgtcatcgtggcaccctgcccagcagcatcagtgaaaccttaaagatccaatcttgaagaagattggaatgtcaatccaatgttttgagtacctgacagatatcttaggattcttttgcaagcttcccaatgttcagaggtggggttctgcatgaagtaactgagtttatttacaacaaaagagatattaggtctaatcattattaagtattgtaaggcaccaatgatgcttctatattgtgttggattatgcatgggagtgccactagtggcaatgagttttgtggtggagcacattggtgttgattgaggatttgaatccagcagctgggttttagccaagagatctcttatgtatttttgttgagttagacaaatgatagatgtagttctatgaacctcaaactccgggaaatagttgatagggccaaggactttgagggcaaaggggctatgtagggcagagatgacatgttgaacttgagatgaattagctctagttatgagaatatcatctacatataccaatataagtagcgaatgtccatttgagttggtgaagaagagactagtatcatatttgttgttggtgtatccccaactgatcaaagtgcttttgagagtgtcaaaccaagtctttggagcccgttttagaccataaattgctttatgaagcttgcagacatgatttgggaattgagggtctacaaaatcttgtggttgagccatgtaaacatcatcttgaagttccccattcaaaaagatattattgatgtcaaattgttgtatttccccaccttgtgtaactgccaaggtgaacattattctgatggtaaatggtttaattacatgattataagtttcaaagtaattcaatgccaacagtgatctgttgaaaattcttggcaacaagttgagcttttagtctttccactgtaccatcagcattgaatttaattatgtaaacccatttgttttgaactataaccatgtctgaagtttttggaacaagagtctaagttttatggttgttcgattcttgcaccaacttgtaatctaaccatatttagaatattcactcttattatattttaatttgtgatggcgattaatgaaataaaataaaatcaatttaaataattatgtacctattaaaaatattttaatattaaagaaatattctaatatatatacataatataaatgtgtcacaattaatattcataaaaaatcatcgattttgtaacttagatttaattatagcaaatcaaatttcttcttcttttttgttaaaggaaaaaaataaaaaataaaaattatatagcaaactcaagtgggttcataatgagttgtaatcaaagatggatgattctaaagtttttctcaattaatgggcaaaaagtaaaactaaaaacaagataaagaaggaaaattagaaaaggaccattgaagaaggtatcataaccctaaagaaaaagcaaagccaacaaaattccacagtggaaaaatcaagaataatgaaaaaaggctttactataaagcaaaggttcaaaagcttggaagaatctataatctatttacacaaacaaagtgaagtttccttattgtacatgtgttcttcctttcattatctttatacataataagttctaaagataaaaaaaaaaacaacaacaatataagcttagatacaaaaacaaaggaatctttagtcacatcattacttgtaacaaatttactgacctaattggtaatggtaattataaccatcccacccctttattattattactattatttttttgggaaaattaattttatgttccacttatataataagtatgtattatagttaaatatcgtttgtataatgtacctagctatatgtatatttgtatatttgtatattgtttgcaaaaaattaaccagaaggcaaatttattatggttaattacatgcatatatatcactaagattatattgaagtgatgattaagacccccaaatgattctacaccaaccttatgatttccttaagaggcttgtactataagggatgattgtatatattctatacattataaattaagtgacactacaaaaaaaacatccactttgacaattttttggtcacaatataatttttttataatttaatgtgacaaaaaaattacttatgactaaaacataatatttaaatataagttttcattaatttaattttagtcacaacaaatattgcgaccaaaaatacatttagtcacaacaaactacatttagctacggtctttttagtcaaaacataagattttttattttatattttatttttagttttaagttttgttataattaatgacaattgttttatgcaattgtgtgtctaagaaaaatataaaataaaaatccttcttgaagaattatggtactattaaaaaaatccttcttgaagaattatggtactattaagtatatatacatctttttgaagataggtctaataagtattatgacaaaagtaaataaattagataataatctcatatatgtatatcgcattagaatttttatttaagaatacacttgaaaccaaataaattatattttaaataagaaattataaataaatagagttacactagaaaaaaaaaatcaaaataccaaaaaatatcaatgtaataataataacaataaataatcattaatattgtatcataatagaattaaaatagtattttagcaaaaagaataatgattttaatatgatttttatttttattatttcttatatagagaaaacaataactcaatcactatttaaataacggtaattaccctatatattatttattttttattttttttttcaaatttacggattgggtttctaaagtggttgcag

SEQ ID NO: 15257 - DNA, 4159 bp, Cannabis sativa
agtgcggatatccgcactttgcgggttggattggattggatcgtgcagattggattggatcggctattttatgaacactcctagtataaagtaattaatgaatgttagaggagataattttttacgtagttgggacattaataagtcttactccacgagtcactgtacatgagagtatttattacaaagagttttttcagccgatccccatttatgtttatcattggggtaaaaatgtcactattatcgtgtttgtttacaccatgcttggcacaattttccaactttgacttcgggcaaaattgcctactttatgatggattttaggctgcctataagtgtttggtgggacgtaatttatcctttgtttatgatttgacagctcattatgcatccgtcaattgatgtatggagattcatgaaatcagaaaataatgggcttaaacccttaaacacacttggcagagtaaggtgtctgacgctctttcccataccgcattaaatgcatgtacagtgtctcaaaaggagtgagagttgctcatggagcaattggatcctcccaaagataactaacctgttattactccttgaaaataatgaactccgaaaataattaaggcaatatgtcttataacaagagtctcattacctcctggcttatttctagactgccacaagggtgatgttaaagagattgttcactcttgaagtggcttctctcacgtgagctgagattgtaattgagctaaggatgatccttacctatgtatattttttttttctctaatctgctttgttcattaacttagctattgttattgcattattgcttagctgaattctatattatgattgttgttgatgaggtttaatccgcaacagtaattaaagtacattgcacaataaatagtcaaatacgttttttttttccttggaaaaattgtgtacttgtaagagagacaattcaaccaataaatcaagagaggagaatgattgttttcatagaaatgacgtgtaaaagttatatattaatgaaagagaacatataagctgttgtctggcatataaaaaaccgtgtttctctatcaccgagaacaatccctcactttccacattagaaaccccagaaagaaaagaaaaaaagaatattgtaattgaatagaaacaattccatgaataacttaaaacctaccgagctagctaaaagtgttaaaacccaaccaattaaaagaatcaaattcaaataaaatcctaaactgtacctttggccgtcaataaataaggtcagtctatgaacaatccaacaaatatgatgggatcatgggagacgagcagcatttgtattaaaatcggttgctgctttcgctaggggaaatagagggcccttcgggcttcacaagacgagagcctctgccgttactgttgttgctgctgctgatatcaagcccctgcatccggccaatatgatcaagctgcaacatctctgaggaagcatgtgtggcatgcataggctgatgtgtaggggtcacattagactggaaatgattaaaatgttgcatttgaatgttacgagggtcacctggcccagattggggctgatttgagaagaaggaagattggttgtacggaatatgatgcattccaaagttgtaagtatcggtaggtgtcatcatctctccggtggccatcttgagcctctcaacttctttcttcaacgcatcgtttagagctgcatgattgaatagcatagcaatgcattgccagtcataaattcttactgattgagagaacacaataatgaaaacaggaaaggagacagtgtaaaacaataatagaagaatgcagttacaagtcatagcacataaataattaaacttcctttatttctttggtgaaggttgactaaattgacataccaaaaaaaaaaaaattggtctataaaactagctttttgctgttcaagagaatgtggatcaaataaagcttgtgcatgtttttctggtagcaaacattaaaatcactgaaccctttatagaccaggatagggaaataatcaagaaagatattttcagaagttagtaagattattcttttaaggtggagctccatgaaattaaattgaaaacaaggcatttgaaaccatacataccatcacgcaactgagcttgttgttccatagcttgtagtcgaagcttaaggtctgtgttttcaccactgagaccagttgtatccctctaaaaaccaattcaaaaaaggaaactctgttactaacaagttatagaaaggtctgtgataaaataagaaggaccaactgaaaagaatctaggaacaataaattagaacacaaaaaaaaaaaaaaaaaagctaacttaaatttgaaaaaacttttagattggaaactcaagctagaaatgaaagaaacattcaaaatttgacatctcaaggatttaagataatacaaattaaaaccaccataccaaagtaagagatcaaccaaatatgtattgctacataatttttaagttatatgcaaatgaaataagatgagaatatccaaaagaacctggaaaagagtcagttgggcagatagagtcgttgcttctgtttgaagggtttgaacttttctctccagctcagttatgtaacgggcctttctctctttggaacgggcagcagactgcctgtttgccaaaatcctataaagacatgaaagtgaaagttcagctaaaaaaactacaaaaagaattgcctcaaattgtgcaaccaaacaaaattaatgttgcacctttattgacaagctttctagattacaaaaaaaaattgtatatttaatataaattcaatataaaacttcattgttagatatggttcctattcaccgaattttcactttgagatgtgtaactagataaagtaaacgttatatctacaacttaaaaagacaataataacaacccataattatactgtataatttaagcaacgaaaattcaagttttttttttttcaattttttttttcttctaacatgatttgaccgatgcacaagatgttaacaataaaaaatttaagtccctttcatattaataaatctataattatagcactcgaaaagcaaactcaaattcacattattactaaccaaaaacaaaactgagttcataacttcagatcttaattacatacattcatacctcttagctcgcttgggatcaatggtccataattcggcaagcttatcaggagccatagctttcttagcttcaatcgtgtccaaagacgaagacccatccaccgaattgctatgccggtgcctgggcctggcatgcttctcttcatctcctccaccatcaccaccgcctgcattgtcgtttttgtggccggagggtccatcatcgagtttggatccgaacttctcaatgtccatatacgtacaaaacaaatcgtcctcggatccaagctcctcaaagctaccggaaggtccgtcaaaaggatccgaaagcagatccaagtcttcgggaatccggaattggacctcggattgggatctccggtggtaggatccacgagccgggaagggcggagttggattcgacatcatgatcatcgtagtcgttgtcagagaacggaagggcttgttctcgggtttcgggttgggaccaagatccggtttggacggatcttgcatctccatgtgttgagctcgtctgtactatctttttttacacaccggtcctcctcctcctcctcccctatctctccgtacctctgtccacactcatttcttcttttgtcggggtcacgcttgcgtcaacacaacactactactactctttacacaacaccaaacgacgccgcttcaatcacttatttttgtgggccgaagaccatgtaaaagcccaatcaaaacttgcttatttgattgggccacttcattcaattatgggcgcttgctagtacatgtgggcctccatcttgatgcttgggtccagacaggttctgacaaccatgagcttagagtctaggcatctgtttatcctgttatcggtctcctttgttttcttcccatggaacaaaaaaggggcccgcttcgctttaattaaatttgtactaattttccagtaatagtaactacggtttctcaatcattagacctcct

SEQ ID NO: 15258 - DNA, 4318 bp, Cannabis sativa
ataaaactaatgtaagaaaaaaataggagaaaatacagatttttttgccattaatggcagaaaattttatatttttttctctttttttaacattcccgatggtttaaaactgtcgggaagtctacatcagcgaaagtttttaactgtcgcttattttgctcgttttgcgatggttgtattgaccacggttatagaaaccgacaggaatattttaaacgactgtttaaaaacgtcgaaaaaattatttttgtaatagtgatttctgtcagtagttaaatacgttaaaatagaataaataataataaagaaaatgcctaactttaatcattcaaagaatgagggaaaattaataaaaatatgcatggtatatattgtcatgtacaaattatattaggagaggaatgtataaatttacgtgcatcaaatatttatttgcaatggtcctttcaatgaaaacgttagtttggataacaaccttctattttattggagtaagaatatttttggagtgtttcatttctgctaatatttttggagttgttaaatggtctaaattactgggatggtgaaaattaattgtgaggttgggttatgtaatgagttggctaaaaatgggatcaggatggtggtccttgatgacttcaaattcggtcttagcttttgctacttgaaattagaatgatgtttatctcctgatggagttgaagctttgaatatctactcttgattcttacttgctcttcgccttggcgataataaggtgttgttttgttttactgtttttaatgttatccctaataataagaccgatcaatcctatttagagtgcattattagagatatttttgtatattgtaataattttattggtatgtcttaggattactaatagtattgcacacactttagtaaagttaattttttccttgaatgatcattatatttgatggtgtggtcaccctaattgtatcagtactactttataaatatactcttataattaatgatatgttctgatactctttttctttaagttttttcctattgagtttagaagttttaatgttgcaagttttctcaaaataaataaataaataaaattattggctatatatggttcattataatggaacgaacggagactaaaaatgtaaatttattaacatttttgtgtttactcttctaaagtacgttttctttgcctctttcaatcaaatcaaagtcttaattaataaaatttaaaattagattgcatgtagtcaatatatacttagtggtgtttactgtgtgttcctatttgagtgattaaatcatggatgttgttgttataaaagggtcccagttattgactcaagttgcttattgtgaccctttaacctccttccttgtacataattaattagacattaaagtagaatatttacctaataaagcaattgacagttgttttaactttgctttattagcaaaatgtaaatataagtaaaataattatgccaagcagctggacggagggtaaggatatcataaaaatctatatataagtaagagaatcttataaaaatacttaattgttttttcataaaactctaattaatagtaaaagttaaaagaaatcaattaatatttttataaaatatgattaattaaaaaaaatagtataaaataattttagtgttaatagtagaaaaatagaaaagaaagaaaaagaaatataataagtgtttgctgtgaacgctaaaaagtggtcaacatcagctcgctagattggttagatgattaattggtttaagtaaataatttagagagacacaaaatttattgtagttcactccctatgtcgcgatggtaatagagctacgtctacttcgaatttttatttctcacgagaataatagaaaaagacttaagtgtttaagcgctagtttctagagagagaaactaaagagagagctctaacgtccttgtgagtagttttctgaatgtaaaaaataaactaattggtctttccttttttaggtgaaagatgcctacaaaaatagaaaaaatacaaattggatgtttctgacagtatgtctacttcgaatttttatttctcacaagaataatagaaaaagacttaagtgtttaagctctagtttctagagagagaaactaaagagagagctctaaccttgtgggtagttttctgaatgtaaaaaataaactaatggatctctccttttttaggtgaaggatgcctacaaaaataagaaaaatacaaattggatgtttctgacaataaatgatgatctaacggtaaacattagcttttagtggtgatgactatttttcggagcccgacgggtcccattacgggttacccagagcttattttcgtaactttcttggggtaaaatttgacgacaatagcttcataattaaaattaaagtgtaagacatgacttgatagagaattgaattatcttcgaaactcaagtttaattgcgtcaatcggattaatattaagtgagttatggttgtactaaacgtaaattatgacccaacgtccaggttgaaatctagcccccaggttgacatcccaacgcctaagttgacatacgatgtcaacctggatgcgaggtaagtgtaaaaacatccaagggatgtactttaacattcctaagttgtatttggacctcacttagtctatttctgtgttctggcgaagatggtcagagatattgctatttttgcgaaaatgtgagactcgaaactcttcatttttgagtgagccagaaatgagaaatgcaaagttgtgaaattgacttctctaaatttatatatcgttgctattgtgaaaaactagatggccaatcgaaacgacatcagaattggataagtagaacccaatgcaccaagccatttgttaaccttggcactgggtacttactcgcaagctcctaggattttgtttttgatacttccaaggcttttgaacttgaggatgaggtatcctaccccattttttaccattccatatttaatatttgcatcaattttggcattgagcaattgaaggtagcgttccaggttgattgtcaacctgggcgctgggcccaacaccaagtcaacctgggcgctgagccccatttcttggggctcgagtttgtggtttttttttcaagtttgcttgaatcttcatcattgtttagatggaaaaaatgcctagaacatattttgctgaacttgatcagaaataacccaagttgacaatatgtcagcttgagcactaggtcccagttttgccccttcgaaaattttgtttggtccccaaaaatagttgaatcttaatattttctgaaaacaaagaagatgttcggaagtgttcttaaaaactccattgaaaatggcccaatttgaaaacatgtcatccagggcgcaaggccagccccaggtgccaacctaggcgatgggacctgtttttggcacccaggaagtgttgtttgttctttgaaaggacctatttccctgtttttaatgaagaggaagaagatacaaaagttggatctccgatctgatacttaaagaaacccagattgacaaattttcaacctaggcgctcggtgctcgaggcccgtggtcctgggtgctcaaaaatgaacttgctccgattttgattctgatgcctcaaatatatctgtgttatgtctagttgatgtctcaatgcaagttttgacccatttgcactaagacggtcccagaaactgaaatcctagttgaggttgttaacctgggcactgggtgaaaccctaggtgcccaggttggcttttgggttgtaggctcgtgtaatttcagctcccgagacttggattaggttgctccatgtgttcatggtacttaatattgaaagatagtgagttggattcaagttattgaagtcctaacttctatttttgagttcccgaaatcaacctgagcgcagggctagggaccccccaggttgacctgctatgacttgggactacttaactccgagatgtcaactatcttgccacgtgtcaaacattgttgttcacgtcatcaaggctattcttggtgtaaacattggtatttttttaaaaaaaaaaataataatgaaataaattttatgagagagggacaaagtgttaaaaaaaaaagatataaagatatacatttattatatatatttatatataaagataaaaaaaaatagtgtagaaaaaaaaggtagagagaaagagaatagagggagaagagaaagataaaaaaaaaaaaggtcaaacaagcttacattagaaaaaaaaaaaaaaaaaa

SEQ ID NO: 15259 - DNA, 6085 bp, Cannabis sativa
atatatatattttatatataaaaacacataaatttacagcaaaatttatttgtctaataatccagtgttaacaagcaataatgattgtgtatatattaatagaaggagattacattaatggagtaaatactggccattttgtacaagggatttgtcattatgtataaagtcatttaattttaggcatatggtggaagctttgattaaattattgtgtttggattaagtggtatttaaaaaaggaaaattgattaaatagttgtagtgcaaaacaagtcaaatatatattaggtggggtaattatattggtaagtaagggatagtcaagcttaaaatatgtatcataagtcaaatatataatatggttatgataaaaatataatagacaacaagcttgtaaagatggttgctgcttgagattgtcaagcttgtaaacaagtaacaaactgcttaaggaagaataacttataattaagttggaaagaacttgtataattaaagcagttgaagatagagaaaaacttaatagaggcctatgatacttgcaggctaagattcatgagacaagtccaacctgagttaaatcttatttcatatctatacaagtggcagtgatacacacttataatattgtgtggaaatagatcataagtgtgtatattatagggaggttaagactgcaataaagtatagaaaaattgagatcaaacttgaagaagtaatctcagcactctagagatgaaggtggagaaacttggtagatctaatggagatctaaatctaagaagatggagacctaatcagaagaaatcatagaaaaatcgagaaagaagtcaaagaaggggtccacacaagggacacagtcaaaacaaaagaagatctaactcaagagaacctaaagactgcaataatattgtgtcattgccagaatcttacagagagattaagactgcaataaagtatagaagaattgagatcaaacttaaagaagtaatctcaacactgaaatctaaggatttagagataaaggtgttgaaacttggtagctctaatggagatctaagcctaagaagagggagacctaatcagaagaaaccatggcaaagcatgggtccacacaagggaaatcatcaaaacagaggaagatctaacttgagaggacctaaagaccccaatggatgctatcactgtggaaatgttatttttacaagagaagtggtggaaaacctaatttagatcatcaagaagatttaaaaaaacagaacaataacaagaataactatcataatgccaatctcagtgatggttatgatagtgaggatgtgtatattattgcatcatcttataaagatgattggattattgattttgggtgtacttctcatatgactaataataaatcctatttgttattacaaggaatctaaaggaggaaaaatgatttaagggaatgatcagacatgtaaaattgaaggctcatattctattaattttagaatgtttgatggtattattagaatctaaaataatgttagatatgtgcctgatttatctataagtttaatctccataagtgtacttgatgatctaagaatcgtaagtgaaattgatgtaggtaccattaaactagctaaaggttttatagtgatcataaaaagatagaagaatggtggcctatactacttgcaaagaagtccaatggcttgctgctacaatactaaagaacatgtaacaaaagactctagagttgtactctatggcatagaagactaggacatataagtgaaagaggaaaacaaatcatgagtgaataacaaatacttggtaagaataaggtaaataaggttgatttctatgaattttgtgtgttagaaaaacatcatagattaaaattctaaactggcacacataaatcacaatgtatcctagactatgttcattcaaattaatggggacctgagaaaacactaacctttggaggtagtgtctattttttgtgtattatggacaactattctaggaaattttaggttttcttgttaaaacataaaaatgaagtctttcaaaagtttatccattggaaattgctcattggaatctaagtaacagaaaactgaaaacataaagaacagataatgacctagaattttgtaatgaggaatttacagagtattgttgagacaatagaattataaggcactggacagtgaggaaaaacccttaacaaaatggagttactgagagaatgaacaagactatactaaataaagccagctgcatgctattcaatattggcctttccaatgatttctatagaaaagaagtggtaactgcaatttacctaatcaatagatgccactccagtataatagaagggaaggccccagaggaaaggcggtgtggtaaaccactagacatttctcatataaggtctttggctgtgcaacatatgcacaccaaagtgttggtaagttagagcctagggctctaaaatgtattttttgggctacccagaaggagttaaaagttacaggttgtgggttaaaggaaaatgagggttcaaaactcttataactagggatgtaattttttaagaaaataatttttcttgtaaacatcctaatgagcttaatgcaggctctacagaaactaaccctataggtacaactattgatttacaacctgaaacaaaacctaatccagatcatgtggaaccaactcaaccacaggctacactagatcaggtggaacttgaaataaaaaatgagggatatataaaccaggaagacctgtcagatgaccagctttccagggacagaacaaggaggccacttaaacctaattagagatacaaatacaacatatgggatgagaatattgcatatgcctacatgtgcaagctagaattaaaaatctataaaccaaagtagcctggttggaagcaatgaaggaagaatgtactccttgattaagaacaaaacctaaagagttggttttagacctgaaggtaagagtgtagtgtcctgtaaatcgctctttaaggtgaaagagggaagaattaaggatgaacctttgatgtttaaagctaggttagtggcaaaagagtttacacaagtggagggagtagatttcaaaaagatattttatccagtggttaagtataaaactataagactcatgctatctttagaaacacagtttgacatggaggttgaccagatggatgtgactacaactttcctacacggggacctaaaaaaagacatctacatgaacaagctaagggatttgaggtcaaaggtaaggaagggtatgtgtgcaagctagaaaaatctttgtatggattgaagaagtctccaagataatgggacaaaaggtttgatacctttatgaattaagaagggttctacagaagctattatgatcattgtttgtacttcaaaggatttgaagtaaacaaagtcatctacctatcactctatgtggatgacatgctgataatcaacaagaatatggctaatgttgacaaggttaaaagaatcctcaagttaaaatttgagatgaaggacattggggtagcaaacaagattttagggattaacatcctaagggacaaagagaaactgatgctacactaggaagattacaatgtcaaaatcatagaaaaattttctatgaaggttgtcaaggctgttacacagccaattgcccaccaatatcttatgtctaataccatgtgctctaaaattacaatggaacaagaaaaaaatgatagaagtaccctacttaaatgtagtaggctctataatgtatttatgattagcaataaacctgatcttgcttatgcaatcaacgtgctaagcaggttcatgtctaacctaggaaaaaatcattggaaagccatgaaatggcttatcatatacttaaagggcacaactaaagtaagattgatgtattaggcacttcaagcacaacagaatattgagggatttacatattctgactatgcaatacaagggatagagacacaaggagatttacatcagcctattttttcttaagaggaggtcattgcacgagttgaaaagtgcaattgcaaccagtagtgacccaatccattattgaatctgagtaaatttccactacagaggaaattaagaaagacctatggataaaaggtcttacgaaagagctaaacctagctaaaaaaagaccatattatctacacagatagtcagaccaatatctacttatatgaaaacactatttttcatgacatgactaaacacatagggatgaaatatcaatttatcagggataagattactctaggggaaattagaattgagaaagtgcctacaaaagtgaatcctgcaaacatgggaactaaggtggcatctctaaatgagtttaagcttccctaattaagcttattatgggttgacataggttggtaagacccttcgtgggttcgagctaagaccttcagaagaccttaactattttctaccagtgcatatgggattcaagtggaaattgttaaaatgaatccccatatatccattgtccagatcaaaattactctatattacaaatttataattaaaaaggaattacaaaaacaagtggccttcggccttaactaactctcacttataaccaaagttagttacaaagtctaattgcaactaactcaaactcatcctctcaactacgtacatctataaatatttagaagaataaacataaatatgagattgaagagaagaaggaagaggcttgaaaattgagtcttggagcgctagggttagggctcggaggtccatacctaagagtatacatatacaaagaaaaagagaaagttagagaaacagagagagataaaaatgagagcgaaatacctaaaataaataaaggattaccattttttcacctttgatttgcaatccatttgttgtaatgtgttgatcatagaagatctaatagtggaatcaagaaaatcttttaaggcgagcttgaaagtggaagtacctgacaatttttgggaacctatataaatttggtgttctctttgtttatttttttagaatccgtatgtgtgcgtttgtgtgtggattaactttaatttgggagaattgtttggctagatttgggctgatgcaaacttcgagtttctgaagagaaaactctcaactctgttagggtttctttggtgtgtgtttgagaaaatgagttgttattgattgttctaaagggtttcgatattgatcaaaacgaagtagttttgattggagtcaactggtttgtttgccttagtaaaggtagaaattgaccttgatacctgatttgtgttatctgttaggtgtaaggagaaatcggtaattttgttacatatttcacatccattaatggtgtttatttataggcagctcattttctattttaccgttcactgctgcaatattacctatcaagctaatgcctcttttgagaggtatatcccaggcaagtttttctccatttaagaagcaagtactatccatgactttaactttgctagtttatcaaatatggagcaatcaaaatagaaatttttggtcgtagaaagcttttactttatatgtattaatttcatgtattcaacaggaaatgagaactaggatacaaattaccaaggaaaatgaaaaagaaatatttagattggattacatgtttgtaaataaagatgatatattcgtatactagttcatatttaggccttaggtgttatctagtttttaatgagttgatgtttttaaggtaatatgcaatttgctgattcataaaaaaaatgttgctcttttgtgtcggctgacaaaatctacgcatattccatcaacacaaacttaaaattatttgtcagttccccatcgatgcatctgaggagtactatcaatttgaaattgatggaaatattgttaaaaatatttttacgctatttgcgttagttttacactgatacaaaaaaaaaatattcaacaaccattctcgaactatcttgctagagttcagatctaagattctcattcaaccaaaaaaaaaaaaa

SEQ ID NO: 15260 - DNA, 3496 bp, Cannabis sativa
tggcaagtatggccactcagcagcaatatgctacaatcgctttgatgaacactacatgggatctgacccaaacaatggaaatcaaaacaaaaccagcaacccttcagcttttgttgctgctccagaactcttggaaagtgaggcttggtttgctgacagcggggccagcaaccacatcactgcagactcctcatcaatgactcacaaacaagactatggtggtaaggagagagtcacaattggtaatggtactcaacttttcatttctcatcttggcaatggtactcttcctactaatacaggacaacctttacttctaaaagaaatgttacttgtcccagaaatatccaaaaatttattaagtgtttccaaactcactcatgacaacaacattctcatagaatttcactctgatttttgtgttgtgaaggacaaactaacaaggagggttcttcttcgcgggatgcttaaggatggactctatcaactccaaacaccaagcttcaagtcagcctctctttctcatagttcagtagagtcaaataaaagtaaaagccctctgttcagtggtgttgctgtcaaggctaagtcgaatgttaatcattccaaaactggttgtttttcaatttccaaaagtgatgtttggcacatgagattaggccatccatcacataaagtgttgagtcaagtattgagtctatgtcaagttaatattcctaaaaatgaaatgaatcatttctgtgatgcttgtcaatttggaaaatcacatgcacttccctttaaaatttcgaacagcaaagccacacatgtcctcgatttagtgcacagtgatttgtggggaccttccccaatcatgtcacacaatggctataagtattatgttcattttgttgatgattgcacaaggtttacatggatttatccattgaaaaccaaggcagaagctggtgaagcttttatgcaattcaaagcttatgctgaaaatcagtttgagagaaaaatcaaaaaacttaggacagatgggggaggagagtatcaaacattgcatgacacagccatcacatgtggaattgacttccatcatcctcgtcatcatacctccgctcaaaatggaagagcggagcgaaagcataggcacattgttgaaatgggtctcactcttcttgcacaagctaaaatgccattgaaatattggtgggaagccttccaaacctcagtctatctcataaatcgccttcccacacctgtcctagatcacaagtctccttttgaagccttgtattctagaaaacccgactatgcattcctcaaaatctttggtgttgcatgctttccatgcattagaccttaccaatctcacaaattccaatttcactcacttaagtgtgtaaacttgggatatagtgagtctcacaaaggctacaaatgccttactccaactggaaaaatttacatctcacgaaatgtcgtgttcaatgaactcgaatttccttttcagcatggttttctcaacaactatcaacctgaaaaatctgtcatcattcaaagctcttcttggtctgtagttccttcttttaacttgtccacaggtactaactcagcagcaccttctccctccttaagcacaccagaagaggctccctcgacaccaacacaatctcaggtaaattctcatgaatctcagttctttaatcactcaccagctgcttctcctcatggttcagcttctgttagtgcgaggggaaacacctctgcaaccactgaccctactgctgctgatgctggtccaattttcatcactactcccatcgagcatgaacatgaagtttctggtttatcacctgtctcgggtcctactgctgtctctcaaattgctcaaccggttacaagtcaccccatgattactcgagccaaagctggcatcttcaagcctcaagtattcatgggcaaagcaacgtggaaacaacacttttctgaacccagcagtgtggaagaagcacttgcacatccggagtggaacaaggccatggacagcgaaaacaaagcactcaaagccaacaacacatgggttcttgtcttaccatctccacatcagaatttaattgggaacaaatggatctttcgtcacaaattcaatgcagatggtacacatcaaagatgcaaagctcgccttgttgcgaagggttttcaccaaagaccaggtatcgactttggagaaaccttcagtccagttataaaaccctctactgtcagaattgtattgaccattgcagcaacacatggctgggacattagacaattggacatcaacaacgcgttcctaaatggaacactcgatgaagatgtctacatgctacaaccacaaggctttgaggaaaaagggaaagaacactacgtgtgcaaactaaacaagtcattgtatggactcaaacaagctccaagagcgtggttcgacaagttgaagaaaaccttaatcgattggaacttcaaaaatgccaagtcagatacttcattgtttttctacagacatggaactgacattatcattgttctaatatatgtcgacgatattatagtgacgggaaataatagcagcaaggtaaaaaacttcatcactgaactcaaccaaagattcactctgaaggatctcgggcctcttcactatttccttggcattgaggttttcagagacgaaaccggcctttatctaactcagtccaaatatatagaagatctgctgaagaaaaataaattcatcaacctcaaaccgtgccccacaccagcaactgctggaaaaccaatgtccttaaaagatggagatcttcttcccaatccgacagagtacagaagcataattggtggactgcaatatctatgccacacaagacccgacatctcatatgccgtaaacaaactaagccaattcttgaaggctccaaccacagtccatttgagtggagccaagagagtgttgagatatctcaagggaacaatacataaaggtcttcacatcagctgcgatggaccattgaacatcactggatactcggatgccgactgggcctgctgtcccgatgacagaaggtccattgctggtcactgtgtgttctttggaaatactctggtgtcttggtcctcaaagaaacaaagtgttgtcgctagatcaagcacagagtccgaatatcgatcattagctcatgtggcagctgagatatcctggattgaatcactactaaaggagatcagttttccaactcctacagcagttacatggtgtgacaacatgggggcaagtgctcttgcctctaacccagtttttcatgcacgaaccaagcacatagaggtggacatacacttcatcagagacaaggtattgagcaagcaactggatatcagatatgtcccatcttcagaccaaatagctgactgtttaaccaaaggcctgtcaaattcaaggttccaattcttagttgacaaacttgggatggctgactca

SEQ ID NO: 15261 - DNA, 3131 bp, Cannabis sativa
ttgtaaatatatactcaattcaatactaattgattttatatctaaaaacttaacacaatttgttaagtatataaagaatatgatcaatttataagtacacccacataattgttaaagagtaaaaaaaaagggtcaaaagtaattaataagtaatattaatctttgaatttctttgttagtttttatttggatttgtttatttatttaatgggttaggttggtaagttaaaacaaacccatctaagtgatcatttgtgtttttgcttaaaatccacaatttggcatctttcctctattttttgtgttttgattttatttaataaggttattaaatcacaatcatttgggtggattttggataatactttctttttgggtcatttcaaagaacttcctttcccttttgttgagaaaaaaggaaaaaaaacaagtgaggagatagtgtgtcattctcaaatttatattatatatatccatcaagaaaagtaaattataattagataaacaatttaataataattattattataatccattcaattgtcaacattttctagtttgtgcaattatggtatttgtgattggaataaatatgattaagactattgagattttgatattgtatgaaaagacaatgtgtgaagttatattaatttgttcccacaaaactttttattttttaatttttccaccaaagtataaaaagacaatttggtgaagaagaagaagatataataatattagtaattaatgtttataattgtttgaatgaattgtgtgtttataatggatgtcctcaatgttgagggaaataagtccatttttttattaaaataataaataaattaaaaaaaaaagaacatattatatgtaaccaataagagcaccgactagatagattctattctcacacctccaaaaataaatatataaataaaaagattattaaagtgacaaaaatcatgttcttattacttgcacgtttaatataattataataactattattttgaaaaatacatgtatctgtattaagtataaataaataaattaatagcaataagaacatactaaattataagtatatataatgtagcatatataacaaatagcaataagaacaaaatttcttcctattaattaatattatgctatagaagatttccaaacattatcatatataacacaattttactactactattattattaaaaaaaaaaaaaagacaatttgatgtgcatttaaaaggctgaattggcaaagctttgaataaatttgaaagtataaataaataattatatggttttactattatactcatgttgagtatatagctaaaattttgaccaaaaagaaaataattgttttttttttttggaaggactaaacctattgttagaccattgaaaatattttattgtcgcgttttaaatataataaaatgcatccaagatttttttttttcttttaataaaaaaacaatgtttgattaagattgataattttgatagtaactattaagaaattttacacaaaatgactattttgactaattttttaacatttatattgtctttttttaaacatttttactttttgaagtcttctttggtgtttttttaaagtttataaattacatatatacgatatactcacaaattttcactcaaaatatctaacactactactaatccgaactaagcatcactaatctatttcttttcttcttcttttgctaagacaaaattatttaaaaatttcttcaaaatcgtatccacgtatatataaaaatccatttgaagaaaccgaatgaagcttcgaaacacccttttgtcttgagagcatacttttgtcctagatttcttcatctaacaacagcagcaatcatgatccactacatagaattcaaagttgctcaatgtgttccgagtaaagttttgactgctcagaattcagagttgctcaagcctgtgttggaagaattaataagtgaagcatgctctgttctaaatgcacccagacaagagctcgggactggatgatgtgaatcctgcttttttcaaaaaatattgggagatagttagtcatgatatggtgagaatgtttcgaattttttttaattgtgatgttttcttggagggcattaattgaaactaatgtggttttcattcccaagaagaatccttctgtaatgggggatttgcaacctatttctttgtgtaatgtgttggtcaaagtgattattaagatgattgctaataagataaaatagttgttggatgttgttgtatttgatactcaaagtgcgtttatttcagatcgtctaatcttcgacaatataatggtctcatttgaagccatccactttttgaaaagaaaaaggagaggtcaggagagtagtatgattcttaagttagatatgagtaagacgtatgacaggatggaatgagattatctttatgcacttttgctttaaatagaattcacgaagattgagttgatttgattcttacttgtatcacttcagtgtcagatccggatcaaagagcctaagaaagatattccaaataacaagaatccatacataacaactacaagtccaaggtcttttttcatagattcgagtctttgaatctcataagagattagaggagtcaaaatttacaaacaaactcctgttatctcatactttcattaaaaaaatttaactacacactaataaaataatttgtagattactaaatactaggcactagggctgtacaaaaaaatttgtaaactgcccaaaccgaataacccgcccaaaccgaaccgaaaaaaccgataaaaattacaaaccgaaataactcgaaaaaattacaaaccgcgcaatctgttaattgggcgggttgaaaataggtccaacccgcccaattaaaccgaccaatccaattttacacatttatttattttttttttaattttttagtttttattatctataacataaatgattaaatatataataatataaagttatatacttaattactagttgtaaagccacatatatagtgttgtactttggtggaatgtaatatttttaattatctttttaatttttattgattttgactttaaaactaaaaaa

SEQ ID NO: 15262 - DNA, 7384 bp, Cannabis sativa
  modified_base (6523)..(6527): a, c, t, g, unknown or other
ggtaaaataattccaacaactataacattagggactgtccttattattgctaagtcgatggccgattttgttgtaatcgaccaacattctcatacaatgcggtcataggtcgcccaatcttgaaagaaatgaagataattacttcaatataccatctcactatgaaattccctacccccgcgggtgtggaatcagtacgaggagtccaatcagacttagtggaatgttataacgtagcattgaaactcgcagaaaagaaaaagtcagtaaatgttatatatttacttgaagcccctcctcctcaacatgaagttttcagaattgaggaaatcccgcatgttgaaaagcccgacttggatcctgaatcattgactataccaataaggcacaggtcgcaaaagaaacaattgaggtacctattgattcttttgataagaataaagttttaaaaattagtttcgaactaactcttcaatagcgagaaaatcttttcacttttctcaagcagaacttggatgttttcacatgaaaatattcagacatggttggaatgtcgtcagagttcatgtgtcatcgtttgaacattgaccccgaagtgcgaggtgttcgacaaaagcaccgcaaaatggaccccgcgaagtaccatgtgcttaaagaagaggtggaccgcattttgtcatgcagcttcataaatgagtcattttactcaaactgaatagcaaaccctttccttgtaccaaagcctaatggatcatggcgcacatgcatcgattttatagatttaaataaagcatgtcccaaggagagctttcctttaccgagcattcaccaacttgttgattctaccgcaggtcatgaactcattagtttcatggatgcatactcaggatacaatcatatcccgatgtatgagcctgaccaggagcataccaccttcattattgattgagctttatactgttataaagtaatgccttttggtttgataaatgccagagccacatatcaaagattagttaacatgatatatacatatttaataggtaagacaatggaagtgtatgttgacgatatgctcgtaaaatcaaaacatgtacaagaccatatcgctaacctagaatccattttcagaatcctgcggcattacaaaattcaacttaacactctaaaatgtcttttcggagtaggctcaagaaagttgttcagttttatgctaaatcagcgaggaatcgaggccaatccagtaaagataaaagcactggtggagatgagatctcccaccaaaccaaaagagtccagagcctcacacgtaaagtcgctgcgtcaaatcattttatatcaggtttctctaacaaatgtaaagaatttttttagattctaaaatgtaacaaaaagttttagtggactgataaatgcgaagaggcttttcagggactaaatacacacttggggcaacccccgatactatccaagctgatgcctagaaatgtgttatcgatctacctagtagtgtccaaatacgcgattagctcagtgttactctacgaagaccaatgtaggcaacatccggtgtactatgtaagtaaatgcctattaggtgttgagacttgctatccacaaatgaagcgactagcatttgcactggtggttgcttctaaaatgttgcaaccatattttcaaggacacaacatcgaattactaacaaactatcctttgcgacaagtattagcaaaacttgaagcgtcaagatagttgcttaaatggtcagtaaagctaagctaatttgacaccaaatacaaaccgtgatcgacaatcaaaggataggcccttgttaatttcattcttgagttctcaaagaaagaagtagcaattatcgtagaaaagtgagttgatcgcaaagtaccatcgggagaaagattgattttgtacgttgatggggcgtcaaataacaaaagattaggtggctgaataatacgaataagtcctaacaaagccaaattagatgctggcttgagattcagattccctgcctcaaataatgaagccgagtacgaagcattgatctcgggattaaatcttactcttgaaatgaaggtcgagtacctcgaagcattcaacaattcgcaaattctagcttgtcagatcaaaggagaatatttggccagaggaggacgcttagccaagtacccgtcctatacatgtgagttatttaataaatttaaaaaagttattgtcagtagaatacctcgtgcttataattttcatgcagatgctttggcctgttgggcctcaataagagaagcagaattactcgatgtaattcctgttgatgtattagcccatctaactattcatcgcaaagaaatgatgcaaatcgaagtaactaagaaaatcaattggatgaccccaatcgttacctatttaacaagagggaggctcgctgaggataagcttgaggctaaaaagttgtgatatcgagctgctcgatatgtaatttatgacaacaaattgtatcataggagttttagccaaccgttgcttaaatgtatagatgggaaagaatgcgactatatactccgagaagtacatggtggtatttgtggaaattatactggaggtaattcccttgtcttgaagatcatgcgacaatgatattactggccaaccttgctagcagacgcaacctgtttggctacaacatgtgataggtgccggcaaattgcgacctaagtcaacaggccaccaagccagttaaactctatcactagtttctagccatttgcagtctggggcatagatctaattggtgaattacctaacgagaaaggaggagtaaaatatgtttggtcgctgtagcctatttaacaaagtgggcagaagctgaggctctcgcaacaatagcagctgcaaagttatgcgagtttgtctatcgtgctattatttgtaggtttggaattctttacaaattaatctttgataacggaaaacaatttgattgtaaggaaatgcataaactctgcgatgatctagggattcagaaagcttttctagcggtcgcatatcctcagagtatgggaaaacagaagcaatcaataaagtgctcaagcaaactataaaagataagcttgaagaaaagaaaggtgtgtggccagaagagcttacgcaagttctatggtcatacaacacaactactcgctcaacgacttgtgaaatccccttctcactcacatatggatgtgaagccatggtactagtcgaggttcgagctgggtcgttaagaagagattttttcaatgtcgagactaatacaaaaaaattagttgatccaactcaattttatagaggagaaccgcgatcagtctcatttaaagaatgcattctatcaataacgcacaactcgctattttaactcaaaagttaaagaaaagagtttgcgagcaggagatctggtattgtaaaatgtcatgcctaatacacgcaattctatgcatggcgtattcagcaacaatcgggaaggaccttatctaatcactgaaaaaattggcaatgcgacttactgattatctgatcttaatggtttacttcttgattgagcttggaatggagaaagtttataatattactatctatagtagtcgcatgtatatacttagtcaatttatttcataaaattcctaagtatagggactgtaattacatattgtactattgattatctaatgaaacctcaatttttggaaattctaaaattttcaaagtgtttatattttctcatatttatacttggaaacactcatcacaaaaagttatgaatagattgatgaagaattatgcgaggataaaattagctttagctaaaaacacacatcaattcagcgacaaataagtacttaacaacagaagtatcctcgagaagatacattattcgaataacatgacgaaataggttgttttaaatacaaaatgcgagtacgcatgtaccgctcaaaagaaagttcaacaaaataaatgaaaaaagactaagcaataggagtcttaggattgtccacgactttgcttgtaccctctgggacttcagcagtattcgcatctttaacatcgtcagggaaaagattctcacctaacacttgagtctcggtaggcgacatagtgcaaaggcattggccatctcaaccgcctcttgtccaaataccacgaagtcgaaatcaggcaacttggtcaaggtggtgtagatgtaatttgagacagcctggtcatactatttcttcccgatctcttcctcagtctcaagatcgtgagtaagttcagtgactcgcgcctccagagttttgacctttgatccacctgacccttggcttttccaagaacttcaatctccttgtccttagcaaccgcttcaaacttcaatttcttcaaactctctagaggaatcgagttctatttcttaagaagatcgtgatccttagtacatgcaacaaaagcctgtgagaatactatcatgaattgcgaggtgagtccaactgaactaggtagtaggtcctcagtaagaatccccttcactttggaaacaaactcgtcgctcacgaacttattctaaagaaccgtaatgtcacgagccttgacagcaggatcgatcaccactttcttccttttgtcctgagcgactttcttttgtttcttcgatgagttagctgcctaagtaggaatgacgctactctttctcttttgggaaatcgtaagagatggcgttgcagtactagccttgggtttgctgttgaaagcaggagcatttttcaagaatgtcatgtttgtaaggaaaaccataagtaaaaatctgataaggtaaaacgatattcaacatactagattatattacctcatgttggtctcgatctctgtttggatagaagcttgtctattttctcctttcgcttcctagaaggctcgttatacactggttctcactgaagtttagcgtcctatgcgataagcttgtgttctcgcagctttgtagtaatacacaatagaggccagtcgcgatcttgaatgggaaggccacttaaaacctttgcgatttctagacgagttgggtccaatacagatcgaactggtctatctgcgataaaaggaaacaaaaattagcatctataaaaacagtaaaaataaatgctaagtatggaagtatgcgacgtacgaggtgagcgattgaagtcaatccagacccctagcatcttaaacacgtagaactacttcgatatgtaatcccccatattagaaattgtgccttcaaccccattaatttcatagttgtcccatttactaaactagaagaagccattgtcatggccaacactccttatatcgtaaaagaagccaaagtctttgactgttggctcccctcaagcataatccatatacatctcataaaaccctaagattatgcaataactgttgtgagttagctgaaaaagagagacgtcataacaggaaagaaaatcctttgtaaaaggatggaagggcagtgtcaccccacatcgaagaatgggaattgaaaccaccacattttgtgtggggatgatttcaggatacgggaataggagatgcggccgctgtggtggcaagggtttagaagtagctgtatgaacaatattcaacctttcaaatgtttgacaaatcagacttcttgactcgctagaccagatcctcacatgcgaaaggtttgttcaattgggtattgtagagggaaaaatctacaatgatcggaatggaaggatcgtgggcactgaaaacctgtagaataaaagaaaaaggaccgttgagaccttgggacaccaggatggtgccagccgaaggggtgagtgaagatgagatgatcctttaggactcgtcggttctccttttatagagcctctgacggttaaattctcctattttgaagaacaaacatgggaggttgccttccctttttctaggagaaaggatcgattcttctgctttggttatagactcgttcctatcctttgtatcagattggtcttgtagctgctgggctcgtttgggccttgtatcttagccaaagcccaatgtatttttgatgagtgggttagatttactaacttggtttgaagggttgtaatttcgatttgggtcgtaaaaggcgtttcggccttgtgcaatttttggccactacaatttgtcccttactttttaagtcaagtgtggatgacttgaagagtagtcacgctaactggcaaaaaattgaaattgcgtatcgacaataattctgatttttcattgcattgattgacttgagaaatgtacaaatattgagtttgcattaggagtagtttaaatatgtgtgtaaaataattagtatgtggtaaaaactaataatagttaatatgatattcttaataataaaaaaaataatagtaataataatagtaatcatttcattatattgtatgtgcatagaaagaggcattgttttgtctcttcttgaaatatatatctttatatattnnnnntgtctatctaacggcaattcttggtttaacgatgttgttttgtttcctccgttaacttcaacagaatattcccaattaatttatattgtttttttaacaaaaatttattcaaaaaaaacactcattccgtcaacatttatttattaaaaaaaaaacacacattttgtaccctaaaaattgaaatccaatttttgaatagtaacagttttttttggctatctaatcaattcttgtttaacgattttcatccttaatttaaggtctgtttagtttttttttttaaatataaattaaaaatagaaataagtaattgaaatcaaaatggtatcccgtatcctaaaaatcgaaactgaaaactaacaaaaattgggtttcagtttcgatttttaggagaatgaatagtagcgataatatataagacggaatggtagcaacgttggccctgtcgaaccaatgattatcacaaagccattggatatacctctcgacttacatcgcaattgactcctgctcaatctaagtcaatggcagcagcaaggagggcaccaaagtcggggaagacgcccatggcttcatcggcatgcaaagtttaaagaaagaaagaaatggagaattttatcgcttggagggcctgagaaggctttccctggttgataagctggcgagcaaatgtgagcaagttccatacgagcatacctaggtcgatgttgttgctgttgctgctgctggcatttgttggaactttctgaggctgagccaccgtctgtgtctccgtctccatcgctgtctccgtcagctcaaccttacttaggtgatccagcgtagcagcacctggccttttatttgctttttttttt

SEQ ID NO: 15263 - DNA, 13381 bp, Cannabis sativa
cctaccacaaagctagccaaaatcctactacatttcaagtgataaggaaatagaggtccttaaaatagaagggttccctaaaagctaaagacaataaaatcttttcagatttgttcaatgtttgaacaaacaaaaagaacaagtaccaaatcaaacgggttggttaccttaacttaaggacttctaagtattaagttatttatccatgctatttatatacatatatattaaaattaatgagattttaatcaattattatcaaatttaaagttaaataaataaaaaatcggatctgaagtacacaaagataggagacaaaatctaatatttataaattaggaataaaataaaaaagaatataagactaaaacaataaatgaaaaatacactacgaaggttgagccgccttggttgtttgttactaaaaaaaaatagagagatttattatgatatttaaaataaataaaaacacagacaaaacaaaaccctagtagagtaaagaaagaaaaaaaaaccacaagtgttcggatgtgtggaggtgggagtgggtcccaagtgaggagagacaatgggttatattgataatagtgtccccatgcgcatcctctctctcatttctctctctgtttgtgttcctatgtccatccaagactctttcttttagtccagctcagagccaacaccaccccaaccaacacacaccacagctcctgcatagccacaaagactctctttctcttttcttctctactaccaaaaaaaagagacaacttttttatacaaattttgttggaaacactcttcactccatacccttttctcaattctcgacacatagttagtctttgttatctgggctctctcggaatctttctttcttttgagaatggattgttggtcttcttctctccctcatgatgacgagtttgagaagcttatgaggagaattaatcctcctaggtaccactacttcactctcaatttcatcattcttggtagtttgataatgtgtatatgcatttattttgcacaaattattgtctttttgtttctcctgtgatgaaacggtgattgttgagtgttttggtgaaaagggtttgtgatttttgtttttcttgttgaaatttggatttgcagggttacagttgataatgattcaagcagggaagccactctgattacggtatatgatttgattgtttttattaaatgcttgttagtctttgatttgttagtttattcattataatgatcattattattgggacttgttgtaggttgacagtgcaaataggcgtgggagtttgcttgaggtggttcaggttttaactgatttaaacctcattataagacgtgcttacatttcttctgatggggaatggtttatggatggttagtctctattttcaatggatttttcatattcaagatctctctcttttttctttttgtatctcaggtactcattttcttgaattcccactatttcttttgcagtatttcatgtcactgatcaacgtgggagaaaactatctgaagatgatgtggctgagcggattcaacaggtagctagcccttccaattgtgctgttctgtgaatctgaactttgttcagtgtaatgttgtgattgggaaatcaaatctcattattaatgtgtttattctttaatgtggtgtaatagagcctttggttgttggtctgtgttcaaactatgctaacaatttaagttttgttaatttcttgtctcaatgttggtccatgcatgatagattgaactaaagtatttccacactaaattattatgttggtggcttgtttagtttaaattttgtggagtaaaccatactaacaatctaatgcaattttctttgcttgattgcattttgcagtctttgggtccaaggggacggagttttcggtcattaagaaggtcagttggtgttcaagctgctggagaaaacactacaattgagttaactggaagagacaggccaggattgctttcggaggtttttgctgttcttgcagaccttaaatgtaatgtagtcgcagcagaagtgtggactcataattcaagaatggcatcggttgttttcattaccgatgagtcaactggattacccattaacgatgctgatcgtcttgacaatatcaaacagcttctcctatatgttctaaagggggacagagacaagcgcagtgccaatactgctgtatctgtgggttctacacacaaggaaagaaggctgcatcagatgatgtatgctgatcgtgattatgatgttgatgatacagattgtggcgggacaaccagtgaccggagaaaggctcttgtaactgtggagaattgtgctgataagggatacacggttgtgaacttgaggtgtccagaccgtcctaagctgcttttcgatactgtatgtaccttaacagatatgcaatatgtggtctaccatgccactgttaattctgaaggaccagaggcttgtcaggttgtccttctctccatcaagttgtaggctttagtttcatattcttaagttaaacttcatgtcacttaccagctttatctttgtgtttataggagtattacataaggcacatggatggctgtcctattagttccgaagctgagaggcagagagtgatcaattgcttggaagctgctgttcgaaggcgaacttctgaggtataaaagcatctataagttttaattattggattaaaagctgctgctgtgattgtttatactaataattccaccccttttgttgttttcttatttttgtattcagggcataagactagagctttgtggtgatgacagggctggccttctttctgatgtgactcgaatattcagagagaatggcctttcagtgactagagccgaggttacaacccggggatcccaagcagtaaatgttttttatgtgactgatgcatctggaaacccagtgagaaccgagacaattgaggcggttaggagcgaaattggcttgactatacttcgcgtaaaagaagaagagttgttatctaaatccccaccacaggagagtgggagattctccttgggtaatctctttaggtccagctctgagaagtttctttacaacttgggtttgataaagtcatactcttaaaagggttgtgtacttcagaacctctcatctcacttgtgaatcatatcctcacacactcagatcacacaccacttccttttctctaagccatttctgtaattactagaataccctggcctcagtttatccatgaagtgtggtctgaaccaatgataaaaatcttcacagtgaaatcacatttcaagctgtacagttccatagtttcactttcatgtatatgtgttttgtgaaacacactactgtaaatatgcaagtaaaattttttgttttgttttgtttttctcctttttataatttggctttatagatctaagatctcgaccattcatttgaagtatataatcatgatgaaagatcaagattgtatcatattctacaggagaattattctatattctaaagttctaggaaagtttaccctatattctttaagcaagaactacttaggcagaaattaatttcaagcttaaccatgttaatgaaaatgacatgaaaaacaaaaatcaggataattgattaatttcgacccttttcctaatgtcatgtaactatttttagaaagtatttattatcttggaattgatgttcagaaacattataaaattgttttagttgaataaatagctttttgtgtcacacatttaaataaaaaacattttaataaagaaataggtgggaccttttaaagccgccgagtttgacttgattttagtaaattatgagtttattgtggaactaaaaaagtggaagtgtgagtaagcaaaggcattctttctttcacgaaccaaataaatacaatacagttgcaggtgccatttaaagctggtggtgaaaaagaaattggaaattattttatatactggttttttaattttttttttttaaatttacagtttagtttttaaaggttgcagcactaattgtaatagggatttttatacaattttttgttgcaatttagattgcatggctagttataatagaaatttttacgtagaattccgtaaaaatgtcaaaaaaaaatctgttttaaagtgtaaaaataaaaaaatctcaaaagagaaattagtaaaaagagagcaaaaacgtttgggtgtggtatataccatctaaatataatgggtctgagtaggtaaggtcacaccatatatatgtaattatttttatattattattagaataaagtatagtagcaattttgctgcatgtgttacatgacttggtgtgtccaattatgcaaatcaaacaccattcattcattcccactactacccaccactcatctcatcatgatggagataatacacaatcaactacttttcttagctttctatgcagaaaagaaagtaaaagagttataattatttggacatatacaatatcattgaatttgattgtcgattaaggtgtttaagaaagtaatattttttaaactcatttcatataataattttcttttcataattattatttataaaaataatttttcaaaaacattatattttgtccatactataagatattttgtttaaaattattgtccgtgtttatggtaagaacacgttttattttccgaattagtgattcataagacaaaattgacactcagcaatactataaatttattttagaagaggcaagccctccaagaagggtgtccgttttctttgaatctaacagggttccttctgaatttatagttcactcgtaaattatatagtttcttcgggtagtgcattgtatgttgttcaaaatagattattcataaagtaaaataaatgtgaggatttatagaccaactacttttgttgtgaaagaatttagacaacaccaaaactacaagtattcacttagaatatcaagtacttaaataatgtaatatataaaatatatatgaataatgaatatgtatataatagaaaagacacaaaaatcataatggtttaataggagcttaggttgatttgcttagtccacttttaaaagaaatttcttgctctgtattttattatttagataagctcccaatctatttgagtgagggatgagttcacctatttatagaatagtaggtgaaggttacaaaatgtttagtcataatcacactattacaactataattggcgtattagttatattgatacaccaattataaagtaaatataagcttaaccattgttgattgatgtgtttatgcattttcattgatattactggtcttaataccacaaggtcctttctttgatattgcagtctctctttaacaaaatccttctggagtgagagaaatttatcccattaacaactatcatatttaatacactcattttatcaaaattagtagataatttgtaaaagaaagttcatcaagaaaagaaagacatggtagtagttttgcatgagaatgtcctaaattggaattttccccctccaattttttttttatataaaaaactaaaaaagtactcatttgatttatattattgaagaaaaagaaaaatgaggaggacaatgattttgtttgtgattaaaaattgagtgaaacttttttagaaaaaaaaaaaaagaaaagaaaagtgtgagtgtgtgtgtgtgaggaggagtggtggtttggtccacaagcagaagcagaagggtcgtgttgggtcgctttcggcagctgtgtgcgtctgaaaactggtaaattgctaggttggtccgacaatcagccgccagtacatatgtgggacccacttcgtttatatgtggtctctttactgtgtgcgagtgggacccatctcttttcatttctaatcctaatctcacgtgcttagaatcctaacgaatccacctcgtagcacgtgccctccatatccatatacaaacaaacttaataatcataatcaccatcattaatcactttcattatcaaatcatccctaaaatcttctaattctaaaccatctcacatttctactttttttttttcttttaacataaaaatctccatcatatttgatgtcaaagaccatctctaaaaaaaataattgctatatttaacctaaattattaaaattaatttagaaggccaacgaaatcttaagtataaaaattctattaaatatataagaaaatgtaaatagtgaaagaaatttcatacgtgtagggccctgcaagtagtgttgtaagttcgtgcatattatgctagtctggtccatatttattcatgcttttttttttaaaaaaaaaaaaataaagtcatctcatgcatgccatagaaaaatataggtcgttccgtgttgtgttgacattttcaaagggtaggctcagcacaatcagtaggcccaatagtttcgtgtggtgctttggatttgtgtcgtgttttgtgttggctcgtattttttaaacaggccaagtcattttcatattctgacttaaattcgtgctttactttttcattttttttttttacaattattaaaattatttgtatattttaaagctttatttatatttataaaattttttaataatattttactgataattatgtaaaaaaattattgatattattaaaattggatatttacctatgaatactcaattttttatatcacaccttacaaataaattaatatataatttaaatttttcatgttataatagttttaattatacaattataataataagtattatgtttaaattttattattattttaatttatttataattgatgaattcatttattattattattattaataataaattataaagttttttaatttgtcatgtgtcgtgctttttaagctagtctatttgtgcttacgtatcgtgtctttcatacttttcgcgttgtgttgtgctaatttgtaacatcatgtcatatcgtgcccaagcttgtattttttcgtacctaatcgtgccggttttgtgctatgtcaaaaagctcggtccgtatttacagcactactcgtaggtacccactcctgataaggtgggattacctacctaaatgaggaatgagacgagacaggaataacattctatcctctaatgttaaacaggacaagaatgggaataaaacctcccactcgacagggactcatttaatttttttttatatatttaataaaattattttaaattatcatacattacctttagtctttatgtgttttgtaatttattattagtaaatttttaaatattttcattttatttaaattacattatttattttaaattattaacatatataatattttaaattttatgcagtttttcttttttattcatgatttcattttgttaaaaaaaaataaatgaatccccctaaaaattacccactccagcagggattctccactctgcctcaaatggggaagatgaaaagatgcaggtggggatgggtatcgaaatagttaatgaagatgggaatgggaagagcattccttgcctattacccgcccaatttccatctccatatgtaaatttggctcatgctagactttgtgtcaaatttaacacaatttgtagcatgtgttaaatttaacttacattatacacgactattaaaatttaattttatatacataggctacattatacatatactttgtgtcacagagggaagcttctgtcataagttgttgacatcaacaaaagggttttcagaagtgagtaattttataaataaaaccatacgaatttaaaaagttgtaaaaaagtaaactatataaaatcttgagaaatgttaaaagacaccaatggtgtctaacatcttcttatcatatttgttaatatcgctattaatccaacgagcattgctattgggcaccaatagtacttagcacctctagagatgtcaccttgcgattggctagcgatactccctaaaaattaattacattaaactatatcgacctaatacttaattggaccaataacgataatgacacataaaaggatgctagataccactgatgccttttagcatttcttttagtttaattatatatcgaatctcatataatttggtataataacttttaagaggtatcgctaatctcgtaaggcaacatgtttagatggtactaagtttcacgattcccaatagtaatgttctaaaatttccctaataaaataaaataaactaaataaaaagcaccgtataaatgttgcttaaggagaaaaatggacagtttgtgtaaatttcccaattgtgccctaatagaagtatcgaagtatagttatccattggataggcaaactagagagcccaaatgagtttaactgaagcaaaagttggcccaataagtatagctggagcctgaaggcctggttcatgtgactttcaaacactatgacccattaaaaatcaaaagcaataaggtatatagactatagtgtagagtccaatgatgacaatgaaagcaatacccgatcaaagtgaaaaatttaggcttcttctcaatagcataactcaaacaaaaagaccccccaaaagggtatatattaaaactagttctaagctcccaaggggagcagacatttgactagaactgatgggacgatgaaaatcaagcgattggaagctcaccacagtcactcacagtgaccttctttctaggacgatctccgcggtcggtctcttgtgactcaattagtctaactatgtccattccttccacaacttgcccaaataccacatgcctctgatccagccatggtgtctgccatccgccacatataaacaattgaacattaagcaaaaaacaatctagttcctgtgaatgttaatgtctttcttctatgaaaattttgcgatttaacgtagggtgtcatattgtacagagttgtccacttgttagtatcttatttcttgttaaattttataataccttcactgtgcatatgaagaactgacttccattggtattggggcctgcatttgccatgctaacaactcctggaccaacatgagtcactgcaaaaaggaaaaaaaatggaagggttttatgtcagccatacatatccaaatcaatggatatctcagtaaatatttgtgggagcactaatagcatttttgaagtttttggagaccagacttccatccattttcttttttcaaatagactatattaaaaaaaaagattagcctgactatttttttttaaaatcaagggctattgccctctcaacttcatgactggccctgttactgtgtggcaatagcaaacacaatacgccactaatcattctctatcatttccaaaaccctaattttatcggcagcagagtaatgtgtgatacataatacatacgaaaatgaactgatggtaaatttagcaaaatcaacaattgatagcagctggattgacactaatcattctatatcccttcctattttagcaagataatatgacagacaggtaattattcaggaaatcattatcaacatgctgcaacacaggcatgaacaattaagaggcgggatgaaacttacacttaaagttctcatctttaaaagtgcggccataaatacttttacctccagttccctgaaataggccagcttcaaaaattaatacacctcaatacacaacatttggaattaagggtgcatgattcgaaaagtacacatacatacattatcattcatatagacatatacatgtgttcatacgcaatcagctaattatatacacacatgcatgatgcatccattgaagattctcacaagaagtcattcaatactgcagtggagaaagtataagatgaaatatgagccaacaaaatttagagatcactcacattccctttgtcaaagtcccctccttgaatcatgaaatccttaatgacacggtggaatgcagagtttttgtacccaaagcctttctcgcctaatcaagatagataatcgagattaaaccagcaaattaaataaacagccagtcaacatgaaaaaagagaaaagcaataaataagatacccaaataaagcctcacctgtgcaaagggcacggaagttctcaaccgtctggggtacatcatcaccaaataatccaatgacaattcttccaacaagctttccaactggattcccaatgcttatgtcaaaatatactttgtgggtaacttttgattgtaaaggggctgcctgaaaaattgtcccctcaaaagaacaacatatgtgaataaacagtttacttcaaagtagttctatgagggtaatttgctaaaataactatatgcaagtttggaatcagcaaaataatctcattgattttacactaagctaccctactacctgctcagtgtagggtccttgaatgggttgttcagtgtatttttagttttgcttaaacggatattttgcaaataaatagttttgaaacgttagtttgctaataaattgttcaattaagtataaaagactcgttctatgatgtgagcttatcaaagtagtcattttcccaaataatccaaaaatttgacaatggcaacagaataagtgctaaagcaatcgaagaactattacaacattactgcaataactgaaatcccagctcaaaattctgataattttggttattggctctatgaatcaagctcaatacagaagagtggcgataaggaactgacctcagcactagctcgaattgagctacgaagaccaaatttcccccgagaatggaggtgagatgatgaggatttgagagataaaagacgagaggagtcagacgacgtcgttaaactcgaggatgaagaaaccctgctgggaagcttgattgaactgcatgttgggctcactattccaatctgtgaaacgcatttcgagcccggaaacgaggcgacaacattcgactgcgccaacacaacggaaatgaaatgaaaatgaggaacaaatgaaagagaaaattgtaactaaaatgctgaacaaaacaaaacaaaaagagagcttttttcccctatttccgatggagctttctcgttgacaaacacagatatatatatgtgtatatatacagagagagagggagagagtaaaggcgtattaccagaggtgaaaaggtagaagccattgacgatgaagatggagtctgctctaccgcacacgaatgcttcgttctttcgcagtgtgtacttttagttttagcgttgggttaggtgaaggctagggtaatttagtcatttactaggcgattaattcgaaaaacgtacttaaatatggaaatatgataaactaaagccgcttcggtaataattttattttttaatattttaattaccaaaataaaaataaaatttgtgtttttaaaattttattttaaaaaaataaaaattaaaaatgtgttctataatttttatttttattttttgcttttatttaagtcgaattcggtttagatctcggatcggagctgtgttctaaatctaggattggggtcaggattgaaaagtaaaaacaattttatagaacatatttttgaaattttttttttacttttctaattttaaaaataaaaaaactgattaagaagtgttaccaaatacaccctaagttaattactatttgatatatgtccccaattacaatttaattttagaaaaaattacaccaaaaatttattaaaaattaatggaaaattttttatttttactgtttaaattttttttattttcaaaagtacttatcagtaaaaataataaattatttttaaattattttattgtttatttagagttatattatagttcacgaggttagtttttgttgtttcatagtttatttataattgttacgataatgatttcccattgttgtttacttatgtttttactttttgatgaacaaaatatatttttataatttcaaaatttcataaatatatttttataattaaatcttaaagttgtaaataaaacataaaaaaaaattaattttccttaattttaatcgtccttcctgtttttgtcaaatttttattttaatttcttaaattttaggactcattttgtcatttgctttgttatcataaattcaatatcttactcatttgtgcttgggttgataaggaaatggtcctaaacagctgccttaattaggataataaagttatcaccattcataatcacaaatataatttttctaaaaaataataatcataattataatttatgtaaactgtcttttttgtttaagtttttagcagctaaattgtcctaactattgttttacttgcacttaatccattaatctcaaattttaacggtaaaatcttctaaactattgaactattagcaaatttaaggtgtcatccgtataactgtcactataaactacttatatgtacactcttatacacgtggcatgtttatattgatacacttaatattattattttaaaattaattttaaaactaaataaaatatttaaaaaataaaaaaatattataaattttgaaataattttttgtaatttttaaataataacattaactgtactaatttaaatgtgtcacgtgtataaaagtgtacatataaatagttcatatttggcagtcaaatataaaaaatagattacattttaaatttgctaatagatatgttttacaaaaaattgctaatagatctataattttatcatcaaaatttaatcttagaagaattttttttttttaggaaaatacttgttaattataaattaaactggtaagtaatttacaacaacgggaaaaataaaagaagacaagagatatctaaaataagatcgttaaaagcagcaatacaattagatcggccatataaagtatttgtaaccatcaaagcatttgtctcaacatgaccaatttggagttcccaatgtgaagcccataccaaactacgaaaaagagcttttgcctccatttcatgtgaagcaaaattaccaattaaaggcatgaaaagggcagcaagaacttgacctttgctattacgcacaacagcacctaccccaattcgattgttagttgagtccacggctgcatccacattcatttttaagattgaggtgtagaactttgttgaggccgatacttagattgagcaaatcggtaattgaaaatgtagttattagcataagatgctaagtgttcagctggtttggccctttgtctgtgtacaacccgattcctctcagtccaaatacaccataaagtgcaaattatagactccatttcagtgactgaatgttgtgttgtaaggtgaatt

SEQ ID NO: 15264 - DNA, 5860 bp, Cannabis sativa
ccccaacaaccactacaaccgccacggcttcgcttccagtacgaaatggcctcctctcattctcttcattggcccaaaatgtcataacccatctccaaaattccggtgtccaggtccaaccgggtctctccgacgccgagttcgctcgtgcagaagctgagtttggcttcgctttcccacctgatctccgagcagtcctctccgctgggttacccgttggaccgggttttccggactggcgggctcccggtgctcggctccatcttcgggcttcgcttgacctacccatcgccgcgatttcattccagatagctcggaataccctctggtctaaatcgtggggcccgagaccatccgacccggaaaaagctttgcgggttgcgagaactgctttgaagagagctccgcttctgataccaatcttcaaccattgttacattccttgcaacccttctcttgcaggtaatccgattttcttcgtcgatgagaatcgtatcttctgttgtggtctggatctttcagatttcttcgaacgcgagtctctatttcggagctccgaatcttcggatcctcgggtcctcaagaaacaaagatccgtgagcgaaaaatcagccgggtcgtctacgaatttctcccggagaagtttagacacggggctttcctccggtgcaagaacaccgagatgggtcgagttttggagtgacgctgcagtcgatcgtcgcaggagaaactcgtcgtcttcttcttcatcttcgccggagagattctttgatatgccgaagtcggaaattccgaaatgggtcgacgaatacgtggagcaaataggatccgttttgagacaaggtgggtggaacgaatcggatataacggaaataatggaggtttcggcttctgggttcttcgaaggggagatggtgttggtcgataatcaggccgtactcgacgctctactgctgaaagcggatcggttctcggattcacttcgaaaagcgggttggagctccgaagaggtttcggatgctcttggttttgattttcgaccggaaaaggggaagaaaccggttaagaaactctcaccagaactcgtggaacgaatcggtaaactggctgaatcggtttctcggtcatagtaccaccgaaccggcatcatttttttaattttaatttttactaaaggccttgggttttgcttttttttttttttttcccctaaggttgaaaaattcggaatacatgggggaatggggttgtactaccacaacagaaaaattgtaatattaattaaaaaaagaaagaaaaacgaccaaaagttcaaatttattacaagtaagataattataattaatatataattaaataataaaagtaaatttcactagactatttcgtctcttttattatccttttaaacatagttatgtaattcttttgtttattattatttgttaattttttgctgaaaacattatttatttacaactcattattccatgtatattacacaatattttcttttcttattgggtttaattcctctttagtttatttagtatttggtttactcaaattacgaaaatgcccattaccagagcgcacgtgtgcattgtttttttttaacaaaaagtccgtttgtgggacccgtgtttgggaaggtgagcaccaatcagaagatgcttctgttgagctaggtgtgggacagcacatcctattaattctattcatattaccaccgttaaaacgatgccgtttaggaaaattcaagagtaatttttctttttattatttgtatatattttttgcaagagcggtgaattgggaagataggtttggcttaggtggtctgggactggagaaggaaaaaaagaaaaactctccttttaagaaaaataaatatttaagttgtagatagactgaaatagataaaaggataggggagttatcattcttattattcttatttaattttcttggaatttgggaaaagagataacgggttccaatttctcctattgggaaaaagaaaaaatatacattacatacataataatacattatattctgacaaaagaagaagaaaaatataaataaaaatgaataaaaaacgtttttgagcttttgagagacaaaactacgaggtgttatgatatgagagcgtgttttcgctatcttccttctaataatttgttttgtttttgtttttcttgttttttgaaaacaagatgaaaaggaaaggaaagagtgtttttgtatttggtatatattatatgcacatacggattattattattattattactattattacatacatgaatgtgatattgtagtttgtggaaaaatgggagggtagtttgggaaatagggagcacgtgatttggggcccagttatttttgggtccgtacatagacatgagatgggatagtttggagttgggaagaagggctttcatggcaactaccttatttttaatatatatttttaaaaatgctataaagagagaaagatgaatagttaatgccatttttattttctttctgtacacattaggggaagcatcaaatgcacgcgcccacatatcgttgtgcgtgaataagttgtacggataatgcagtaacaaatttaagtctttttatttatttttttaaaagaaaaaattgtatcactaattaattatggtttttatttttttattttgtatctctaattaataacagtgagttctctatgatttaataaacttcataaaagtctagaaaaaataaaatgatttttcatttatatacaaaatgaaatattattgacaatttgaagaggtaattatatcaatctagttaagtttataagttaaataaataatataatttagtgatatcttagttctttttatgtataaattgagttcactttcttcgttgagttttaaatatgcatttgccatttggtatgtattttgtgcttggaagtaatttttattatttgaaaaaaacaattgtggtttatatatatttataatcatacgttatttaattatagagtaatgcacaccaattattaacatttttttcatgactcgcaagtgccatttataaaaattgtgctaactcatatataagtttgtgacttttctttttattgtttgagaaacaatttatgacaatataaatttatgttacctttttttttccttgacaatataaatccatgccatttgagtattttttttttttttttgaaaatatgccatttgagtatttgactatatataatatgaatgagaggtacagaaaaaaaaaatatgtaacataaatttattttttaaaaatacattattttacttttttcttaaaaaaatatgtgtatatattaagagaaggtggacagtgcaagcccttttatgtattttttttcttaaaagaaagtttaataaaaaaatgaatgaattgaaaatattgtagtaataatatatattttttataaattacacaaaacataaaatttattcaattacaaaatattgaagtaatactgtgaagaatcgattagtaataagtatatcacaagacaagcttaatcattaattacgttcgatgtatttaaaattataatctatacgaaacaacgattgattgtttactagtttattgtaataatacataatcatagtaaaattaagactccacctagaaagaaaaatatcaaaacatgttttaaaagcaaaagttaatataatcgaagtacacgtacgtggtattaattttctacgtactttaataatgcatgttatatacgttacatgataatatatattattaaaataattccatatcatttattatactgaaataatatgaccttgactagctataaaatgaagtaaccctataatcttatcttttatttattatatattgtggaagaagcaaattagttgtggtggcttttggatgcaaatatcttcataataataaataaaatcaattattattgtacttttgagttttattcctttcaaaaaagaaaagaaattattataattatttactattttttagaaagtaggaaattaatgaaagaaagaaaggccaaccaaaataacaattgaatatgaaaaatattcttataaagtcgtttcttctaataataaagttgaaaatgaggaaagaaataactaatattaaaaaaataaaaagagaaaattaaatgctccaacggtcactgccacgattacctgaaccgaccgttggtcagtcacgtgctaattcaccgccttcacatgccacccctttctcttcatcttcctctttcacatgcatacatacagatttagaattatcttcattattcaaaaaaaaattgaaaatataaataaataaatatttactatgtaatattgttgtaatttttgtctgaaaaaaaaaagaaaattgttttaattgtggcggtggcctacatgtatagataatgggccatatttgattggaaatgttatgggccaagatagaactgtgttctggtgtctgaagatcttgtgacacaactaccaaacgtaacaccttgatttatgacatgtgtcacatgaaaaataaaacccaaatacaagaaaaaaaaaaacaaaaaaaaatacccaaagatgattgagtttagaattagaggagcctttgtggatttgtggtgctagtgtagtggcacttaaattgtagggtcagttgtcatacattttgatttttattttctttttttaaaaaattatgctgtatttttcgaagaataatgtttacattgattgagttatatgtggtgctcagggttgatcaggtcaaatctggagttcatatatatatatattttaaaatggaactcattcaatttaacaattacaaaaaaaaaaaaaaaatggttcatcaagctcacactttaaataattaaaaacactatttcttttacttttgaatataaacaactagaagaaattactcatataaacattaacaaaatgaaattttcatagaaataattatatgataacaaaaatttctccatgataattatatgtatatgtatatgtataatttaatgtggtaagatatgtatatgtggtgttgttattgataattttcggtgcaattgcctgaaaattaatatgacaatttaaatttcaataatttcattgtaatataaatacatatagtatttgatggtaacaagtgctttttttttttttgggcaatggcagaagaaagtgaggcaatgtgggtgtttcatataagtataagacgtattattggatttttttctttttattttttggtggaagtattattggaatttgtagggtcacattgttgcaatatttcaaagttggcatgtgtaaatggtctcattgtttggtttctatgccaagtgtgttttgaatatcattattattatatgtaaaacaatatattacagacaaaatagtgagttaccgttggatacttatctagccagtactacaccaaaatggcccctcaaccctaatctttgtcttcattccaaaaaataatatctctaccttcctattatttgcattttaaaaaaatcctagctgtttaaaacccttttatggcttttgggttgaatagattgaagtgatgatcatgaggatgacattttaaaattataagagcacctcattaaaagatgtttgataagataaatatatttttttctttttttaattgataattattattagaatgaaaaaaaatatcacagaagaatctcatattatatcattctttatatcttctcttttttattttttattattattctaataatttttagagatattactattggattattttagaacacaaa

SEQ ID NO: 15265 - DNA, 5749 bp, Cannabis sativa
gaaagaaagacctttagtattgctgctttgtggtttaccaggaacacttggtctcattttcttttggggccgagaacatggtattggagacttgtccctggttttaggattccttggaaaactgtccaagacttgaatagaatcatcatcatcatcatcatcaatatgaacattctgcttttcaaaatggttaggactatgaggataatctatctccgtgttggttgtgtcaaatatgataacatggaaatgggagtctccttcatatcgaaaaactaagaaatttccacggcttaaagaaaaatgtagtgcaaatttatcccaacccttttccatccatacttttccatcattactttttgtcaactctacctcccatattgatccacaaggtactttaagaaatacttgacttggtaaacagccacagtatttcacccaaaatccataaggaatttgctgcacaaggaaatagaaacattacatgaccacacaatttataaatatttatgtatatacaatatgttccttttctttaaatcaagacattattcatggtttatagaagaaatgaagttaatatatgatttggtttggtgtaataaattaaatcatagaagaaatgttagggtataaggtatacttacaagcttgttcagatgagtttgttgaagaataatcttgaaaaaatggggagcagtaggagaagaagccattgttgaaagttgaaacaaacaactttattagagaactgatcatattaaagcacaacacaatacatttataaataaacagtgtactctcttaaaaaaaatgttaaattatattattaaacgtctagacaaacatgctgccccttttatttatttttttgaaacttttccccttccttgagtaattagcagctattaacttggacttatttaccttgcattaatgattattaaccacattacattacatgtctatacactaattaattaaataaactggccaactaactctaaaaactaatgaaattaagacaaaccacaacaaaaccacggaatataggatagtaattttgaagtgactgttaatattcaaaaccatttagtagatatcttttgaacaaataataataataataataatatacattgtgttgaaacctacaaaatataaaaattgtcattttgcttaataatagtactggtacacaataatattgttgcaaaaactacaataataatgaaatataaatctaagtagtttaattacaacacaagtaggaaactttcacattacatattaattgggaagtagtaatttcatatttcgtctaattatggaaactttcatctcagtttgatttctcttaatcagctgaaagacacagatatccccgagctttagagaattcgctcttgcaaatgcagcaaatccagcagaaaactcatattttgatctataagctaacaacttcacatgccaatatttctcaccaacccagagagtcataatttgtgcctctttaattccaagataatgccttgcaaaagtcaatggaataagctgcacaaaatataattaatattgaatttcattactactaatactctcttgatgatagattaaaaatggtaacagctttgacattagaaagtacacattttatcactaaaccagagcaacattttctacataccagattatgagagcgatttgattgcaaagccacttggaagctgggattttctgaagatggaggcatattacaagtgctttgattgcctgtattcacttcagatatgagcttaaagtttagcaagctaatacttaaacagacataataaatttactttaaaaaaaatggtattcttgattcatactcatacctgaaagtttagcaacaattttctcttctctctctgaaaatttgttctgtggaatcatgttccttctgtcattcttagtagaagaacaataatgtttcacattttgctttgatgtacttgctaatttggtagctgaaaacagcacttgttaatactgtaaccatacacacattgcattatattggaaatttatgtaaactacttcttattacctaagtaattatatgcatcatcatcaggcttaacaatcgaaactctaaacgaaacatcattgacattattagttagttcaaatttgcaaatagaccccgcttttaagttgttttccagcacaaatgctttccatccatgtatgagtacagctactgttgatccacttgaaaatcgaactttgtaacgaacaggccaagatttatcatctgaaatccaaaggctagcttcacattctttcttcttaatgtatgtttgtgcaaaccagcatggtatatgctgcaagaatttacaaaaaagaacaagaaagaaggaagattgaattagttgaagtgaagcaagcaaaaaacaactaaacagacattttatgtcatggaatatatgagcttaagatttacttacgaaataatgccgaccagttgtatatgatgctttcataataacagtaaagaaaggatattcagactgaaaatagtcgttggctctttcaacagctatagtgtcaactgattctactttgattgatgcgcttgctagttccaggtgaacatgtaagaaagacaatgcagaaaatattactaaaccatttttattataaacaaattcacaaaattaatttctagtggtagatggattctggggtaaaattcatatagatttagattaaatacctttacggagaccactttgttgcattttcttgtggggctgagaacatggtaatggaggtttcacccttgttttaggatgcaatggaatgttatccaagactttagtagaaggataatctatttctacagtagttattccacatataatcacatggaactctttcctttcatatctgaaaaccaacagatttcctctgcttaaagagaaatgttgtgcaaatttattccaacctttttctaaccatacttttccatcactgctttttgtcaatcctatctcccatcttgatccacatggaagattaagaattacttgactcgacaaggaaccacagtatttcatccaaaatgtcttaggaatttgctgcacaagggaaaatcaaaataaaatggaaaataagctaccactgaagtgaagagttcatgttagagaaacataactacatgagtgcaggccaagactacactacaaaaatcaaaagtcatcttcagttctggaaatttgataaagtctatggttgcaaacaataaatatcatggtaaagctttacaaacttcatgttacagagtctatgaacttaataaattataagtctacgtatcatcaatagactcgctagaacatgtcatccttgtatatttgatacattgacaatagtttcaagctagattttatgaatgtagacattttagacaaacttggtgcaaaaagaacagagttgagaactcgaatgtagagagaatgaaaacaaagataatatattccatcctcaaacttaggtaaagataccagaaatcatagttgaagtgcatacaaaaatcacagatgaaaaatatgtactgttgaagcagagagagtacgagtacatagcacacttactaacttggtgtggccaagagtttcatcaaaaataatcttgaaaaaatgtggtgcagttggagaagacttttgctgagctatctggctagcagaagccatggttgaagtcttttgctctgagaaaatgtggagcagttatttcatactaaaccagttcctcatccccaaatcaaacaacaaaatctgctatttaattaatgatacgttgttaaagcagcaatatttggataagtgtgtaattcaattcaattcaattcaatcattaatatggaaagttcacggtgataagttatctagctacaaacaaagcttgccctttaatcttccttacttttaacactgccattgaaagatgttacgttacccccaatccattcagaagcctttactaataaacaacaaggaaaattcaaaactctaaatctccaaaatttagaagaaaaagaaatccgaaattcaaataacagcattgctattaggcaccagtggtgcctagcacctttgcgacatgtcgcattgcgattagctagtgatactccctaaaagctattatattaaattatataggactcgatacttagttggaccaatagcaatattaacacataggaggctgttaggcaccactggtgccctttaacatttctcttcaaataataatagaagagctcttgcagcatttctaatggatatccaaataagagatgaaaatgcaaaatatagttcactttgttaaaaatatgttctatctattctaatggtgtgctaaattatgatacaaaaatctcacataattaaaagtgatccaaatacaacatagcatgatgtaaaatttgtcacaataaatgttatgcttaaacatttactattatgtcatttttaatattttattattcaattttagttaacatactcttttgcattaaatggcttacattattattattttattattaaattttatatttaactttgtattattattattattttatattttttaataaattattaggtcaacattaaatagcatattaaattttgtatcaagatttacaattatgtattgaagcacaatagtaaaagttgatgtaaaaatatcacaaaactactttttgtacaaaatataactaaacttttacatctcccaatagaaatagtttagagcatctctaatggtagcatatcaaaaactttcacatcacttaaaaatatattattttattttatgtttctttcagattatttttgatactttttatgtctaaaatgatctaatgataagcatctttaaaaattattcaaataatattatattattatttaatacatattacataaacaaattttcttactttatgataaaataataattaaaaaaaataagaaagagaagatataaagaacattatggtatacattcttttgtgatattctttttcattctaatggtaagcatcaattaaaaaatactaaaaatgtatccatgtcatcaagcatccttcatttgcgaaacacacaagccgctgtaattgctcctcactttctctctcctctattttagaaatctctgagactaagagctcgctcagtgatgactgagggggtcattcggtggtatacagaaagctggacgaaaacaattaactgattgaggagtgaggaagatgaggagttcacatggtcatatttgcttcgtataattcatataaatttgtaactgttggtgcgagattgattttatctctgtcttgattattttaaattttaatatttttgtgtatatatatttatacttgtccttcatgatcttcatggctgatggaaagaattttttttcattttaatccttttgatttatattattattcattcaacattatcattttctatacatcaaaatattattttcatacatatttttgttagtattgtatacatatgtataatcatattttcactcatatatgtttacttataatgcttatttattcaataattttattgcataatattaagtagaatattctactttatatctttatatattaaaagtgcttatctaacgatattttttggtttaacaaaatataccttgaatattctgttaa

SEQ ID NO: 15266 - DNA, 2541 bp, Cannabis sativa
  modified_base (2022)..(2044): a, c, t, g, unknown or other
aaaaaaaaaaaaaaaaaaggctctacagaatttttaaagctttattgcagaaaagttaaaaatattgaacgatcgaactaatcaaatagcgtccaaataaacacttctgtagcccgattgcacatattcttaatacatagcatccctgcaactagagccacatactcataatattatatatatatatatatatatatacatattacacattgcagaaagatattatatatccataattagatggattataattttccgcttttttttcctttaattaaacgctatgaaatgagtgaatttttggttaacagcaaatgctaacaaatacttggagacaattcataaccaccttaattcactttttgtggcgcaggagatatgtagggaagcaaaaaccaaaaacggtcgatccaaatgatgaatcggacactcacctaacttccacattgttagtttgcttaataatccaaagggaactttgtgtcaatcacaaatgctctctctctatctatatagatatatatatttatatatatatatatatatactttttatatcagacagccaatttatgtaaatatctatttggaagcataactattggatcctattctagaggttttgaagcaccaacgcatatgtcggacatcatctataatttatcatcaagaaaaagtatgtctcacagagaactttgtagacaaaatgaaaagttgtaaaagagtaacattaaaaatgattatgcattaagcatacattcaaagttgcaactgatgaaatatacaatatagcggaatataataataatatatgtatagtataatactttcaaaaatggacctaaaaagagcttttcagactatgagaagccacttcaaaaataaataaataaataaatattcaggtctcaagaacaaccacaggctgagagtcataactagcttgcccatcaagctctcagaaggtacaccctaaaaacaatacatatggttgatgtcacaccaataacatttctgatcacatatactttgcttatggcttaatgtcttccacacaatctgtgttgggaatatcttctacttgttgtggcaatggactatatatgtagtatgtaccttttaatttctatttcctttcccttggataagcgaaaataagtaactagaaacttaattaatctataaaattcacccccggaaagaaaggcaaattataatgattgatattgtaatgagtaattaaggcccacatcattagatggtcctctcctaacacacctggttggttggatatcataactcgtaaagatatatattctcatcagtggtaaagcaatagatagacttttctcctttctgcctcagatcctcatgtaaaattatttaccaaagaaactaaaatatactaccccacctcctaaaaatatgtaactaattaattaaaaacttacggtaaaaaaaaaaatgtcaatgtcataaagggacgagtcttaaaagaatttatatatatatttactcataaattttgatatgtattaaatgatgttttgaattttttatattgttaaaatttctttcaaactattaaaattattgaatttaaagatttttattttattttattaaacaaagtctgaatgaaaataattagggggcacaattttatacttttcaaaattaagaggtatgatttggtagctatcaaaatttaaaagtaggatttaatacatggacaatgaccatattaataaaattgaaaaaaattagacaaaatttttaaaagcttgaaaaattaaaaaaagaaatataatttgaacaaaattaaagaataaaaaacttaattaaccatatatgtatatattgtaaatatatctgcagaaaaaattatggagcagagattcatcacccctaaggcttgccttaccggggaaacagtccatcccccaaaactacacatctagaatcgataaatggagaataattaagtaacggaaaaaggtgacttattattattattattatnnnnnnnnnnnnnnnnnnnnnnnttattattattattattattctgttttaagatgggaagtactagtactactgctctttaaaaggcttctaaatttcaaccacaaaatagatattattaagtgaagaagtagtagcagtagtagtactaaggcagctaagagctactcatcaaccaattggaaaaaaatgaaagcagtagtacagtaaagatgactttttttcttctttcaattagagattattattattttttatatatttttggtaatatatgctctcattgtcacccactctaatgtgttgtggtacattcatcacccctttctttctttcatagttatctaatcctcccttgatagcaaccataggtacaaccgcagcattgccatataatatatatatatattatatgtggtcctcctaattatgtcagcctgaagagaccaaagcccctctagagagagagagagagagataaagacagacagacatattggtgatgagagagagagagaga

SEQ ID NO: 15267 - DNA, 3452 bp, Cannabis sativa
attaggctatagcatttggcatgaatagtgtggtttatgtgccaagaattaaaccagacacaatatcagcattgtctgctttctgtgagaaggccagcatggtgagcacagggtgagaaaactcaataatacaattcaacttgccagttccataattcattttaatatatatatatatacgtttatatatataacagactcatgaaaaaaaaaaaccaattaagatgtgaaggaatcattttcttttccctccttttgcatttaatatgagcctgttgtttataataaattataatagggttgtcttgttgcaccaaccctgtccattggatccattctccttcaacaagctgcaatttcagcgtctttccactacaagaatgtagaaattgttgaatcaagggatactgcaatggtagactctcaacaccaaacattgaaaaataaacatttattaatgtcacaaatatttcacttgtatgtgaaaatatgatactgaaaagtactgtatttctctctcttgggaccaggattttccatctgcagatgcaacccagatagccaataatctctcgaaccttgggcagatatacaatagagaagatatctcaacagaagttttggtaatctggatttctagaaccatgatctacttcttatgattgtcgtttggtgacttaaatcttatagtgactttgtccccataaaggcaaggggtcaagttcttggcgaagatggagttcgtgtgcatagtttagttcttccagggcttccttccagtacaactgtatacttttccggcccaggagaggttagcttctgcatttattcttcttgctctggataatgatcttcattgaactttaccatagccgaaaatggctatctgatcaagaagcactgttgtccacacaggtttactctctcaagcacgatattactgatgtccagtgtttgatgccaggccttatcttagctattagaagagttgtgcgccttaaggtaaccagtccaatcatttccagaacttaatcataaattcatgatacttgccttatccatcaagtaaaactgctgttatatctttttttactgcagaacctggtgtacggcttggagaaatttttgtaaaactcggtatttttggctagacttcattcgaaaagtttcactcccagcaatatctaatccagggaccatttttatcctgcaaaaatacaatatgagagaagagcttcttttaaagaaatttaagggggggatgagaaataatatccataatgatttataatttattagtactcgagtcaattgttttgccacaatattcttcaatgttttgagcaaaagcataattatttttctttcgtagtctcaattggagctgaactccactatacattatacaataagagttttgagtcttttgactttgatttgattgtttagacaagaaactaaagcttcacaaatattatttggaaaaaatgtccttgcaacaaacatattgcttatttttttagtcagttctaattcctcaggtttgcctgcagaaatgattgcataatacttaatttttgatcataactggtatcagtgagcagctatatggaataaaaaatacagttccagaatgcatcaacagtataagctctttggtcattaaatgtggtgttagttagcaacttgttgaatatagaatctcgagcttttggaagtatgagaatttcacgggaaaaagaatatgctatatctcagattcagatgaattcagttcacaatatgagctttaccactagatagtgaactgaaagatctaaatcccttgaaaattattacatacgctcttacctccaacttttatcgcaagagctcctatccaggctctatctttttcactatatgcatagctaatggttgacgccaacaaaataaatccatcatttatctgcatcatttcgttactttggccaggaacttgagtcactggttgtacaaggagagatcgggttcccttcggtagcatctcccagagttctgactctgaaaatacaattaatagttaactccagaaactacaaaaagcaagtatgaaggccaagccaaagaatcaaaatgctataagagtttttagcagaagagtcagcttgaataaactattttcttgaaatccaaacaaatgtatcattcattggagaatgatagataaataacaacaaaagaggcccataacatagggcagacaaataactaactacagcctctattccctctagaatatacaaagaaccttaaggccttaatcctttctcccttgcatcaactatcaaatcttaaactaacaaaaaaaatgtcttgatgctgtccttataagaaagatggtatgctcaccaattgactgaatctcttgaaatgagaagaataatgcatgagaatatcttagtcctttctaagcatcttaaaagtttattgctttacactttggtactatggtcaatgagatttcgaataaagaaagaaaaagaagatgacattcgctagctgttaaatatgaataaatttaaacatattggtaattttcaaggtagtaaaaacatatataaaaaattccgataccaaattgtgataacagtatattttaaggccaaaagtgaaatgaatcttaacccaaaataaataaataaaagacaacaaaagattacgagataaaaaggctctcaaaaaaaaacagccacaatgatgatgaaacagcactctagctaatttaggaaacgttgtacaggacaatatctctcaaaatgacataaaaaaggattagtgtatcaaatgacaagttgaaaataagctatgacatgagaagacaacattatctaatagtaaagtaaaaaatgacactaggacaggttacaggaacttgaaaatgaggtgaaatttctatgggttgacaattgtcaaagaactgataagcttttgcgaccttgctgcataatctacactaccatctacttgttttccttcaaatttttaggttgagatgacgaaaatggttttgaagagggataggtgatggtgtcttataaaagagtgagtagatcaaaactgttgattatgggaagatagatggacgaaggtcatgattgctttcttcttctacttaacaatcctagggataatttcacatttccttgtacttattttcagttggaaagtaatagatccaatgagaaagataaaaaacataaggaaaggtaatagtaataaagaaaaagtttgtgactacgcaagtaataacaaagaaatgagagactaggatcattgagatttagttaaagagactaatataggtgccgtttggtaatacttttgttttttaattttttaatcacaaaatgaaagcaaaatttttgtttttaaaaaatttatttttgaaaaacaaaaatgccttctgtaac

SEQ ID NO: 15268 - DNA, 10523 bp, Cannabis sativa
  modified_base (3219)..(3219): a, c, t, g, unknown or other
tttatagacataatagtaaccttggtgtaatggttaaggtagttggtaaatagattagagggtaaaagttcaaaccccactaactacactttatattttctaatctaggtgcctacactgttaaatcaggctaccgcttagaagaaagtttggagatggaggatgctacttcttcatctaattctcctcacaaaatgctagaatagattttggtttctaaatttacccaaaaaaaaaaaaaaatcaaaatctttccttgaatagtcatcaatgacgccatttcctacagttgtcaatctagtgcatacgaaaattcctacctcagtagcgtgttctttatgtgattgtgcttgggaattggttggatatgttttatttaaatgtgctctagcaaaagaagtgtggaaccaatataagtctcgaatattttttccaaacatcaacaacttcaatgttcatgatatctactctaatttagcagcaattcataatgatatactgcattagaaaagatcttttgtctaatgtggtttatttggacggaaagaaataaggaattacatggcaccaaaacccaaaccagtttgtattatttgtacctttgcaactgcttacatcgaataatatcataatgcaaaggtgtctcttatgactgctcaagtggatacaaattcactatttaaaccagttcattcaagtttgactgtaacagtccaaattcttagattacatggcttccaccaacagttggttcttacaaaatgaatatagatgttgcgtatgatgtggaaggagctgttatcggactaggagcagtagttcaagacgattttgaagatgtgattgcagtttttttgaagtcattacgagattgttatttaacaaaagagatggaggctaatgcaataatttacaatataaaatggactctttcaaaccggttggatattcattccattgaaacggactcacttttagtggcaaatgctattaacaaatgttattctacttgtgtatctcatttctatgaaatgatttgatagatgaggtttcccttttaatatcctattttcttgagtaataattgtatcttatgtcaaatgagaggctaatagaggtgcttatgacttggctagatttgctctttgattagataatgattgttcttggttgggagaaattctttttccaatctactttgttgttgtaatggattctattcattaataacaaacttttcaaaaagaatgttaatttttataattattttaatttcatattttttaaataatagtataatgttttatttttattaaaataagatttatgtatttttttatgttaattatttttgttaatatttcaaatatattttatttttgtgttatatatattttttaaaaatctaaaaatgaaaagaatattatttttttgaaaaaattaacaaaaaattggaatatatataatattatacaaaataaaataaaaaaagtacaagagtgtttcacaaatttttggggtggaaataattttttttttcacaaatgttaattatgcataattttgtaactttgaactttcttttaaaaaattctatagtaatttgcgattacacacttaattaattttttttcttaatataaacaacttaaacctagtttctatcaccaataaatgtaaaaaaaaaataatcattcttatcataacactttagtatcaagttttaatttgacgaaaattaaactcaagacatattttgtataattttaaaaaacataaaatctgaattattatttaacaaaatagaatatctaatcagtaaaaatacacacgaatcaaaatattatttacccaattttcgatcgaaaaagtgtatatgctgtcgaaatatggtgatagtaaaatttacacacatattaagggatagaaagaaatattggaaaaaacataatgaaaagaaataaattgaaaaacaaaagccaaagttgcctacaaggaactaatgcacgtgtattcatatccaatattagtagcttttgttttgagtaaagctccatggtttctgcttcttcatggtggtgagttgtgcttcattcctttcttgctcatttctatttcccacttttttttctttctcttttaccttattaatggtgttattagattccacaacactttcttcattaaattctactgcattgaaaatggctttgctctctttccagaccataaccattaatacatacaagtacaataatattaatggaggactcctgccttctctttcattttcatctaatgcaatttcaaactttcacaacaaagcttatgctttttccattaattattataataacaacaataataataatagaccattttttcaccaacctttagatcatcacaaaatcttttctccaaagcgtacaggtctacttctagtgccattcaatgctaataacgactcagaaccagaaggagaaggtacaggaggtcatgaagaggacatgaacgccgtcgaaacagtactccagagactttactccaccatcaagagcaaaaaagttcatgaattatccgacgtaattggccatgaatttcaaagtgtttgcaattttttctcaaacagttttcaaccctttaaaaggaaaaaggtattcctagttagatataatttacacgtttagtttaatttgtttgtttgggaaataaaagtacatattcatcatatcaatgcgcataatgttgaagttgtttatttgttagttgcagcaagtgttggattttttcttgcgtgcgataataaccttggggaaccacattgaatttgttgtgaagccaacattgcaagatggaatgaatgttggcatcaaatggaaattaggtatgaaaatgttttttttttgggtaagacaattgtatttttcaggttaattagtacttactaggatccccttcttgttttctgtagagtgtagaaatataagtgtgcctctaggaaagggggtcagcttacatatgtaccacgtttatcatggaaagatagtaataaggtgttaaattttcttcaaacttaaaatcccaaagcacttttgattcaattgttgaggacttgaccaaatttacagtactactttttctccaggaatttagagatgttattggatccgctgctttccgttgaaccttttaacttggtaatttttatttatttatttnttatttttttttttttgaaaacatgcataattcacttgaagagtgctaccatcaatctcatattacaatttcttaatcgtatcaattttgtcttattttgatttttccttcagagagctataagatacgtgacgagtataatgaaaaagttgagttctctcttgatcttcagggacaaagacaaaccacccgatagaaatgcatacattttgctctccctctttatcatggttccctttataatattattcagtttaactacgtattaaactcttattttttgagcttgtttgaccactttggtagattgtgctactccctaagacagaaataacatatttatgtatattagccatttcgaatcaaaatataaacaaatattttcttgaatgggatctcagtatgaacacattgttttacaataataattgtagtaaattgtcttgagcttgattcaaccatgacgataggtaacaataacattaacgtccatttctaggaaaaacatgtctataatctgaaatatagtctaatctaatctacatggttttacaatcagtcaaaaacaacctaaacattccaatttccaacatcaaataaagcaaagacgccgctaaaaagcattggttgttgccatttaacaaagatacaagaagttgcagttaaagccaacagcttttgccatcaaacaacatacatacacagaatgatccttccggtctgtacagggtaaattatcgatctgtcacagttttgaggttaggcattagaaagcgagaacctcgtcggagtgaactagaaaacctagagcaacatggttatggcataattcagacaaagtccttgccattaacccttggttctaaacataagtaatgtaaaaaaaaaaaaaaacaacatatcagctaccatgtcaatgcaaccccaaaaagtctaagttaaaacaaaagagaaaaagaaatttctttcctaatcttttctaccatcagaagagaccatatggcaaagatcccttgtccctgcaaaagtaattaaatagaactggaattaaaaaacaaaattattgggaatcacagaatatttacttgcataatagatagagtatgcaagtccaatgaaactcagaaaacaaatcaagtgaatccacccagtatattttgagaaattttgtatatcatttacagaaagggttttcaatcaattcctacatggcactaggtcacaaacaatcaaacgaaaaaattgttataaaattggtaaagatattatggaattcatgctgacctgtcaactgttatctgacatcatgaacgttgaaatagatggtgtcgatctagcatctctgaaataccgagtgctgaaatgctttcacatccaagaagatcacgaagctttgagtcacataatatcgccatggaatttaaaggatcctgtcaagtaaatcaaagacacaatgttcttatctttctacacatttatgatgcataacaataaactccaataactgtacacaaggagagattttgggaatatgaactttactagagaaaatgaaagcaattatcagcagaaaaaaacaatatagaagagctcgaacaaatccacaaaataaacatatcatgtgcttatgatcagagcctggagcctctcaagcagcgtacctccaactggttagtctttatgtactcccaaacacgatttaaagcgtcagtacgaagcatctccctgcctccagtgtccaaaaacttagcaagtgcttcagaaattattacacatgccgaaccagagtcagtactttcagctttaggttcaacctctacctttgctcttttagattggctggacgcttctgcaaaccataaatggattaaaataattcttacatcaacagacaattccactacaaaaaaaaaaaacactggttttcacgttactccacattacatactggtaggctccaaggcaataatgtgtttagctagcagcttattcattttgaacatatcagtgcagtctgtctcaaacaccactcgcaatgcgtcgtcacaaattattttcctcttgttacttggatcctggagattgttcttccttatgtatgcccaaagctgtttcacaatctgaaacaagcaaaacataattaatgaagaagagaagaaaaccaaaaaaaggacacgaaacactggactaagattagatatacaaaactaaaacattgtctgaaaaccaattttctatcaataacctcagtcctcggcatttttggttcaccaacaacagcttgaagctcaggtgagacaccacaaactttgttcagaccccctggcccacctcttcttttggcaccaacaggaggactgtagaacaaaatcataatgcacaatgacaaaattcatcactcataaatcaaagttgatctatttattttatagaagtttaccgtttatttattaattataagaaactcaggtaaagatgttatcatgtgttatacataaaatagctaaagacataggcatgcaaatacaagaatcaacttgaaatgataccggtaatgattttttcctcataaaaaggtcagcacgatgccctctctacatgaccaatgatgaaaaaaaaattaccctaacaggtaaaacaaagaacagcatgataaaaatttacagcaatttgagagtaacaatgtcaattttattgaaattttgaaagggagataaccaagaaaaagaaaaaataaacacaacaataaacaccctgggtcaccctacatgctaaagtacaaaagaacgacgacaagaaaagatggtgacatctactgagtatattattattcaatgaaatattttgaaaaaaaatatacccaaaacatatttttaagaataaaattgaaacatacgccatcagaaataaagttgaaaaagataatctataaaatattttacaatttatacttagcaggttcagcccaataaagtttgtttcttttcagaagagtagctttcaagcgttgaaaagataagtaatacaaatcacaaactatgattatttaaaatttcagctagcaaatggtcgtttttcaggtaagagggcatttctggtttaaattctgattttgaaaaacaaattcgtcaaagtcagcttgactttctcatccacagcacaaacaaaacgttaacagcagtgacatatatatatatatatatattctgaaaatgtgagaactttggcaaaatggtcaattttttaacagtgaagatcaaacaagaaaatccttagcaaaaaaaaataagctaacaaatttatgctcaacaagcaaaaatttttttaaaaaaatggattcaaaaacatatcttgtttaaaaaaataattaatgtgaggacaagactttactaggggaaaataaattgttgatacaagcattagaacaaacctaaaaaaaaaaaatacttgaattaaaaaagtgaaataaatataagggtttgggaaaaaaaaacctttcttcggtcttaatctcggtcttaagaggagggggagggtgagggtgagggtgagggtggtgcgtgtgagtttgcacttgctgctgatggtattgcggatgtggttgcggcgccgagggcgtctgagcctgagcctgagcctgagcctgagcctgagcctgagcctggaaagtgtgagcctcggttggtcggtggtggtaagggtgaagggcaaaatggggagggaattgttgggggtggagaggagcggtgaattgttgttgggattgtgggtgagaatggagggcaaaatggtcctttggtagctggttatattgtcgtgggggctgaggatgggaccggaggaggaggctgatctgctcccggatgaacaaagccttgtgggagaggtctaaccctagcttcgcttcaagctgttcaacgacgccgtttacggaggtgaatgagtttggttcacggagcaaagtttcaacccctttcgctaattcttggtcggacaccatggtttttcaattacatatagtaacagaaaaaacgaaccaaacggtctatctctcttctttcttctctcactctcctgctctctctctctctctctctctctcttcctctatctctgtctctctcctcccctctctctctctctctttataattctgaaatgacgaaaatgtcccttttgtcacctaggcaatactacccttgatttttatccacactgtttacagtccaaggtaaaattgtaattccatacacgaccttcttccttcttcctcactatctgccgccgtacaatgatcgaaataaccgaaatacccttgaaagcatacagtatggagaaacttattcgggggtaaatatgtaactaagaaaaaaaagagttgcagagaaggtatctacttttttttaatattaaaaataaaaaataaaaaaagataaccgtatgaaaagaaaaataaaatatgctaaagataaagcggtgagctaaattaaattaaaaactgtcttgtcccttaccaaaaaggctacaagataacgatggaatatcacctagcgaattaccatatttaaccccgatctcccaagaattttcagtaatattcatttctagttccagaggactgggggtgattttgtcaatgacttgttttttttttttttgactaagaatcgatttgatatgggattggcgggtttggtcaaccagcgtagaaagttgttctggaaacagctgtataaaaagtatattgatccaacggctgagaaagttgcttgatctggattaattaagaaccgctacactcattttcctttcacggttttgatgtgattattatggcttcttcttcttttttaatactaaatctaaacgtataaaatcaatctgtaacaacaaagatggtggtcgagaaaaaaattattttcttactttagttgacgggtgatttttaggtcagaatatctattttattaatttgaaaatcaatcaaattaaatgatacacgaaatttgaatttgaacatgatattttggttatttaataagaaaatcaaatggctttatttgatgattccattgaaatttccagccttaacaaagtattaaaaatgttgttatttattatatttaataactttttttgtgaatttttttctttggaaaaaagaataattttttgggtaaaataattatttaaaaaataaataaataaattggttaaaactgccaagaaccattgaaatcaaacgatcattataagcatgataatttaaagtaaattaggctcgaaaatcatcaaaagatagtcaatttaactaaagaatgtgctagagcattacaagaaaaaaatagaaatactaaatagcgaacttacagacatgaaaaatatcattaataacaatatcatactcattgcaaatttgtatcttagtagaaattgaattcaccaagtacaaacaatcagaaaacatattaatgtgaaaataacccaaccgcctacatagaagaagaccttgtagcaaggtttaagcctttgccacatgcatttcaagcatgccaacgactagagtagtaacgcaacaaagcacatcaccattagaatgtaacacaactgccccatgccaaattacctccttttcgagcaaatactagcatccataaacaaattaaactctgccaaattcaactcaaaatcaacccctgttatatgagaagaagttacatgttgagaactcacaagattcgacttatcaaagtggtgttaggcatcttgaaattgccataggcagctatgagctcaactaataaccatatcatcataaagcggcttattatcatgcacaaaagtattacagcgatactaaattctccaataaagaacaagaaatttctcaacttttacggtatccataatcccaatcaatatttcataaaaattagacgtcattttcaaactatccaaccccctcaactcccacccataatgaatagatttaaggaaaacacataatcacaattcacaaggcatggagagtttatttattgttctgtaaacatataggacacaccttagaatcgttcactccatatctagtcagattagcataagtttggataaaattcaggctatctttctatacaaaattttttatctttcgaggaagagagagcctccaaagaaactttaaccattttgaagaccctaccgaggataatttctgaccccacccaagccaagcaactgagtttcgataacaactttttactgtaaactagccattgttaacttagaagaattccaaattaatcatcatttctattgaaactgagaacgaaatatacaaaacagatctccatcatcaaaaaaatctcaaataagaggaatattccaccctcgtatcaagcataagatcacacaccctatccacgccaactttgccactccctaagcgaataagtttggcccacgtggtctttagggatccaagagttctcccttatgtgaattgattccccactccccaccgaccaacgacactcttcttttcaaagatcacaccctcaaaagatacttttccaaaaaaattgaagctcatttagtctccattacatcaataatggaactattagaaaaatagtactctttcaaaactcaagtcgctaaagaatcaacaaaattatacaaacgagcaacttgtttagccaataaaaattgaataaaaatatacattgaaactcataccaccatcaattttgtgccaacacagatggccccaagtgtaccaatgtaatttacatttatcagtatcgccaccccatcaaaattgagcacacatgctatgaatttcattcacaatatccatcggagttgtaaaaggctcattgcatacacagagatagtctggataacatatttcaaccagacctctctacaaccagaagaaaaaagttttggtttccacccaaataacttattccaaatattgtctttgatggagtggaataaatcacttttactctgatccgcaaagaaagagagacccaaatatttatcatgacacagaattaagagagccctaagaacacggtctaatgactcataaagatcatcaagtatacgtggtaaaaaacacaccacaaactcacaaagattcacaatttgacctgaggtagatttatactactaaagaatgagcttcaaaagggaacaactctctcattagcttctaagaaaaagaaattatcatcaacgaataaagtatgagaaattgtagggccatgccttccacaagtctttttttttttttt

SEQ ID NO: 15269 - DNA, 7695 bp, Cannabis sativa
  modified_base (26)..(38): a, c, t, g, unknown or other
  modified_base (7491)..(7491): a, c, t, g, unknown or other
tacaatttaatataatacaatacaannnnnnnnnnnnnaatacggcgttccaaacgagctcatactgttcttaatattaccttcttacatctaattcgtacgatttgtccaaatcctcaattaagtctcctctttgaccaaataataattggattcatccactaatatataaattactattttaaggcaagttggtaatgttacctacgttttatttccttatttgttacaccttcctaattattatttttacataaaatattcattgttttttggaattttattccatttgggccatgatgattatatatgaaaactctttcattaggtcaactactgctgcttcttaattatagagctgccttaatatatactgtgtacggtggtacttattattatttaaatagtactaatcaaatagtttaattaattaacattttttgtatgtatgtagtgtaatgtacgtacgaaataaagctactgcatatgccattattttgtcacattatatgatcattataatataatatatatattttaaaatagtgatagtaataattggacattgatctggagataacgccatgttagttggttttttttacaaatatatatatagttgatgaaggaattgacttggcaaccacaaattattctagagtatatattttgaaataataataatatatgataccatataaagttatacttgtattttctttctacaaattacaatattctaccatacgagattgaaaagcatttttatattctttcatgtatgtttaatagtataaaaatgttgttatatagtgatatagtattaactcttttaattaggtatacgtaatcaattattctcatcccccaatttgtcaagtttaagatcgatctcagtttagataacatatacaataaggatcttctataaatacaatattactaagaaataatttaataaatatttataattttatgaaatcaaacaaaattatttgtgataaaaaaaactatcattcaatgtcaatatataaatgccataactaaaactattaattaaaattttcacttgttatagctaaacatatttatattcataataaaacttatgattaaatatatattgggtggtggccaaaattacattaacaatttctaatcaaattgtatcgttatatcaaattgcataaggcagtttatatttgttttgaaacaatatacatgaagcaactctctagctttgaaaattcagcacaccttcactatgtgggcaaattgcataaggtagtttatgttttgaaacaagctttgtgagcttggaatgacaagtttaagactacattactaagcaagggattcaaggcattaagatttaatccttttctatttgtgcatggagcaagtgtaacactaatcatattacttgtttatgctgatgacatattcgttagtggcccaaatacagagaattttctctcaaagatattggtttccttcattaccttatcttggtgttgaagtgattcaaaacaatactgggatgtatttttctcaatccaaatacatcttaaatatgcttaccaagctcatatggaaggagctaagcctagtacaagtcctactagttcaactcatggtctgtctcttgacaatagggtcttttctcagatcaaacattatataggagtaccttaggagcctggtaatatttcacactaataagatatgatgttgccttcatagtgaataagctgagtcaatttatacatactcctaccacggtgcactgggaagcatgcaagagactgtttggatacttaaaagggacaatccatgaggggttacacatcaagccaagcctaaggctttgtcgtaaagcctattcagacgttgattgggctagtttccttgatgatcaaatgtcaaaagagtatatgccatctttattggggaaaatcttatctcttagtctgccaaaaatcaacatgttgttgcacgaattagcacaaaaagtgagttttgatctttagcaaacacttctgctaaagtaagatggctctgcttatattctctctaaactcaacgtgcctttattaccctgcaacattaataattcgggttggaaatcaaggagaaacttctcttgctaccaactccgtatttcacgcaaggaccaagcacattgaaatcgaccttcatttcgtttgagactaaataatcgctaaggagattgaagtgagacctggtattccttctcttgaccaaactgctaacattcttacaatagctttaggcaaagacagattttcttacttgatgaccaaactcaatatgtgtaccactcccttttgtttgagaggggatgataaagctagtcttcataatgttagttaggaacgtttgtaactaatttttctattacaacagttggttaattagttttcacttttatggtttaagctaactaaatactctataatctctctgtattcctctcctatagataaaggtctctacttttagtcttataatcctagtgcaaagtgtacaactaataacatgcatctttctgcaactattcctgttgcaaacacagaccaaactgccatgactactactgcaccagaccatgtctctgctgcacagatacctaccccaccaactgaatcacaactcaacactcaccctatgaatacaagagctaagtcaggtattcaaaaatctaaaatcctgatggcctcactcactccaaagtctattattgttgcattaaaagatcaaaaatggttctattccatggattatgaattcacagctttgaaaaaaaaaaaacaacacttggattttagtggatttaccagagttccaatagggtacaaataggtttacaagatcaaagagaacccaaatggcagtgttagccagtacaaagccatattagttgccaaataatttcatcaacaacctaactttgatttcaatgagacattcagtccagctgttaagcttattaccattaggattatgctaactttagcaatgacaaaaggttagctagtaagacaattagatgttaataatatattcttaaatggatatttacatgaggaaatttatatagttacaccactaagttttattgatcctcaacatccaaacaaggtttgtaaactcaataaagccttgaatggactgaagtaagcatctagggcttggtttgaaaaactctcctctgctctagtcattttggggtttcaatcagccaagtcagatcattcatagttcattcaaatcacctccacaagctgcttgtacatctaggtttatgttgtatcttaatcactagttccaacagtgatcaagtgtcattctcgttgcagctcttagctccaaatttgcactcaaagatcttggcatcttatcctttttcttgggtattcaggttcttcatactacagaaggttttatgttatctcaacaaaaattctccaagacctctagtacaaagctgagttagaaggtgcaaagccacaaagcactccaatgaatagtggtcttcaattgtcacattatgagagtgatcctattgaagatccttctgcctacaaatcttttgttggggcttttcaatatgctacaataactagaccagacatagctttcaatgtaaataaggtctgctaattcatgcagtatcgtctacaatctatattggtggctgtcaaaagtatactaaggtatctagctcgaactcttgactatggtctccatataaagaaggctccacacatgaatctataagcatattgtgatgcggattgggctagctattgaccctgatgacagacggtcaacaattggctattgcattttctggagtgaaaatcttattggttggcaatccaagaagcaaaataccatatctcgttcatcaacagaagtaaaattttgaagcctttctgtggtatctgaagcatgttggatcaagtctttatttactgagttccatctgcctcttgcctctcctcctctcatatggtgtgacaatctcaatactataatgcttgttgctaatcttgtgcttcatgctcgcacaaaccacatagaaatttatctctattttgttcgagacaaaaagtgattcaaaggaaaatttatacaacatgttcctgccaaatcatcaactaagttgattccctcactaagcctatctcaaattccaagttcccctttatgagagacaaacttggtgtagtttgtttaaccacactaagtttgagggggctttgttaaagataaagaaccagttcagctggcataattagtcattaggcttgctattcacttacttattctctgttaaagtagttagtcaggttgtcatttttttgattatctctattctgtattttgtatattgatactctttagctcattctgcttaatgatatacagaaatatttctttcactcttgttctttctagctcaaacaataggtagtgcttatattgataagatcatacattcgatgtgaagagaattattatttttttttttaattttatgaaatgagattctcgttaaaaaaaagcaaacaaccaaaaaatcagtgtaagactcacaaaaagttcaagagacccgaccaccaaaccataacataatcgaagataaaacaacttttgcaatatcatgggctataatattgtcagactaaagtttgttgagtttacatattcgtcattttgatttttttttttagaaatatatatatacacataggaatatatatttataataattaagtaatacatgatcttttcatttcattttgagggttagtcaaatcattaaataagaaaacgataatgatgatcgtatgtattgattaattattgaagggaaaaggacatccatgttctacctagcaatatgtactaagatgtcaacttgtgggctcattaattattagcttatattaaacagattaattaatagggatttcacatggaattttttgataggtgtcaatcttccacgatcttatttctcatatcccccaacactatatttattcaaaaaaaaaaaaaaaaggaagcagcaaatgtaataaataacattaaatgtgcatcaagatacagataccaatgcaaagcttagagatttaatggttttcatcggatgccttgcaattttttagtgtcactcacaactatacacatttccaagttgcttaatttcctgcaaattgcaaaagaaaacttcatattttataattatattatatttgacaaatgtaactcaaacacttcaaaattcagtcttacttaagttattcaaatcaattaagttatgcatgcagggtgaaaagttaacactgtttaattagagcttttagattagagcattttctaactttggaaaaaaaaaaattacttttgttataagagattatggtgcaaaacactaaattaaacttttataacacttatttagcaacataataaattacaatataatatatatttatatatatagataatacttcatattaaaaacaatcttatatagaattatttttttaatttatgtcattgttttattttatattcatatttaatattattttcttatttactttttttaaaataattatttatcaaaaacattatcataatcatcaaaaagatcatatccactaaaagcacttagttttagttacatttttagattctttgaggtgcaattcttaaaaatatttagagagaaagagagagaagagagaagtaactagaaaaatgatagtgtttttaacaaataattatatataaaaattaaatatgaatataaaatgtagtaatgacatataataaaaaaaataactaataaaatcatttttaatacctctaatgaaacattatcttatactaggttgatgttacgtacaatgcacgtataattagttttctttttaattagatttaattaagtgatgttaagtgcaatacatgcatgtttaattttttttaattaggtaatgtatttttattatttaatttttaaaatagaatttgagattttgatctttgaaattttttttagctattgcggctatattagtgtgctctttagatgtgattatatatatatgtattttatatgtataataaaagaataaattttattgttatacttattttatactattttatatacttctttatacataaggattttattagaaaatattttacaaaatttaagtttgattagagaattaataattactttcaaaatacattttatatattatgtccaaacatgtattttaaaaaaataatgacagtgatggatacatttttaatttttaggagagtgtgattataataaagtgtacagattattagaagtatatatatcattaatcatttttaaaacaaaaaattgtcgtgaaattaaggtttcaatatatattttatatataaatgtaatttttatttttaaatatacatataataaaattaattttttttataaaatacctatatagtttttatttgtagatatatataataatattataaaattaataaagaatattctgttaagtaattgagatattgtgttaaagttaatataaaaaaaagttaaaaaataacgttgaaccaataattctgttacatagtcactttttatatagaatatatatatatatagttagatacacattagcaccataataaattactatattttatatatatatatatacgaaatcatgatagatgcacacttatttagtaatggaacattgttatggggcactaaagtaccaactactattatgaggtgacgttctataattggttagtaattttttataatttttttaagataaaacatgtgaaactcaatattaaattacaccaaatattactacttggcgtgtacccaacactttaaatcataattggtgcatgcaaattaatattagattttacagtaaatttaattttaatttaaaataaattatattttattatcctatcaaatattttaaaatgtgtcttactaattttgtggcagttagtagtcccgtaattcgtaagagaaaatactgggtaagttgtgcaatcccacagtgctcgggaaaggtcaagtgtgatgattctaaaactgtgtaggtatgagactacacaattgaagagggcttaaatggattgattgatactacctatatcaataaggtgcatcttgcttttcgatagcccatcacaaaagaactccacagttaagcgtgcttgacttgggataatttcagatgggtaacatcttggaaagttttcccaagaagtatgcgagtgaggacaaagcaaactagaaatacttgtgttagtttctagggtcagtcgttattccacgaagcagccagagtgacatactcgtgtataagagtcatcattccatgagtgtaagggtccaatggaggcttnaagcggggacgttacaaatggtataagagccttgactcatccagaagtgtggtcgacgaggacgtcggaccccgaaagggggggtgattgtgacagtcaatagtctcgtgatctgtaaggaaaaatactaggtaagctgtgcaatctaacatcgcctagcactacaacattggacactaatagcggcggacccctccgccgcta

SEQ ID NO: 15270 - DNA, 2534 bp, Cannabis sativa
attgacattttttttatcttttaaatgaaaaaagaaagaatgaaagaagaacatgaactaaagatgatatttgcaaaattaataaatgagcactcttagttactttatataattctgtgcaatatatatttttaaaaaattataataaatatttatgttggccccctctaatatgaaattaataaaactttaggatatttatatttttctatacattaacatattttcttactatgtaaactacaatatgtcattaatctataatcaaatcaaataacttaaaatgtaagaaagaatctttctctttttttaaccaaacataacaataattaagatgtaatcaagaattttgtattagagcgtaacatttgtaacagaaattcattctgctcggccgaccaaaattcgaaaaatccaaaaagattgagttttaaaaagtattggatggtttcgcgtgaaattctggtacaattcgggtcgggttcgtgtttaagtagaatttttaaaatccgagttgtacccgtattcgccagaaacttgagtgcattaagtaattaaaaaaatatatattttttgttatttttgtttaaattgggtaatgcttgtgtatctaatttggtaatgagtatttgggctcgcttatttatttatttaatttttttaaaaaaatctaatacaatctcgaacccatccgaccaaaaaaaaaatgggcaatttcggtatataatgttccgaaacctaaaatttgcctgatgggcccacactacgagataggtcatctttaatcactttcagagtttattatttcaaagaaatagtaacaaattggtcatctccgggagggcctacccaaatgacggatggttcttatcccttcctcttcataagtgaatttgacccaaagaggatatagttggacaagcaaagtgtagcagactgctcgaggttaagtcactgtatacacatttgatgcggcatgggaaagaacatccaacacattacactaaacagacgtgctcaagggtttaaactcataattttctgatttcacgatgccccatacactacataatgagttatcaaatcataaacaagagggcctcaccaaacacctatagtcattctaaacacttcataaaaagtaggcaatcatgccctatgataaaatttagaaaattgtgaaaagtatgattcatacaatcacgataacgatgaccttttaccatcattatgaacctataaatatcacaatgatgtatagaagaagggacttttagaaaattctctataaatataaatactcattaataacagtaactcgtggactaaagcttattaatgctcaaactatgtaaaatttatcttctttaatgctcattaattacttcaaacatctctaattgatagttgtcgaattttttggtcaacaagttgggatatgatttattaaatttgattaatctctcaaatcttatatatggtgcaagttttattgactagtatatatttgcattagaagacttagctctagtagttggacataacaaattagtttcgatacaattgtgacattctgagtgaaaaatatctttaaagataagttttatcttgttaaaataataattgtgtcttatcattaatttaaaaatttacaacattattgttctatagtggctaatcaatttttctatatttatttattttgtaggtagttttagtacaattaattgtttatactggatacctcttgaaagtgatcttaagttattttttctaaattttggagagataaattagtcttatataagtcatgttatttgtagcgattcatattctgactttgtatatttttggctagacaattagcttgttgattaaaaattcttttacatattgacgattatcaaaatatgattcagatcacttttatattttgtgtacacctaacattactcatataaaaagtttctaataggccacaaaaaaaagtttattataaacaaaaatcactcgcctaatttataatttttttatttactataatattattaattaactttgataaaactttacattctttatttactatattgctattatttaaaaaataaaaattatattaaacaataatttgttcttatatattctcactaaaatattaaatgatcatcaataatcatgattttttttacttaatttatattttgtgcattggaatacaatcataaatagcaaactataaatatgacaaaaatttatttttttaaaaaaaaatttagcataaattttaaattttgcattgaagatagtctcacgaataatttgagtgacttattattttgttggtgtgtgatttcaaagaaatagacaacaaaatctcaaaatatattatagcattatgcatgcgcaaatatttacataatattttctttggccaaatacattcaaatgtcaaattaaacaaccacttgtgattgtgaacacatcaactatagcaaatttgaaaattcaccacataaatgtatatatatatt

SEQ ID NO: 15271 - DNA, 7070 bp, Cannabis sativa
aaaatttaataaaataaatactttaaaatattgtgaaaagttttttcttataatttagttttaatattatttttaacaagttgaaaaattaggagacataataaggcataactcataatttggaaatttaaaatcttaaatatttatatgtgaatattgatctaaacttttttgtgtgaagtgtgaaaaaagaaaaaaaaaacaaaaagaaaccactttaatacatccaaaggcctaataccaaaaatatgaatactctattatattttctctaacttaccttaattgtatttttattttattttcctagaaatacgtgtataattgtactacaatactacaatactattattaatttattattatttgcattaatagactcgtcacaattattgttacctcttagtcttacctcctttgttttatggcttatttcctttcctttcttttttttttttttttcttaatgtaatttaatttacgttaatgttaattgtaattttatttttggtgtgcgttcttgagttgagattctttactcccaaaagcgcttttgaagatccaacaatgccacgcacaccttgtcagctttcataccagaattagggctttttccttttatcttttttcctttctctcagcttttcacccctaaaattctctctaatttactcctaagccattctctactctccaccatttaccaatttcagagcttttggattttgatttggggtttgaagtgtctacttcggtcggatcagagctcggattggggaagattcagggtttgttgtggagttagccatagcagtttggtttgttgactttttttatttttaattttgagttggatgctaatttggaaaggctggaaattgaaggagtttcttttttagatttgtaagtttttgcatggtgaggagggttgattgggagctgatgagattgaagtgatttttctttcaaggttgttgatttgggataaagaggtttgattgaaagaattttgaggctctttttttttgggggggtcggttttttttttttttttgctggccctgcatgttgaagctttaaggggtcctctgctgtgtctgtggaggatccctgttaggaaaagaagccccttgtgtttgaaaagatgggctttgaagtgtgattatggagaagatatcggaaaaactttgttggattagttatttgtgattggaatcgggtttttgtggtggataatcaagtgggtggtttgaattttgcattttgagtacataatttggtgggaaatgtttggttctggtccagatacaggacatgagagtggtggtggtagagttaccggatcggttttaataccgactctgttcatgtggcgttatggtggaagaaatgttctccttagtggttctttcacgaggttagaggctagaattttgaaattatgaatcgaatggctttaattggattttgttggagaaaaattatggctttccgactaaagttcaatgcttgttatcaatttaatttggatatgtaatatagatgtagatcgattcttttatgtacaggtgggcagaacacatctctatgtctccggtcgaaggaagttcaactctctttcaagttgtttgtaatttgactccgggattccatcaggttaaggaatgcttatgcttgaaactgttgaactcaaccctgatatgaaaaacttggcttttatgaatgaattgagttgagatgagatatatgcttacatattcagacatagaaatcttaagagatagccttgatcttatttcctgatgcatacatattttgtgtataatgcagtataaatttaatgtcgatggagagtggcggcacgatgagaatgagaattttataaatgggaattatgggatcgtgaacactatcttggtatctacagagtcaaacatggctctgacaggtgttccctctgaaccacctggtagtatggatgtagataatgatttctctgtgcctatggtaaggatatttgctagtttaatttggtctacctcttttgaagtttaacttctaatatttgggattgtagcacaaacctaaattatgttttcgaaacacccagcaattcaataaaaggaaccaaggaagtataattgttcagttgctagataacacaaaggctgtcattttagtattctaaatttacaataactgcactctttctatggaaaaatgaaaggatccatactggagttttatgtatcctttcccgcattcttccagttgatgaggttctgcatagacagatttcctggcagtggttttgggattgcttctcctttattgtatttaatagttctcttttctgttttagctggttgacttttttttttttgttttttggggtaatgccttactttaggaattgctctctaatctccgagattttgtgaaacaaagttgtgaagatgcatctttatcttggtgtctttcacatttttatttatttttaaaagaataagagtttttgtagaattaaggcataagttttgagagatctctttaaatgtttcgaagtagatcatttctttttatcatttttctgattttagtttgctatgaaaatgtgctctctgtacactcttcattgttttaagataaaaagggcacagtcctctatggaacatattccctataatatgattgttgacagttaggtggaatgagcgtgaacctttagttttaattcagttcattgggttcaaattttggaacggctatatggtactttagaagtgtttcactttattagtatgttcattctatgtagagagttgctacttgattttattactttttaatgttatcttgctttacaagttaggtcatcttgtcaggtggtcttttgcaggaagtcataccaagtttatcaaaggctgatgtagaggtctctcggaaccgtatatctatgttcttgtctgcaaatactgcttacaacttgcttcctgagtcgggcaaggtttgaatgcttaatccacttcttcaatatattttgtatattcattggtttgtgtttagcactatggtgacactcataattgcttttcccttgagtgcttaatcctattccaaaggctatgtctgtgttaaatgttctgcactttgtaacttatttgcccttgagtgattctcatttttggtatattctgcatattcattgtttcgggttttgcagtttaatatgctgaagctcataattgctcaaactttgtaggttgttgcgttggatattaatctaccagtaaagcaggcattccacattctgtatgagcaggtagatatattttatgcactaggcaggggaaagggggaggagttctttcattttttattagtcctttgattaagttttatgagtgtgtatttcttttttatatttactttctcactaactagcgactattttcttagttgtttgttttgctattacatgttattttcagggcgttcctgtggctcctctctgggatttctccaggggacagtttgttgctatgcttactgcattggacttcatcctcattttgagagaggtttgttaagaaactgctttgttattctctataagtgctattttatgcactcatgatttgggggtaaaaccttttacatgtcaaaattaagaaagcatgaagtgtagatgtaatacaatggttggcaaaagatagatactttttttttatctatctattgcctaagactaagttttatttgtcagtcacaaaatatgtgtgatctcagtcttgagtaatgcttcaagaaagagagtctgcgtcctagttattaggttggtttgttattatggttttcaagtcatgatattacttgttatttgcttggtaaattgccagttcaaacgatttttaatattaatgcttgtgaaaatccttgttattgtttatgttttcacacgttaaatgcttccttcttaccatcaaaatttcatagttagtgtgatgatcatggacttacttggatccgtatgtaatgtattacaaatctacatgctaagacaaaagtgccatatcgttaacggccagatttgcttttagacatctggctttcacagaagtttgtgtctatatattgttgctttctcgcaaggaagtttatgggagcacacacatacacactctcgatttaacaagtatacatgatcatttcttaaagttgcggagacatggatcgaatgtggctgaggaagagcttgaaacccatactatagcagaatggaaagaaagaaaagcaaaactctccatgccaattcaaattgatggagaatcttgtgctcgggatcttgtccaagtaagtagaaacctacacttgtagcagactcttgagcttaagggatcttataatataatgtttggaaggttttaagtagttggagctaacttgacttgtctgtgcctgtcttttgtagtattaggtttgctttcctttgattccatgtactttaatgtttggctatgctgtgattgattgcaataattgattttcccagttcaattagctagtgccttgttgtatctctacttgaaaaccactccaactttcaggctgggccatatgactctctcaaagaagttgcttcgaaaattttgaattataatgtggctacagttcccattgtccaaccttcttcacaagacggttcatttccccaactgctacatcttgcttccttgtctggaatactgaaatgtaagcttattacttgtgttagtttgaagtgcgtaacataattaatcaatgctaattcctgggagtatgtcaatatatatctgtactcaggtatatgtaggcattttagacattcttccagctctttgcccattcttcaacagccaatttgtgctattcctgtgggcacctgggttccaaaaattggagatccaaatggacgacctcttgcaatgttgagacccactgcctctctgagtgatgccctatctttactggttcaaggtgattttctttttcttctatctatctgctgcgggttttgaattctgatcagattttcctttatcagccaaccatcatattttgcctgcaactgtgcttgtactatgtttcatgattgtgaaatttgtatcagcctcttaatgatcataatgtaactgtatgattttgagaaaaaagatgcatttcctttgtcaggttacaggaacatgtttggtcgtttactcacatcttactcttaactgtcttatattttgattttctcttgcagccgaagtcagttcagtacccatagttgatgaaaatgattcattgctcgatatttattcacggaggtactattgttttttctcaaactctgttgtgcccatcgtccctcttgggtgttttttatgcattcagttgtagctaacatatttgtgtaccacatatccttcacagtgatatcactgctttggcaaaagatagaacttatgcacagtttagccttgatgaaatgagtgtccagcaggtaactgttaaattattgctttcatgtgtgcttctctattcatttttctgctttgatttgtctgtctgataaaggtaataaacatccaagcctgatagtagtacaagccctgtaaaagtcctttaatggagcgaacatgttcaactaactgttggttgtacaaatctgcatttaacgaaagcttacttaccataaaatggctattgaattgacaaaaccacaacaatactttcaggtttgaacaatatacgagaaaagttagtcagctgaacgcattttgtgtttaccattgcaggcattgcaactgggacaagatgtaaattctcctcgtggcttcttcagtggactgagatgtcagatgtgtttgcggtctgatcccctgcataaagtaatggagcgactggcgaaccctggtaaactacaaataaccatctgtaacttatctttcgcattagcttatttgacggatatggtctttactagcgtctttttcttcttcttgtaggtgttagaagacttgtgattgtagaggcggggagcaagcgcgtggaaggaatcatttcattgagtgatgtgttcaggttcttgctaggggtaaaagcttaaaatatgtagatcaaattttctctgaggctttttatggtagtaagcattggacaaattgatcagcttcgttggcaaaattatttcaagttattcacttttgcatttcgaatgcctcgtttgatcatcccactactctgtattggacggtctttgtttctaaaagcatacacctttttagaatagaaatttacctccaaacaaaaaaaattgtaaattgtgaagactggtttttattttatttttgtttaatgaccaaattaatatcaaaatcatcgtggtgcagctaagattgctactttttactattgaacacgctaacaaaataagatatcaaaggaaaatgagtaaaaacaagtggcttcgtgatcaatttgtagtgactgataattgctttgcatcacattttgttttctcaagaaaaaaaactggattaaaactcggaaaaaagagtggtgatcacaggggatcgtttcccataaagttaaaaataccataaacttgactgttataagtctcactttctttctgttgttttacttaattttgtattgacaagaacctctaaattcagatgctatgttttacttcttttttatccgtacattgatttttctctgaaggtggtagaatttttcaaacaatttaataaatttaaaatatctatttatttcagttaattgtcaacatggacagtttatatgcactcttatacatgcgacatatttatattggtacaagtcatttagttatttaaatgtattaaaaaaaattatggtaaaatttaaaatctacaaataaaaactaaaacttaataatagtaactaaaaaactctaaaaacatagccgaagaaaaaagaaatcataaagcccatctctttgactcactcacacatgtggaaagataatcagcaccactgatgtataaaagtagatgaaatgt

SEQ ID NO: 15272 - DNA, 10172 bp, Cannabis sativa
aaaattagactaaaaattttttctggatgtcgaaacaagttaagggtgcactagtacatctcttttaagggggtgcattgtagaatcacccaatataatttataaaaaaaaaaagttaaggaggaaagtggctttatggcaaaacggtaatatttggcgaaatctaagggtaaaggttgattggtccaaaagatagccggctattctgcacttatgtgataagcacacgtaattatcactacaacgtatcatgatattctgaacaacttatcactcttccttttatctgtcgcctcttcctataaaaatcaccatttctgcaagtctttgatgtccccttctctcatatatataaatatacatataataaatctgtaaattagagactaatttgaagagagagaaagagagaggagggtttactaagtttctagagagagaaaggaagctcgtctttagctctctctctctatctctttccctttctttcccccctttgtgcccttcgtctctgtatttttgcttgcttcatctgatttagttttcaaggtaagagactttctttttctctgggttttattttttctgtattttttttttttttgcatcttcgatttcttatggggtctaaagttgctttattttatggtcttttattactattattttttaaaaattattatttatttttggagagaaagtaaagggggaaaaaataattatttagggtgaattacttgttcacatgtcggtttgcgatcactatcatgaaaaatggagatttagtttaattgatctagtttctggatgtatgagtttttgaatttttgagctatttttggaagacccttttttaaaattttggtcttagctttttcccctttttgagtttattgtttttcgtttgcagatctagtcatatttttggtaatattcttgggttattaatcgaagacggggcggtcaagatgtcgtcgcttagtagggaacttgtgttcctgatcttacagtttctcgacgaagaaaagttcaaagagactgttcacaagtaaatctactgctaattatttatttaatttttagttccctttaatagaaaatttgttagtggtattttcttctctgtttttgcttcttatgtactttatgcctcttaattgtttcttttttttttttgtttattatttatattttcataaataggctagaacaggaatctgggtttttctttaatatgaagtattttgaggatgaggttcacagtggcaattgggatgaggttgaaaagtacttatctgggttcacaaaagtagatgataatcggtattccatgaaaatattttttgagataagaaagcagaagtaccttgaagccttggataagtaagctcctaatctttcgtgttcaagttcattttcctaattgtagagacaatgttatgaaatttaatgttgaaaggcgaaaaacgcagatggtttgatttcatttatgattgcaacttttgaattccttttataggcatgatcggtctaaggccgtggatatattagtgaaggatttgaaggtctttgctacatttaatgaagaactattcaaggaaatcactcagcttttgacactagagaattttaggtaagaaaataatgttcgctacttacggttatattttttgtatgagagaattgtagctaacttattgtaaaaaatctcacgtgaagagagaatgaacaactgtcaaagtatggtgatacaaagtcagccagggcaatcatgttggttgagctcaagaagttgatagaagcaaatcctttgtttcgtgacaaattgcagttcccacagcttaaaaattctaggttgaggactctcattaatcaaaggtaagtttttctcaatttttatatgctcattattttttaaatgcttaacatatagctctgtaccttgtacattgatattcatgataagtgaattaaaatgtgagtactttttatcaacaaaatgtaagtgtacttgacatttaccttatggaaactatgttacagcttaaattggcagcaccaactttgtaaaaaccctagaccaaatccagatataaaaactctttttgtggatcactcatgtggacaaccaaacggtgcgcgggctccatcacctgcaaataatcctcttcttggatcattgccaaaagctggaggctttccacctctaggtgcacatggggtgagttatttagctcaattggtgaaatttatctattttgttgttagaaaattttccttaatgggcttcatttcttcagccatttcaaccagcaccggctgcagttccaacacctctagcaggttggatgtccaatcctaccgtaactcatcctgctgtttctgggggagctattaatcttggtgctccatcaattccaggtaaacctcattttgttttgctatgcttcctgagtttggcatttgtgaatctgatgggacatttagatcatggttcttatatgagtgtggttttattgcttcatagctgcattgaagcatccaaggactcctccaactaatccttctgtcgactatccatctggggattctgatcatgtctcaaaaagaactaggccaatgggaatttctgatgaggtgatgcaactgtagtcaaagctgtgaactttcaaaacaaagagtagtattggctatacttttcctaactcttgtataatttatgcaggtgaatctacctgttaatgtgctgacaacatttccgggacatggtcatagtcaggcttttaatgctcctgatgacttgcccaaaactgttacaaggactttaaatcagggttcatctcctatgagcatggactttcaccctgttcagcagactctacttcttggttggtctttcaatttagcacttaaccctccatttcatattacttaataatttttacatgatcgttggtctttttcagtctgcaccatttgattgattcttcatattctactttcactttcatgcttcagttggcaccaatgtgggtgacatagggttgtgggaagttggttcaagggaacgattggttttgagaaacttcaaagtttgggatctcggtgcatgttcagtgcctctgcaggtgtgtgccgttttattttcatgttttctcttttttctttatcatattcctcttggtgcataactctgtccatttggaaattcaggctgccttagtgaaggatcctggtgtttcagtgaatcgggttatatggagccctgatggtgctttatttggtaagcttactgtaattgtcaatgtaatgtagttaattatttctagtggtgaaatgaatctttattctaaacgctgttcctgatctttcaatttcaggggttgcatattcaaggcacattattcaattatattcttatcaaggaggtgatgatgttcgtcaacacctggaggtaaacattacttagtacctactagctttaagttttcaaatattgctgttatattattggtgagtatccatattgacatgattgaatgcctaaaatttagattgatgctcatgttggaggagtaaatgatcttgctttctcgcaccccaataagcaactctgtgttatcacctgtggtgacgacaagacgatcaaggtttgctactcatattaattgtgttaatcatctatgtggaatgcattttcttctctcctgattgtctttttgaatttcaggtgtgggatgctgctactggtgcaaaacaatacacttttgaaggtcacgaggcacctgtttattctgtgtgcccccattataaggaaaatattcaggtgttatttgcatgctatttgtttcgtttgcttattatttcatttactttttttgttagttatgatcatatcctagtttttcctcgatcttatgctctttttgtgctgtatactgcagtttatcttttcaacagccctggacggaaagataaaagcatggttgtatgacaatcttggatctcgagttgactatgacgctcctggccgttggtgcacgaccatggcatatagtgcggatggtacaaggttagtagtctcatgaaatgtcttgctgtctttgactttgcaccttggttgaccgttggtttgaccaatatgattcattctccatctcatttccttgtgtcatgtaggctcttttcatgtgggacaagtaaagatggggagtcatttattgttgaatggaatgaaagtgaaggggctgtaaagaggacctatcaaggattccgcaagcgttctctgggtgttgtgcaatttgataccactaaaaatcggtttttagcagctggagatgatttctctattaaattctgggatatggacaatattcaactattgactactgttgaggctgatggaggactgccagtaagttaatttatctttagattaaactagtacattgccatttaaaataatgaatgctaattccttctttcctgactcctaggcaagcccccgtctccgctttaacaaggatggaagtctgttggctgtttctgctaatgagaatggcattaaaattttggcaaatacagacggaataaggttgctgcgcacttttgaaaatctttcttatgatgcatctagggcatctgaggctgtggcaaaggtagctttgtcagattttaattattttatgatactgatatcttatgtattgttagtaaattgcctaacatgttacgtgcatgctatatatcttctccagcctacagttagcccgatttcagctgccgccgctgctgctgctgctactagtgctggactttcagaaagaacaacctctgtagttaacattgcaggaatggtgtgtctttagatatcaaattttcacttctaatctatgtataaacatgttttgcattttgtttctcatgaaaaagtagaatttttctagttacatatttaatcgttaagtattatatatatgccagaatggggattcccggagcatgggagatgtgaaacctagaataactgaagaaaatgacaaatcaaagatttggaagctcactgaaatcactgaaccatctcagtgtcggtctttaaggctccaagaaaacatgagggtaaccaaggtatattttagtatttaaaatctgtgctgatatgatactgtcaaatacactcgcgaatcttgacatccactttcacctttgtcctgccatctgtttctgattatgttccttgttgtcacagatatcaaggttgatttatacaaattctggtaatgctgttttagcgttgggatcaaatgctattcatttactatggaaatggcagcgaagtgaccgtaatactagtggcagagtaagtagatgcagggctccttagatttaaacatagatttggcattttgaagaattccatagttaccttactgtttttgtttttattttcttttattatttcaggcgacagccaatgtatcacctcaactgtggcaaccaacaagtggtattttaatgaccaatgatgtcgctgacactaatcctgaagaggctgttccttgctttgctttgtccaagaatgattcttatgtaatgtcagcatctggtgggaagatatcccttttcaatatgatgacgtttaaggtaaagtttgaccccaatattgctcagtgtttatcttgattcgctccgacgaatattaacttcttgttggtaagtacagacaatgacaactttcatgcctccaccccctgctgcaacatttcttgctttccatcctcaagataacaatattattgctattggaatggatgattccacaattcagatctacaatgtgcgagtggatgaggtatgtcatatagcagcatcagtatgtttgtgattatctgcactgctcattttcgagcttgttacttaatcatctcatgacacaggtaaagagcaagctgaaaggccattctaaaaggattactggcttagccttttctcacgttctgaatgtgctagtttcatctggagcagatgctcaggttataattccttactagtaaaattgtttttgtaaatctaaacaaagttccaactctgaagcaattcttccatctttaccagatttgtgtgtggaactcagatggatgggaaaaacaaagaaacagatttttgcagattccgtctgggaggactccatcatctcaatcagatacccgcgtacagtttcatcaagaccagatgcatttcctagttgtgcatgagactcaacttgccatattcgaaacaacaaagttagaatgtgtaaaacaggtatctttttccacggaactgatctcttttttcgcttctagaaaagggcattatgtttgaatcttgtcgaacctcttccctaacaatattgttactccactggagctgcagtccatttatgtccgtatagaacatttatctatttttgctaaaaatcactatattttttcccttttttcccagtggatcccacgtgaatcttctgcatcaatttctcatgcaacattctcctgcgacagccagttagtatacgccagctttttagatgctacagtctgtgtgttcagtgctgccaatctcagactacgatgtcgtatcaacccttctgcatatcttcctgccaatatcaggtatttccttgctcagtggttaaaggacaaaaaaagaaaaaaaaaaaaagaatcattccatctgtttatctgagatttttgcaagttcaactgttttgactttcccttgtttcctctgcactgttgcagctctaatgtacagccactagtgattgcggcccaccctcaagaagcaaaccagtttgctttaggactatcagatggtggggttcatgtctttgaacctcttgaatctgaaggtaaatggggtgtgcctccgcccgttgagaatgggtcagcgagcaatgcttcggcaactccagttggaggtgcagcttcagatcaagctcaaagatgatcaaacggctgccagactaatacaagctcttttacatgcttgacttgctggcccattctcttataatttaggtatgcatttccttcaactctttgtttatatattttgctgcccttctgttttttttgctcttaactttgtctattcttgtaaatgtttgttgcagttggtggctgatgatatgtaatttttttgctgaaaaatgatgatatgtaatttactcaaggaacaatgtgcaaagatcttagattaaacgttttgggtagaaattcttgtaaggtaaaagaaagaagaaaaaaaacaacattagtagggagttttaacgattttctttaatgcttttttctttccttgtaactctgttgaatatcaatgttgtttttatatttcagattactttgttagaaatttctcatctttgacttttgagtcatattgtggagggaagataaagatgttgaaatttctcttggtagctgggatttctttcttcttcttcttcttcactgggggctatagttcaaaaaatactctgatacagtctcccttgtaaatatactactactgacttgtggtctcaaaagttgtttgttatgtttcattgatttttaatcatcttatgttctgcaattctttcatttcatacatacaaagctttttattcattgttttgaccacccattctgctctgccttgatgaaattgggagtaataagacaagagccacttaatgaaataccatatgctcgattggtttaagttaagagagacaaccaaataaattgatataaataaaaagattagaagtgttgttgtactacgtagcacattataccattaaataactaattttccaaatgtactaaaatataatcaccattttagtattatactagagatggtctaagatcactctttaaactatttcaagtcactgactctgagtgctcttaggttaagacctaaattgttgtgccaaaagtaaattgagtgcagtatgtaataaataaaagattttgcacgtggggtctccattttgaacctaaataataaattattgaagaagaggcacaacatgaaacggtgttctgagagaataataaaggcaagtcttcaattattgttgatattgtagagttggtcttcccacacacatagaaagtgtaaatggtctttctttggctttattacatacacaaatacaaacaaacacgtatggattactttatatataactattattattcaccaaacctttttcatttgacacgcaaactttccaccgaaataaatagtaataaatgtgttgaattttctactgtaaatcatgtgttcaatgaatctgttgagaatgaaattattaataataataataaaaagaaaaaaacaccctttataaataaaaaaacaaaagcaatgaattttaacttttcaaggaatagatacatcaatattcatatatacatatattcattcataaatcataattgcattttgcatgtaatcattttgaaccaatgttttgacacaccaatatcaccaaagttttgcttgacaaaagaaaccatgcttaggaagctttatatacacattttcttctcaaaccaagaaatgatttagaagaaaccttcacataaggcatagacattagacaactacaattaccactttgaaagtcttatttgcttccctctttttcttatatatacaaataatacaaatggttatggtgtctcttcatgctgaaaataccatcaacaccactactactcgggtcggaagctcaccagattagggaggtgattctcctgaagactcttgatatcgttcgctgacaccttgcacgactccaatgtcaatgacttcaaattcttgagtgttctcaaatgtctaagtcccgagctggtgatacgagaattcgacacatttaaagataccaatcctgtcaaacctgcattgtcatggatggatcaaaagtgaattatttgtttcttcttccgaatattttgttataggttgaatcgagtggattacctgaaatcatctccaaggttctgtctgtcaagttgcaattttgtgatagattcaatagtgtcaaggatgacaggtcttttatgttctttacaccggaatcggtcaatcctcctccgcaaatttcaagggacctcagatttttgaagtctgaaataaatcaagatcaaacatatcatatatgctgaaaagttcaacatgaacactccttcattcctcaactaaattttgcataacacactgtgtgctacctatatttatattagtccacaaagaatttcaaaatttcgacaggccagacctgacagcttgaaaattattcataatttcacctggacaattctacttcaaaggtacataatggctttgccactacatagattgacagtgtatttttaagactactcatttgactttcagaatgttgttgattgatcctactgatctaatattcaacatgtatatagctaatgaacttgtattattatgtaaagctaaaacgcaataaggttatgtaatgtacgtcgcaagtagcttgttccagagtctgtgatgcgagctccgaaaagatccagatgcgttaatccagtcaaacctgaaacatatataagaaaaagtaatgaattgcctttcgatcgagatacttaatgacttccaaatgaaagcatacaatcgtgcacgagatagattgactaatgatgtttaatttcaagtcttaatttacaggttaaagaaaagaaaattaatcaggagataagcacacaagtattatgcataggagtttagagctggtgaagtagaagcatccttacttgttagagctgctagtccggtatctgaaatttggcgaacatccaaatttagagattttagagatgtgagtcccgacaattttcttaaactagtgtcggtaattgcagtgaatgataaatttatgctctccagattaaccaaacctgtccagagtatcttggtaagaacaaaatggaatggcatgcaaattcttatacaagagaaagataaaacaaaatgttttaccagataaatggcgtagcccattgcttgcgacttcagtatcagacaactccaaacatttcagacgacgaagatctacgagtaaatcattcacaaacaaaaaagatattagagtc

SEQ ID NO: 15273 - DNA, 4812 bp, Cannabis sativa
ctctctctctctctatctctttgttttggagatcttttgtaactcttctcatataagaagatgaaatgttattttcttataagtaaaactagtgcgttattcctttttttgctgcaagagagtgaagaatatgatatgaattatcattgaacatttggaattgtggctgtctttggttatttatgtatataatattctttccttctgctcaatgctgcttgtgcagtgtctctaccttggtgatttcttacatgaattgttttttatttatttattttctttcggctcaggttttctattatttgggtgaacttaatgactcattgtcatatgcacttggagctggttccttgtttgatgtatcggaggatactgattatgttcatactcttcttggtaagtttttcttgctttgtaattcagttattaaatctgcttgctttgcttttagtggctgaaacatagttgcaattttagtttctaaattggggaaaattaaagaaaggtatagtacttcaattgaaaaataactacttccttgtgtttatttgaagatacttaaattatatttgtttatgtgaaattgggtttctttttcagctaaagctattgatgagtatgccagtctcaagtctaaggcaacagaatcaagtgatgaagcaacaaaggtggatcccaggttggaggccattgtagagagaatgctaaataagtaagtaggttcctgttttggtttcataacattcctcagctattatacttgcttacacaatttaatcaatatagatgcatcttggatggaaaatatcaacaagctatgggaattgcaattgaatgccgaagattggataaactcgaggaagcaatcacaaagagtgataatgttcatggaactctatcatattgtatcaatgtctcccatgcctttgtgaatctccgtgaatatagacaagaggtgactatatgatttttattagattattatttagggcatgtttgatgcgctgcataagaactttatattagttttcacggtccaatcatttatccggataaatgtatcaaccaaattcaataaaatgttggtagaaactttgtagtgtataaaataagacaatgcctaatttcttatacaattttcattatgttgcattgtataattttatttatcacattgtatcatgcaagttcacttttctctcacaatactttttctctccttcacatcatttactctcattcttccgaatttgatatactttgaaattgttaattttattctattttataaaaaaagtcaacatttaatacaaattatacattataattaaaacgacatcttagtgcagttttaaaccaaacataattttgtgtaagaattatataatgcaatccaatcaaatactatactattgccataaaatgtaccaaacatgaccttagtgatttattgtatacaactatcatatctcatatatatgttttaaacagcctctttctgctgttggtttattgatgtcattttttttggtattgtaacacttcaacattttgaggggatctattgcacttatgactgagctgctgttatgtgctctgcaattttgtgctaggtacttcgtctgcttgtcaaagtttatcaaaagctgccttctccagactacttgagtatttgtcaatgtctcatgttcttgggtgaacctgagggtgttgctagcatattggaaaagcttcttcgttctgagaacaaggatgatgccctccttgcttttcaaatagcctttgatctggtagagaatgagcatcaggcttttctcttaaatgtaagagaccgccttccagctccaaaagatcaacctacagagtcagcgcagccaaaatctgctgaggcggaatcttctcaaagtgaagctgctgctacagaggatgtacagatgaatgaagtaactgtacgcgaagcagatccaagtgaagtgacatattcagagaggtttacaaaaatcaagggaattttgtcgggagagacatcaattcagctgaccctacaatttttgtacagccacaacaagtgaggcagtcatattctctaaatcatgttcttttataattcattgaagtattttggttcctgatgcttacataattattggctttcgttcgtctacagatccgatcttctaattctgaagacaataaagcagtctgttgaaatgagaaatagcgtctgtcatagtgcaacaatttatgccaatgctattatgcatgctggaactactgtggacacatttctcagggagaacctggtaaataatatgttttaatttatcaactgtatcccttttttatgattagttatttgttatgacttgcttttttgttgaatcgacaggactggttaagcagagccacaaattgggccaaatttagtgctacagcaggattgggtgttattcatagaggccacttgcagcagggaagatccctaatggcaccttacttgcctcagggtggggctggaggtggtggtagtccatactcggaaggtggtgctctgtatgctctcggtctcattcatgccaaccatggtgagggtatcaaacaatttcttcgtgacagcctacgaagtactaatgttgaggtattatttttatgtttctaaatttcatgtctatttttaattgctccgtcgccacagaactctgatgagtctatttaatccacaggttattcaacatggtgcatgcttgggtcttggtttggcagctttaggaactgctgatgaggacatttacgatgatattaaaagtgtcctatatactgacagtgctgttgctggtgaagctgctggtattagtatgggtttactcatggtcggaacagcaagtgagaaagctagtgagatgcttgcttatgctcatgagacacagcatgagaagatcataaggtaaaaatggtttcatgatctggatgctgtgctgatatttttttataaagttgaaatttgtctttaattcttgcttacatggatattgtgttacagaggattagcattaggaatagcccttacagtctatggaagggaagaagaagcggacactttgattgagcagatgactcgtgatcaagatcctatactacgttatggtggtatgtatgcattggcactggcctatagtggtactgcaaacaacaaggccatccgccagcttcttcactttgctgtatcagatgtgagcgatgatgttaggaggactgctgttttggcacttgggtttgtactgtattccgagccagagcaggttggtggccttttcctttgtcactcgtagcggtcctttcatttttttaacgttcattgttaaagtaatttagtcttatctactcatttatatttgagatctttttttctttttcctgaaaaatgttgtgattttcttttttatgcccctctataaatatatccgtatacatgaaatctctttcagaagtatcggtttgccaatgcatggtacccaatttgcgttgttatcttatttgtctgctttgtgaattgcagacacctcgaattgtttccctgttatctgagtcttacaacccacatgttcgatacggagcggctcttgctgtgggcatctcttgtgctggtactgggctgagtgaagctatttctttgttagagcctttgacgtcagatgttgttgactttgttcgtcaaggtgctctcattgcaatggctatggtaatggtccagattagtgaagccagtgattctcgtgttggaacattcaggtactacattacgttttgcagatctttaaagttatcgatatatcttatttctttgatgatactgctttgtagttatgttctatattttactgtaatataggcggcagttggaaaaaataattctcgataagcacgaagacacgatgagcaagatgggagccattctggcctccggaattcttgatgccggtggaaggaatgtcaccataaggttgctttctaagactaagcatgacaaaattactgcagttgtgggtcttgctgttttcagccagttttggtattggtacccacttatttatttcgtaagcttggcattctcgcctactgcttttattggactgaactatgacttgaaggttccaaagttcgatttcctttcacacgcaaaaccttcactttttgaatatcctaaaccaaccaccgtgcccactaccacgtcagctgctaaacttcccactgctgttctttcaacatcagttaaagcaaaagctagagctaataagaaagaagcagaaaaagccattgctgaaaagtcaacagcggctgcagagccttcggttgctgggccaactacaggaaaaggaaaatcttctactgagaaagatggagactctatgcaggtaaaataagttggatttctgtattttctgcttcgtcgagtttttagtatcttcttgggtctttgcttcctttcacaccctcctgttttcggttattaatatatgtcatcgttgctttattgtactctgatccaattctatacttggcaggttgacactccaccagagaagaaatcagagcccgagccaacttttgagattctgactaatccggccagggttgttccttctcaagagaaattcatcaaatttctggaagaaagcagatacgtgccagtgaagttagcaccctcggggtttgtccttcttagagacttgagacctaccgagcccgaagtgctctcacttacagatacaccctcatctactgcatcaccagccggtggagcagcagcaacat

SEQ ID NO: 15274 - DNA, 9664 bp, Cannabis sativa
  modified_base (2718)..(2732): a, c, t, g, unknown or other
  modified_base (3001)..(3001): a, c, t, g, unknown or other
aggcatcctgctcggcatattgatccgaacagatgctccaggtagagtccacgtgtcaccattctcgtgatgccacgtcagagtgctaaatttaagataacaattatatattgtagttaaaataaatataatagatttataatttaatgcaatagttaaatttattaaaaatgttataaaattaaatatgaaagtagtgatacaaattttgcattaatgccttgtgattcaaatttagataagtgagaaatttagatcaacttttatttagagtaaattttctacaaaataaactatattttattactaatttgcatggagatcctcggtcttcaatgtggccaaaccatgttgaattcttgtattttttactaaaacaattttcaatttcactagctttattttgtttcagcaacataacttaattgaattttttgcggttaaactctctcaactattctttcacttgcacttaatcctctaagctcaaattttgacggtaaaactcttcaaactactaaacagtttaaatttaaggtgtcatatatttttaacagttaattgccaacataaactgcttatgtatacactcttatacatgtggcacatttatatgggtacacataatattattatttaaaaattataaaaattattgtaaattttatacttcttttttattttttttaatattttattttttatttttataattttattcaactttaaaataaattttaaaaataatttttaaataataatattaagtgtactaatataagcgtgtcacgtgtacaaaaatatacacataatcagttttttgtggtagttaatcggatgacacctttaatttgcaattagtgtaatagtttggaggattttatcgccaaaatttgaacttagacgattaaatgcaaatgaaacaacagttaaaagggtttaaccgccaaaaacacaacttaattatgttatactatgtttggattcattaaatatataacatatttcaaaaaagttgaaaatgaagaaactccatcgagtgcttttgcgaacaaatagatctatgaggagaagaagatgattgtaggctacaatacattattctgcgcctttagtaaactagctcttctaatgatcttcacttaaaaccttgcaaaggcaagagatatatagatatgcatttaacaaattaagcttcagatggagaccttatgaaaataaatttgaggacaactagagagaacctttttgaaccaaaaccagcataactagtgatttgacactatagtttggattagtcaatcaaaaataaattaaaattaattaattagttcaaaacttggggagactaaagagaaacgtttttacattaatcccctatacttcatataattatagttgaccttttccttgaaaagtttaccaacaaaagatccatacatggatatttacatatcttaacagtaacccactttctcttttcaaatcttgtatctatactaattccttggacaaaaaccatgtatctacctatgaagaagttgaaaatatataaatatacatataaaaaaaaaaacattgcagcgtacatttttgttttctcaacaatgttgtggatatttttagttatgtattggcggtgttttaccggccggagagtaatccatagccactaattcattgttgtcaaaaagctccctatcttggtttggtttcaactcattatcattactcttcttggctacatgttcaccttctttcaaaatcctagctgccaatataaaaataaaaataaataaataaataaaagccaaaattcaataaaaaagataagaaaaagcaaaaatgttctgctttttaataataattatgatgaaaaaaatagattttgaagggcttgaaaagaaaaatacctttagctgttatagagaatgagcaaaacaagatgagagttgcaataagaaggcacttgtattgaaccatagccatcttcatgtcaacttattagagtgattcaattcaatctattttttctttttttttttttttttttgcacatcagctttatagcaactagtccaattatatagatgataataagtactaatttttgtccataaaccaagacatgtggtgcagttctgacaatagtatagtagtaattttacctgaccaatttgatttatcatgagcgtcaacatcaatgtctcatgctgtctttgcttgaggtgtattataaaatctccttctaattgatgccaaaataagccttaatcagttccctttggggtgttatctgccagttgggagtgtctcacttttgtctatagagaaattaattgcagttgttttattttccttttttctttgatgttaactatttccaagaattatatattcaaaaaactatatccaagaataactcgaggttagaaagagttcatagcaattctttactatcctcctcacaatttaatgtctaccaaatctatagctacctttagtttaatttaatttatattaattttccttttccatttttttttttttgtaaaaaagtcttctaagaagatatgaataaaacatatatgtaacatattgcaagcaagttttatccaactatgatatagagttttgtcctttttttttagaaaatttcactcaagattacaaaaatcattgcaagtatacccttgagttttattattattattattnnnnnnnnnnnnnnnattattattattattattaggggagttttatttgtaccctacaaatttataaatacacttcattttaataattttatttttatataaaatatatatatctttaattatattaatttttgttgttccagttcatgttcttacaaaatatacttatcaaataaaaaaatatatatatactttaaatattataataaaaaaaataaaataaaaaattatgtaaaatttttaaaaaaattacaaatgatttaaaaaatatataaaaataaaantaaaataagtattgaaattaatacagaataatgtgagaaatttattttaaaaaatagagtgatttttaaaaattattttaagcttaatttttttttttaaatattgagatgtatttattattttgagggttgcaaatagaattctccttaatattactactattatttcaaaataaagaatttacttatatgtacatgggttacaaatataattgtaataggatggtctatttaactaatttaagttagttgtaaaatctaattttttttttgaatgaaaatgataatttattaaacagtaatatccgctattacaatagactgaagagcagaagaaatattgctctcagtaaaaagacgatcagaccaagaacaagcaccgcgagcgacacaatgtccggctttgttcgcaaatcgtttaacatgagaaattaaaacattatttaaagaatcaagaatcatttaacactcttgaataaacatattaaaaacagaaagaagtgcagtcgagctgtacatagcttgaacaacaacaatacaatcagtctcgattaacacattcgaaaaattcttcaacttgagccaactaagggcctccttgacactcaacacctcagctaaagccagctgacaagcaccattatgcagtgtagaatatgcttcaattaaactcccattgcagtccctaacgacaatgccagttccaaactgatttgtcgcgtcaaaaatcgcaccatccacatttatttttatcgcaccagcaggaggcttaacccacaaatctctgttgtcattcaaacttgagtcgtacagcagaggttcaaaaccgatttccttaagcaaccatccaactaaaatgtgcatttcgagctaatcggacaacctcagtaacagtacttgagcgtcccttccaaagtaactcattcttagctttccaaatgccccatccaaccatcaaaacttcctccaacatacccgacctaccccctaccaaaaaccccttgaaccagtcagtaaaagtgttggcagtagagaaacttaatcccacaccagacctattctagcaagaattggcaaaaggacaatcaaccaacacatggagaatagattcttccttagaattacagaaagcacaaagggattccacagggacatgtttgattcgtagctgagatcgagtaggcaaacaacccgatatagttttccaagcaaagtgaagaaccttggggggaactttaactttccaaaggattctccataaatttgattccatttgaatgctccaatctccttaattcttggagatactgataggagcttttaaccgaataaaaaccaaacggttctttactccaataccaggtatcaacatctaaagtgttacttaaaggtatcttcaaaatcaaatcaatatcccttggttcaaataaatcagttattacctctaaatcccattgtctgttatcaacttgcatcagattcgagactttgcattgagacaaagcagggtgtgtagataacacataaagattgacatcatacaccagccacgagacattaagaactgcagtagtatcacctgagtcgattcttcttcgagctccatcacgaataagctgccaagattcgtacacacttttccaaatgaaacttggattggcacctaacttagcagaaagaaaattaccttgtgggtaataacgagccatataaatgcgccccacaagtgagtcctcatacaaaaaaagatgccacccttgctttcctaacagagagagattataatctctcaaattgcgaaaaccaagcccgcctgagttcttattcttacaaagatatttccaactaaaccatctaacaccttttgttctattattagaagagccctaccaatacttcgatattaggctttcaaggtgtgagcaagttttcaaaggaagtaagaacacggacatagcataagtaggcaaagcttgagccaccgtctttaaaagaatttcacgacctgctttcaataaaagacggccttcccaacttcagattcgcttctgcattttctctttaaggaaccccaaaatcgcatctttatttcttcccatagtgcatgggagacccaaatacgtacttcgttcatcagccatagacattccaagcatagtacaaagtctatttctaagatcgataggagtattagatctgaaaaatatcgatgacttgctgaaattcacctgctgcccagtagcaacctcaaacaagtgaagaagtcgcaatatattggaagcttccctttcattagtacgacaataaacatagctatcatctgcaaaaagcatgtgtgatattattggtgccccatttgcaactttacaacctttcaagagaccatcatgctcaaattttcgaataagagaagtaaatcctttggcacaaatcaaaaaaggataggggataaaggatccccttgacaaattccccttcttggcacaaaagactccaactcatggccgccatgaacaattttatacttcacagagttcaccgtagccaaaatgagatccacaaaatgattggcgaaacctgttttttccatcattgctctaagaaaactccattcaacacggtcataagccttactaagatccaatttcaacgccatgtacccctccttacccttacgttttctcttgagataatgcatgacttcaaaagcaatcatgatattatccaagattaaacgcccaggaatgaaagcaaaattatttggagatataacatggggtagaaacactttaatccgattagctaacaccttggaaataactttgtaaaggacattacacaaagatataggtcttaaattactcatagaagtgggctattttttctttggaattagcacgatatttgtattattaagctcggcaggtagaataccattatcaaagaaagctctaacctgtgccacaacatccatcttcacaatgttccagtatttttgaaagaacccaggagtcataccatcagggcccggtgatttgtctgggtgcatatgaaacaaagcacgcttgatttcttcctcagagaccatgttgagaagttgctggttttgttcaggagtaatagtagtaggcgtctcagcaatgacagcggagtaatcagttgtagaagtggtgaataaactcttgaagtacctgaccataacatcaggaagacgatcatcccaagtcacccaagcacctgaatcatcttgaagatgagaaattgtgctgtgttttttttctaacagttgctttagcatggaaaaacttgttgttactatcaccttcacggagccacaattgcttagaacgttgatgccaaaatatttcttactggtttaatgtctcactaagcttcagttcagcatcacgaaaccgctgaatagaagtcgggtcacatccttttttccattgtctagcttcttttttgcatttggatatcttatggttgaagtttcccctatagtctctaccccaaatgcttaacatctccccacaatactttaattgttccattatgggcttaccaacacaatgctcccagcaatcactgactacccgtagagccacgcattttcgaaacgaaattgcctaaagggagtagtaaaatttcggatattaggttcaagaagcaatggacaatgatcagaggctgtgacttcaagattggtaagttgtgaagaattaaacaactgaaaccattacgaacttaccagagcacgatcgagacgaacttcaatccaagcctcagtacctcttccacgctcccaggtgaaagggtacccaatcaactcaagatcaatgagatcacactcaacaatggcctgattaaagccatccactagccattgaggataattattgccccctcttttatccaaataactagtaacattattcaaatcccaaataatacaccaggcaagacaagactccaatttaagagttctcaataaatccccaagttctaaaacgaaaacttctattgggctctccataaagaccggttaacctccaaggactagaagttgcttcgaaaatttgaatatcaatatggttgaaggaatatccacgtaactaaacttcagaatcatggtgccaaagcatagccagtcccccactatgacctctggcatcaaccgaaaataaaccatcaaatctcaatttaacacgaagcctctcaagcttgtctttaccaaaaaaaagtttcacacggaaaaagaaaattaggtttcttttggatcacaagatccacaaggaattgataaacccacgggttcccaagcccgcggtaattccagctaataatactcataatgaacggtgggcctggaaaccagcacccaccgaaagcccattttttgagcccatagaatcatgtacatcatcttcttcactaacctccatatccccactatgttcagtcaatactttattatttgacccaaccaattggtcttggcctaaagattgttgattcagcccatcatcttttatttctactattttgcgacttttagaatctaggataattaaactatcatccccctcttccagctcaccccccatattagaattactggtaatagcaacatcaatcttaccattacttcgcacaattggctccttgaatcgtggacctgccagcacattctgaacaacctccttccttctcgtatgcacaatcctgagatcctctccattattctccacattcagcggcccattgatggttgacacccccgctgcagcaaccccactaggattccggccgacgaacaatgcatccaactcagtaccatcacgcaaccattgggcaccaatcagattattcctcctcctaggttgtgctctcatccaaataccatacggtttgacaatattttctattggcatatcgaatagctttgaacaaaacttctcagagtggccaattataccgcaaataaagcaaaacataggaacatactcatgcttgaattcagcctaaaacccagtatcatccatggttctctgaagcttcttccttcatttcaaggggactgtgatatcaattgttactcaaacccgcatatactcatgccaaacatgttgaaaattcttaggatcagccttaatgaatgtaccaacaaaattacccaatttttcaacaacagcagccgatttgaatcctacttggagaccatatatctgaacccacatatccagcctatcaatggccactctcttacgatcgtcacccctttttagtttttgaaaaacaaattgaatccgattaaatgtccacggactaccttccacaaacctttccaagtcaatttcatggtaaaattgaaaaagatactgattggtgtcaatctctttcacatagactccatttcctagctgccaaagagacgccatgacatgtctcatagcttcaaagtcgatggcccgagcagtaagaaatcgacctacaatacacagatgaccgtgacccacttgatcatcaggcacaagaaaatccactcccaaatcaccatcatcctctccttcaatgctgatatcagcatagccctcttcaatgtcctctaacgccaaactagtggaagccattgtcgagaaaaccagaaacacaaaaaccaacacaccagaagaaaacaaaacaatactttctcactaactcacacactcaccatgtcaagagacaagacttaattatattttatttacttacgcaatctttaaagttttaaagaaccagtctgataaataatccatccatctactgttgtactatgcataattattactatgtttgtaaaatctaatttattagtattaaatataaaaacattaactctaaaaatataaaactcttgaacttggctaaattaacattacatggatatattagcaaattgttttaaaaacataagcacaattaacagtgaaggggactatttacaaccatttatatcttactattgtaaaattgtcttaatagtgtttatattcaattttgagtattttactcttctcatctaaatttatgacaaactatttcatttatctttattattataactttttgtttatagattattattatatcttttatcttactattattgtaaaagtattttattagtgtctatattaactattttactcttatcatctaactagtaaatgtaattgtgttttacgtagggcggttatataatagaattatagagtaaatataaaatttaatttagtgttttaaaaattattggtcgttctctttatttagttaaattataatttagatatagtatatcgcaaaataatgtataatgatacactgagtttaattgtaatcaaatatttttgtcctgacattaaaattttctcttcctaaccttcaataacgattgtgatcggatttatgatctaattacactaaagctatccaattacaaggaaccaatcaaatccagttcaattacaaaaaattagacatccagttacaattagattgatttggaagtgaacagttgtattttaattacgttgaatcggttattgaaagaaactttcaaaatctaattaaaaactgatcttattaaattatatgtaatacatattaaaatcatattgtatt

SEQ ID NO: 15275 - DNA, 3109 bp, Cannabis sativa
agactcaagtatgtcgatcaccatctccggcaacagcgagctctgcaacagttgggaatgatccagcaaaatgcttggagaccccaaagaggcctgcctgagagatctgtttctgtccttcgtgcttggcttttcgaacactttctccacccgtaagttcattttttctttgtatcaatattctctctttgaattttcctccatatcccatttcttttatgctacagttttactaaaagtgatatctttttacgtattaggtatccaaaggattcagataaacatatgcttgctaaacaaacagggcttactagaagccaggtgtgtgaccatttcatttcaagttcttaatttttttctattgtgttagttttgattccatttccttaatttgttggaactggtttttttgactgttttgttaaggtttcaaactggttcattaatgcccgagttcgactttggaaaccaatggtggaggaaatgtacttggaggaaatcaaggagcatgaaaagaatggctctgcagaaaaaaacagcaagagtaatgaggattctgactctaaatccacaaccccaaaggagaaaagtccagctgtggataaccaaacagggagtttcaattccaaacaagagaattccatagcccaattcgtcccatcagccatttcaatgtccacctcttcaacctctccaacaggaattaacaaccaccggaatcattctgggttttctctcattggttcatctgagttggatggaatcacacaaggcagtcctaagaaacagaggaacaccgaaactttgccatctccaaacagttacccatctataaatatggatgtcaagcctggaaaaatcactaatgagcaaattagtatgaaatttggagaagatcagaggcagagccgagatgggtactcgtttatggggaaccaaactaacttcattggaggttttgggcagtacccaatggcggaaattggaagatttgatgccgaacagtttgctccaaggtattctggtaatggggtttcactcactcttggattacctcactgtgaaaatctttccttggctggggcacaccaagcttttgtccctaatcaagggattcaacttggaaggagagtagacataggtgaacaaaatgagtttggtgccatgaatagtccaactcctcattcttctgctgcttttgaaaacatcaatattcaaaacccaaagaggtttgcagctcaattgttgccagactatgtggcttgaggactttactaacaagttcttgaagatgatggagaaagaagaatattacttaagcattttaggggagaaacttctcccaaaaaaaaaagaaatatatttcttttctagaggaacaagggggggtaatgcattgtagtgtaaagaaaggaagatttttacttttagttttataggtttatacatttgcaaaatagaacaatttcagctcttagggatttgagagcatatatatgcttgaggattgtatattatttttgtaagttttgatgatgcatatagatggattggtgtcatcattggggtataccattatatgggtaattaaagtagtctcttatgatttgtatatttttcataaatgaagggagagttggggaacaataaaagcttgattggttgcctataatggtacaaaaaaattgggggggaaagaataagcaatgactgattttgtctttggattccatattcttcacataaatcagcaagaactatcttatatatataatacatattttatttctattatctttgtttttggggtgaattctagattgtattctattatcttacaataaccaaatttttgtgtgacacttaataaggatgtcacaacttttttatgagaagtgttatcaagaaaatacttttatgattaagtgaatcttatcctatataatatgattcactaactacaatgtgtttaaagaacagaattgggatatgattaacattatgcctaaaaccaaaaatatgatcctgaaacacagcatatccgatcaaacattgggattttcactagtatattctgcaagtaaatttttaattacaattaaaaacaaggttccacacaggggaccccattgagggttacttggcataatgtagaaaaagaaattgtaagaagatagggagtttataataaggattaagacaagtaacaaaaacgacttatctatttctaagtactaatagtttaatacttttatggatgatgtaaagggggtatcacttatttgtttattttatttttgggtgaatcacaataagactaaagttatataaacattgttctttggattcatttattaatttagatatttttttcttttttccattttttaaagattgcttttgtgacaaggtagtgatatgattaagagttggacttttctgtaataaaatataacttacatggtgaagcttcccactcagcttttgtattttaatttttatttatttttaatttagtaaggttatgattgcgtttggacttgttagttttattactcaatgaggacgtaatctggttgtttcatggctataggctggtctaatatgttaatgatggaacctcttacacattattgccccaaagaatctcaaaataattagtcaacaaaaagaaagatattctgcatatccaccctgccatcccttcatttttttttcttacttagagagtgagtgggctcgcagaaaatatttcttccatggggcaaaatcttgattgaggtactttcaacttttttctcggataatataataatttaatattttcaaatcattttttgagaatactcaaaaaaaatatcaaacatgcatactacaacaaattgtttgaatcatttcattgcatatcttaaattattcagaatttagagaacttggtattttaaatgtctcaattagaattgttccccaccacaaggacattttgtgctagccagtcctaaaggataatggaattttttatataaaaaaaagctaattagaatttttgtccccagaactttgacatgtaccaaattatgcccccgaacttttaaagtcgttaaaaatg

SEQ ID NO: 15276 - DNA, 4840 bp, Cannabis sativa
  modified_base (4277)..(4283): a, c, t, g, unknown or other
aaagacaaacacactcactcaaaagtgaacagcaaaagacaaacacacacgttcaatagagaacgacatacacacgttcaatagagaacgacagaaacagtgttgatgtttttaggcaatacaatgtgtagattttgtaaggggctgtatctttaatttttcgggcacgactgcgatagtgttaaaggacaccttaaggattcatgtaccccataagtaatattattattggctcgggtcctacacatgatcaaataaataatataaaaaattactaaccacttacagcacatcacatgccttaccatattcatacccgtaaaaggattcgaaatttcggacacaatcataagacatcatcatttggtaaagaaatgaaaaatgtcttcatataatgaagatgacattacaaataaaatcaataaattgatttacatgggttagaagtatctatcaaaattttctgaattccttagtcaataaaataaaactaaatgaataaatttctatcaaaacttctcagcaatatatctccttgagaacaattatacacctttagatatgattatgatcctttagctgtgacatcagcatgctacaagatgttctacatctgtaccattatatatatatatatataatatatataactatgtaagaaagtgaatgagaaaacaatattgacaaaagggataataaattgtgaagaatttacctataagaacaattggactgttgcttttgatttatataagtatgagatgaactcaatattttggaagctgaatagattcaaactctcttttgtcacattttctggacctcatcatatatggattggaaaagaactgttggaatgtatctctctccaaagcttggaaatataacctatatcataacagatgatgacacagataaatttaaatatttagagggagtcatgttcttcatagatggatggaagaacatgtcatcacaggtatcttggggtgcccttaatccatgtacatcggtcagccaataaggctgcacatggattagctcagtatgctcttcaggtgaatacaaaacttgtatggttagatcagattatgacattatgttttctttttcaatgaagttattcattgttgcaaaaaataaaagatggaacaacaatgaacataccgcaataagtttcccggcattctcagatcttcttgctaaattcaatgcagcagctgcagctgctcctgaagaaataccaacctatttgtatacaagtatatatcatcatgtcataaaattttcataatttatacacatgcaagagaagccgaaatgctctaacatgcagaagtttttattaccagtaaaccgtcctccaaagctaacttcctcgccatttgaacagcttcatcattggtaatctgcattatttattccactagttgaattaatcgatgatatcttacgaacaaacaaaaatgcaagaatgcaagtaccgaactaataatatatgtattgtatttataataacaagaaaatatttaagggcttgattctttggtggttgtatagtaccttcataacctcatcaagcaaatttatatccaaaatgcttgggagataacctgcatgagagggcacaaaacttcaataaaacaaaaaatattatctgatagagaaaattgaagaccagtagagtgctaattaccttgattttcccccgatatgacacttctttcagctggctctacaccaactacctaaaggaaagtaaaagagaaggattaagagtttcaaataaagatgtattgagatgaatttaagcactcaattttcagagaaagatagattcaagtttcgaggtatctcccaacctgtatttctttgttcatcattttgaggtatcgccccgtgcctgtaatagtaccaccagttccaatggatgcaactaagatatcaacattccccaaggtgtcctcccaaatttcaggccctgtggtttcgaagtgaatctgcactcatcaaatttttcggggtatttaatttgagattgatttatatgcacccacatagacatgtttgagactgagaaggggggaaaagaaatcaacctctgaatttgcaatattatcaaactgttgaaacatatacgaatttggtgttctaaggacgatttcttcagctttatcaacagcacctttaaggcctttctccgggtctgtcaaaacaatttctgctccaaacgcacgcaataagattctcctctctatatttatggacgcgggcattgtgactataagtttgtagcctttagttgctgcaataaaagcaataccgattccagtatttccactagtgggctcaactaatatgctctgcacaatcacatatagaaatgtaggattcttatataaggtaaacaaaaacaaaacaaaagaatttgattacacaatttgcctaattgaccttcttatgtgatagcagcaccacgagctcaccttccctggcgatattgctccactttcttcagcactagatatcatgctataaccaattctgaaagataatatttagaatcaatatcatgcattactatgtcttacttttagtaacttttagaatgagaacttttgttcgactaaaaatggtgcattaataaaagatgagtaaaatatgatggacagtctagtatgaaataagccacaaagcgagtaacacggttgataagtgtctaacatggtgtttagttccatatcaattaagttaagaagctacctatccttaacacttcggcatggttccatagattcaagtttggcagcaacatttgcaacacagccttctgcaactctgttgaggtaaaccataggagttcttccaatcaactgcatcaatatttcagtataacaaaaaacaaaattagggtcgaaacataggcaaatatcactcggtatgcatatcaacaaatcaaatctgaaataaagaaaggacaattgtactcctttcaatgaaaaacaacaaggaaaacatcaagtgatcatcattcatattcggtttcaacttgtgataacacaagtcaagatatgctcaatactcaaaaagggtctgaggttcgagtccctcctggtttccgaagccaaagaaagtgtataacttgttatgacagaagatacaaataagccaagtaattcaataaatatgctcaacactcataaaatgtgtctacaaatcactaaagagagttaactcaaatgttcaaacatgtgattttctctcataaggtctaagattctagtccctcctaggacctaatataacaattattatagtttcctgatctccaaatattctaaaagtctatatggcatcttaaacaagagaaattttccaaatgaaaatatagcaaaataaccattttaaatcgctcatgctaccaaacatggttaatttgctcataaaaatgttcataatggttattgtttaaaactactttcaaggttagttggttcaagctttcaaattatagagcatagacataaaaactacaaataaaaattggtaaagcattgaaatttaacaacttcaatccaaaaaaaaaataaaaaatgagaagcttaaaaaattgtcatgaattgagtcaaaattcttcaaacatgaaattcaaacaaacacattatacataagataagatgagataatgggacctgggttacgtcttcagcgatgttaacagctccaaattcgaggtcttcttcagtaatggctgcattgatagaacaagtccggcgcagtttgagatggtggcggggaaaaccggtgctggaaaaggaaatggcgttgggaggtgtagagaggagaaaaggagaggactttggaggaatggagaggagataaggaagagggttatggaggagaggagctggtagtatcgccatttctgactgttcttcaaaacaaaaggttttagctttgaagatatgcctccagacaatattttgaattttgcaccatcagtccctcgtttctttcatattttcaaaattaacctcttcttttttttaaaaaaaatatatatatatttgagtaatttgcggtataaatacaaaatttaatttcgagttgcaaataaatatctaaatttaaatttttacggtaataatacttaaattataattctgaaacttctgtaggtatttagacattaaatataccaataagaaaatgactcgtggctaatgacttgacatttaactgtcaagtacttacggaagttctaaaaatataacttnnnnnnnattactgtcaaaaattaaacttaactatttatctataatcaaaaattaaacttaggtaattacattgcaaattactctaaatgttttgaattttgtccttatcttggattggagttattaaaattcttttggtaaatattgtagacaatttctatggggcttacccaaaaagtgacagaggcgtgtaaaggtttcctcagaccagacagagattgaccctcaagttgagatatcaatcgagaattctacttactcacccgtcaagtagggatgaaagtcgaccttagtgattcgacaatgtcgagtgattttatgttttataaatatcactcattagaattttttattttgttaaataatatattgaaccatatattttttaaaattgtacaatattcaattttcattactataaccaattgattcatttaaccaaatatattgttgaatttgtcatttaagggtttttattattcttacaaatcagaatgaattagcacttcaagggctcgtttggaacgtcgtattagatcatattgtattgtattgtattatat

SEQ ID NO: 15277 - DNA, 3193 bp, Cannabis sativa
aaaacaaaaatgtgtccattattaatgagaaagacaacacaataaaatctctaacaaagtgggccatggatcaactactatctaatctctgagtctgaatctggctaaggagagaaagagagagtgacactctcactctcatctcatatttcaatttcattaccattctttctcactcgccacatttgggtctctccgccatgtccgacgtcaccaaccttttacgccccgtcggcggaaccgagtacagctggtgcaaggccgtacccctcggcactggaattactgttctagccctctctctttcaaacccacctgatatcacaaatctccaaaataccctccaccatttccaaacttctcaccccattctcaactcctacatccacttcaatcccataaccaaatccttctcttacttaaaacaccccgacccacatctccaaatcgaaccctttgatcttcaatcaacggctcagattctccaagacctccaaaaggacgcacaaaacgacgccgtcacaccttttcaactcattctcgagcacgagctcaaccgcaatagctggctcgatcccgacgtcgatgctgacgtgttcttcgccagcttgtattctctgagcgaggcccaatggtgtgtggtgttgaggcttcacacgtcggtgtgcgatcgggcggcggcggcggcgctgctgaggggtttgctgagtgaaatgagtggcggagaaaaggaatttgagggaaatggggaggttagtttgggaatcgaggagattataccaaaggggaaaggtaataagccattttgggttcggggagtagacatggttgggtactcattgaactccttcaggttgtcgaatttggagtttgtagacccaaattcgccgagacaaactcgcgtggtgaggcttcagatgaacccgcttcacacccagaatttactcgctgtaagtaactattacctcaattcgttaaagttcttaagtttgactttgagttcaaaaaaaaaaataacttaaatatattttcttagttcattttgtttgataataatttttgtaattaatttaagaaaacaaataattatttttcttttttaaaaaaatatgtattagatcttttgaatcacgaagctgacatatcttaagggtgataagtactatgggtgaatacctactaacaatgctcttaatttataaacgagtgacacgtgtaatttatttataagtatacaatatgtgtatgatttatgatttattaaaatattaaaataactttaaatataattcctttagtaaaaaagattgagaaagtcaattcaaacacaaacttagctgatataagataaatttaaatccgttaattcttatgctaatttcaatcatattatcgtgtttgacgtgtttttgtaagtacagattcagatggtaatttctcatatttaaaaaataaataaataatgactttttcctttcgaaataaactactgggagttcacagctattattttgcgtgttttatttaatttccgttgcactgaaatctgtcacgtgacagtttaaagaaagaaaaatttccgtcaagtgggtctcatgttatcgtcgtacaagaattgtccaattcagtcatttgacgcaaggttttgtcgtactatctcaaaaaggaaaattctgatattaattaagtcatattaatttccattacaaaaaaagtcatattactttaataattattataaaaaattattaataatttcataacaacgttagtgaacagaatagtgatgttgtgcactagcatctaatatcaaagctcaaattccccattctttctttttgacaattattttattgcattcttttttgagtttgttcattattatgttttggctttattgttttgcttaaggctagaacacaagataaataaaaattaaaaattgtagcttattttttctgttgaggtaccgattcgggtacctattctgtaaagattgtttctttcctttttttttttaatgaaaagtcatttttaaagggtttggacatcaattaaaaaaaataactaagaaggtgtttagaataagttaatactagagaatagtaatattgtttggggtttaaccttgaaatgttattcccttacagggttgcgaggcaaggggaataaaactgtgggcggctttgtcagccgctggactgttagctgcacattcatctaaaaatcttcctgaagacaataaagaaaaatatgctgtcgtaattctcaccgattgtcgttcaattctcgaaccacctctttcaaacaaccatcttggtaaaacaacatctacccaaaatttattttaatcttttatacataaataattgtaaaaaataaaaacttgatttgtatttgtatgtgcaatgcagggttttatcactctgccattcttaacactcataacataaccggaagagacacactatgggagttggcaaaaagaagctacacgtccaatgccaatgccaagaaatcaaacaagcatttcacagacatgtctgacttgaacttcctcatgtgcaaggccattgaaaacccgagtttgactccttcgtcttccatgaggacggctttcatgtcggtttttgaggattcaattgtcgatcaaactgctgaattgcaacaagagcttggcttggtggactacatgggctgtgcttcggctcatggagttggtccctcgattgcggtttttcacaccatacgtggggggagtttggattgtgttatggtttatccgtcgcccttgcattcgagggaacaaatacaggatttgattgatcgtatgaagagcattcttgttgctggctgtgttagtgtcgaagatgttgaaagtaatggaagttaattgatgatgatatgtgtttgacttgtttggggtaaaaagtaaaaaactatttggatcatttctaaaccaaataatgttggtttaaaaagctgtaataatcatgtgttgtcaaacttgatttcaatttcagctacaaataaaaataaagaaaggtaaaaaataaaaatataaaatcctcttaatgtagtgaccatttttgttatatgatatcctctcaatttttggattacctgtaataatatggttatgatatgtggaacgatctccacaaacgatttaattaggaaaatcgaacccaaa

SEQ ID NO: 15278 - DNA, 15507 bp, Cannabis sativa
  modified_base (8979)..(8983): a, c, t, g, unknown or other
  modified_base (10392)..(10393): a, c, t, g, unknown or other
cctttttctggcttcccccccccccctccttttccttaggctgagatagacgaaattgtatataatcctcatcgtatccaatttgttccaattgataatatgaatgttcattccaaaagtcaaattagtgactatgatgacgagattgactcagtcccaactgtttctggtacggaggctctccacaagaatttgatgggtagggtagtggaatcctctcatttttttcctttagcaatggacgatagtccattatttgagaatattctaaataatatattttcctctttttccttctagatttcttccctttttggcagtcactctgaaactatttttgtttcttgcgaagtaaacatccccaaacctactacttcttgttcaacatttgttgcattctcagccactcttactttacctccccttccttttcaaagcttgtttcttcacctctaacaacttttggaaatcccattgcccatatttcttcctttcctccaaaggtttcgacctcggctactggattaatggcatttactacgtcgattttttctctgtcgagctcttcttaactattgatgagctcttcttaactcagtcctttctgaattagatccttttattttttttagcaatttgatgctgataatagaaagttatattaatttcgtgaggcagcaaaatgtggtctccgcgatttgtatgacttcaactttgaaactagctaaaagttattttcccttgttgcatgcatgccttcggactcaaagctctttgtgaagctcttcgttagcaaatttcacaacttacctctgacctggagcaggttaaagccttataagagaaaaccagatttagctcaaaaattatgtgaagatactcagaacagagcctctgagtttgacctagctgtacagaacaaaaatgggcatattatgcagactgaaaagaaattgttagaaaaggatgagtttcttgatacgataaaaaataaatttcaagaaaaaaaaaacaaacttttcaagagcatggaagaaaatttattgaatgtagaggaggagagtaaaaaaacttttagaagagctctccaaagtttcaaaggaattagatgtcaagaaacaagctcttcacatggctcatgataatatatatgttgaaggctcatgagaacgctggtttcgcacaaggagaaacttgcatttgaagaaaaattcaaaatactaaaggaggtaatcttgtcttttgacgagcttgttaaaactactcctccttcataaccttttgcttattttcataatttttaatcttcagaaaagggaagcctttgatattgagagaacttgtctgagactcgaggatcgtgcaaagcttgagaaggttattggctgctcaaataaaatctcttttgctaaagctatggaaaagattgcttctgaccgagctctaattgaagatcaaattgctaactttcgttcattttgtgagtctctgaagattcgacatgagaattacatttctttcaattatctatcttgtatgggtgatttctcaattagctatcctctaaactatttgagaaaattgagggagcaagggggtcttttggctagcaagcacacatcaaagggtgtttatgttgaaatcgagaacgacttgaatgaagtgtctgagcttgaagaagagatatctaaatcttatgatggtgatgataacaagctcatctcttctgtgttgaaaggtagaaaatcttttggaatcgacgttccttcttctcctgtcagagctcttttagctaataccccgactgtaaatgattaagtggtggatcatgaaccctctttttctgctcctgatgaagtaacttttgacatatttgaatttgatcttcaccaagtccctcttacctatgatctccaaactatcacgggtacttaactgtacatgtcacatcttttcctctagatgtagtttgctttcttttttggtattcttgtaaattctgccattcttgcttcttcttgattttattattgcttcgttaagttgatgataaattttaacttgaattctgatgtccttgttatgaaggttatatgaacatccctttatttttcatggataggccttgttcttgcccctgctgtagtttgttcatcaccatttcatctgcttaaacattttttctcttcatactaatggtgggaacattacacatgtgtcttcttcagctctaatcctgttcaatttcaatttacttatctaaatttttgtttatcatgctctgacccttatttttcatttctttccagtggtttggctaattttcagctcttggggagatagcaaatgtctttgagctaattttgaaaacttagagaataaagagggctttgtgtgctcatcaaatattgctaggaatctttataattcaaccatttaaaaattagaggattttgatgtttagccctgagatcactacaattgacttggctttcataaaaagaagtccttttaaatgtaattatctgtaagatgttacttttgtaaagcctaggagatcataactataactccttattttatacatgtaaaacttttgagaggatctcagatatagcatttaggtgtgtaaactttaatttcaaatgatcttttgagtaagtattaattgaatcctcttgttacctagttctgcatatattatcgttcttttaattttactttgtgctatgttctgaacattgtccttggtatacaaaatgtttatttaagttcgctctgtgttgagctttgcacttttacctttgaaacttctatacgaacttgttgagctctaaatttcatgtgttgagcttaaaattccaggtcttgaaataaaaattccatctcttaaaattatgttttgctacaagctttaatgcacagattagtagtaaactatctttatacgaatttttaaaatctaagccattattcacatcattaactaaaattttgtaaataattttttatgaactcttttttcttgtaagcaaaattccacaaatatgttggcctccggtcatcattttttttaaatggaagaactacttgccttagttgattccatctcatcgtagctttcaatccttcttaaattttctcgagctttttgaatcttgatttcaatatcctgagatgagtttttcaggagttctgctctgaaacatcttagtgtttcttattcttcacgactattctcaactttattatatcttgttctattctattctaaacttttccataagatagttaatcgtatcgaaaaataatttagttattgagaaaatttatacttaacagatgatgaagtcagaactgttttattagaaatgtcaaagtacattctcgctctttcaaagctcatggtctatacgtagagctgcatgattcgagctttgattttgtttgtaatggatgactgaagtcctgaaatattgtttaggcatttcaagcttcgtgattgagctttagaagaaaagaattaatcaataaataaattaaaagtacaacacaaagatattagagtatttaaaatttatttaaaaaaaaaattagactttttacatttacgatataaatttcagtacagataaatatacaatcacattctattctatttatgtagacattgagctcgagctctattagtaacttgtacagatctgaactttggtattcatgtccttgacatttttctcctacccacatcatccaataggtgggacgtctagaccaaattacgtttcctttgactgaacctttggcagtttgaggtactgtaattttcctaatgagttctgcaattgcttgttggccttcaagcaactcgtcattatgcgggacgtctaaatcgaaggaagagcttggacttactgagcctttagaaactcctcttggcttgggatggaaacttgttctccttcttcctcgctctgtgctcagtgaagaaatagttggggagttgccattttcgaccatgagaggaacttggtctctcaggcatcctctcaagtaaaattacagctaccaatatatattgaactacgctctagtgaagaagcaatcatagatagggactgtcacatgtggttagaggctcggatattcatttgccttcctctccttctggtctattgccagttatcagagaggaaaagacataaacattcataatttgcttgattttttccttcccttcttttaacttagcactagagcactctctgcactttcttcccaccagccataactgtaagactaatgcttttaatttttggcctaacatactcctttttcaggagatgttggttttcatgaggctggtgggacaacaccaaggaacccagagcgctaaagcgtatgcttagcactggtcagtcgtcgtggtcctttacttagccttggtcgattcttcatgaacaccatgctgctgatttggtgttttgaacgtttttgcctttaagttggctgaaaacctaatattttgagatgcttggattttttttatggtgatttttcatttattggaaaaattatcaaagtatttgaagagattattaaaggattttttgaaaagaaaatttcttcaaagagaattttttgagagtgattgaataacagtgaattggtgcttcggacgaagcttttgcttccactttataggcccttcaatttgtataacagtgaatttcacgtgcaagtgtttcccctactccctagggtgattaattacaaatggaccgatataaagaggtcttcctcaaaggaaaagtactaaaggcaatttgtatcgtcatcccagattttatttactgatcctatcaggaattcaattgctttatcagtttacacaattccatctcagctacaatggttctctgtagtttgcatgtttcccgagctcgacttgatctcgagaatgtatttcgatagagtttcgactagtctaatgtgcgcaagaaattatccccttttttgaaggatgagtatttataggcggaaaggatcgttggacctttgcttagttcctctttgcttcttccatactttcctttcctgcttctattctcagagctcttcaagttctgttctttatttcccttagttcaactctatgttcttttctggccaagctctgtttcccttgagttatcttctccttttagtaaaatgatgcatttctgggagtctgccatattgtgatattagctctttcttatcattattgatgtgaaattacttttatacccctaatgttatttttatcactcactataattgtaataaacgaaccatgaaaaaaaaatagttaaaagtttttagcatgcggcatgcacgcaccattgtgatgtatttattgcaaaacaacattataaaagagtcaagtatagtggcggactcaagatataaagtgaaggggcgtaatttcatttttgtaagataggggcaaaagtaaagttaaaaaagaaaaaaaaatgtgatattgatgggatttgaaccattgactctattatatatacaatttagcttaatcattacacaaaaattaatagtatatatataaatatcatcttttattacaaatatatatatgttgtaactaattaaaatatatatacatttttttgcgattttttttagagggcaattattacccctcttttctatgtggtcctgattaagtatttcttgaaaaaagaaggaaaaacattatgaaagagtcactagttgcatatatattaatttattaatgtttgtttattgttttgattaggggaaagttccattaattacctatacaggagtgcaccaattgcatatattcatattcgttcttgcagtgtttcatgttctctacagcgttattaccatcgcactcggcaaagccaaagtaagttattttttaatataattttcttttacaattatttttaattatgtgtttggacttcattaaattaattaatgtagccaatcaaatagtttggcctgttgttaataactaagtcaatagaacaatataactttatatataataataagatagttaattatcattataatttacactaataaaatattatatatttaaatggctataaaaattaataacacatactgttttacttacataaaatatattgttaagaaatgaatgatcaatattatctataattaagcagatgaagaaatggaaggtttgggaatcggaaacatcctcattcgaatatcaatttacaaatggtaattttctttgtataatttatatatattatacttaattaataattatttaaagatttttatacttatacttttataacttctcaatacttctgctatatatagtctgaaaaatattcaattcaatatgttaatcatgtcatgatgagttttaaaacttaactgtattaatataaattatttttatgtgaaaaattagtatttattgttgtcaaatgaatttaaacaacacaaaaaaaatacgagtatttgaacaaaacaagaacattcacttacacagttatgtgagtacctagagtagtaagtactcaaagtttaggttatcaaatatgcaaaaacaaggacatgaaaataaagaaggcaaagtttagtttatttaatttaaatcactcttttatataaaaagtaagtatcttttgatcttacataattggtcaaacaggattgttattacatttaattacataacttatctaatacaaacgtttcaaagaataaatgtaaaaacagtttcatttgttactgattaattgctcaaaacgtctcggacttgctgagtcgtcgcagattgcccattcatattcccaacacgcgagctcgcaggctttgtggtgtttttactcgcataacaggcctttggacctagctttaattaataaacgcatgtaatcatccttacttagatatttggacattctctgcgttgataacttagaacacgcgagcccttaacgaatagtcgaacacattgatcattctgaccaaacctatgtaaagaagtagtctttacttgtcacatgagagacatgtttgtcgcatacaatcgatatatgcgtgaccaatattaatatctcttgatcctcttaatcttttgactatattgggcatagtgtacgactagaccctgttttgatcgtatcttcttacaagtttaaacaatgcaaggttagttttataagagtcatattagtgacacgtaatccttttcaatcaggaattgggtccatatgtcaacttttcataaagtttatgtacttatatttttaaatgaaaaattcgcattataacattaatgtatataaatatgcgtagaaattcaaaaaaaaaaacatcattcaagataagaaagaaaagaaaacataaatacaaaaaaattaattgttaagatttttaaggaattattagtgattttaaatatgttgaaagtataattgtcaaaaacatttttgatgacgtacgtattatatggtgataataattaataatgggacttattggtttgttaatttggttagatcctgagagatttaggtttactcgtcaaacatcttttgtgaaacgccactctggtatttctagaacacctggaattagatggattgtaagtcacataattaaactctttcttttattttattatttttaattatttatttatataatcttaatttctaaaaataattaaaaacaaatatatatttatgcaggtggccttcttcagacaattctttaattcagtaacaaaagtggactatatgacaatgcgtcatggatttataaacgttagttaattagtaattgattaattactaccttaatttttgtgtttgaaaaaagatttatataacaatatataaaatgcaggctcattttgctccagatgcaaaatttgacttttgtaagtacataaagagatccatggaagatgatttcgaaaaggtcgtcggtattaggtatcaaatatttacttcataaattatattaattttattatcaattaagaagatacttacatttatatatgtatatattttgcagcataccattatggatctttgcagttgtcttcttgcttctaaatgtttacagtaaatctctctctctctctctatctctctcatacatattacactatataatttatcaatatataataaagggtaaatttttgtcaaaaataaataaataaataaaataaatgtgtgtgtctatagtacactcctctaaaggaactttttcagtagatctcacatctatttagagttttcatcttattttttccataatcatatacattataagtattatttaagattacttgtaaattttaagaaaattctaagtaatttacaataccaaaaataaattttaaatattttattgtacacgtgattattttttcttatatgtgtagtaaaaaactatttaaattttattttcggtataataaactattcataatttttaaaaatttacaaataatcttaaataaatataatgtatacgatcataaaaaaacctatttagaagatgtactacaaaaatttataaataaatatatttaatgctggcaaaataattccttttgaaattttatatttttcacaaccatcaatttattgacaattgtaactttatttccttaaaattactcactacaacaaaagaaaatgattttttttcaaaatatttctcactatacaaaaaaaaaagtaatttgcgtcataaatatttaattttaattctcgttgcaaaaaaaatatttaagtttaatttttaacactaataatacttaagttatatctctaaaacttccgtaggtacttgatcgttaaatgtcaagtcaatggccacgtgtgattggcccaggtcattaattttttattttttatttaaaaaattaatttaaatatnnnnntaagaaaatgacacgtagataataacttgacacttaacggtcaagtacttacaaaaattctaactaaaaaacaataaaaaaataacacttcgtatttttgtaaaaaaattaaaattcataaaaaaaaaatagatccataaacatataattagtttaccaaacatcaatcccttaatacattattgataataataatatgttttggtgtggtgcagaatggtacacactcacctggctgtcatttgcaccggtcattgtaagatatatatatatatatatatacttaattatatcatgtttgtattgttgtaagtaataattaataatacaatttttatgattgtaatattaattaatatgtggatgcatgcagattgttctgttagtgggtacaaagcttgaattgatagtgatggagatggctgaagaaatccaagaccgaacgaccattgtgaggggtgctcctatagtagagccaagcaacaaattcttctggttcaatcgccctcactggattttgctcttgatacattttactttattcgaaaatgcatttcaaatggcatatttcctatggacatgggtgagctacctactctattctactacttctaatatgtatatttaatttcagtcaacttaattagtacttattttaataataatcataataaaaatacatataatgcagtacgaattcgggatcacatcttgcttccacgaaaacttaacagcaattctgataagagtctgcttaggcatagccttacaattcctttgcagctatataacttttccactatattcattaataacacaagtaagtaaaactcaaactcaaactcaccatccatatatttatttatatatatatatggggtgattctccattatattattgatttctgtgtaataagaacaactttccttaccctatatttggtagagaagaaagaaattaggatgtaagacaaaagtttgagaaaaagagaaattttaagatggaaatgaaagtttatttctattatagatgtttggtatagaggaatgaaagaaagattatttttaagttataattttattctttatttattatcgtaaaattaaattaaaaaatagtatattagtaactaaattttttattagtagccttaaaatgttttccacttgcttttctctttaattttggagacatgaaaagcagcgcctaagattcctgcaaattactgaactgttagtaaatttaaagagtcatttattttttcacagttaattgtcaacataaagcttatgtgtacactcttgtacacgtaacacgtttatattagtacacctaataatattatttaaaaattataacaaaattataatatttttatttttctaatatttattttttatttttatanntttatttaattttaaaataaatattgaaataataatattaagtgtaccaatataaacgtatcacgtgtataagagtgtagacataaggagtcaatggttgcaattaactgtatgacaccttaaatttactaacaatttaataatttggaaagttttatagccaaaatttaaacttaaagggttaagtgtaagtgaaatgatagtttgaaggtttaacagccaaaaagtctttccactttactaaacgaagagtaagtgcacatagataggagaaataaaatttggaacaaagtgtaaaactttgttcaaattgatgatccccactataataaggtgtaagtgagagcgtactcttattttttctttcatccttttgtgttattaatcttgtgttttttatttacattttgcttatattattgagttgtgagatcacttcttcatttcctatttcttctatttattttaaagttttgcagtgttgtaaactttattttaatcaattccattattctcctagtaatattttccaattgcatgagcatgtacttttacagatgggatctcatatgaaaaagacaatattcgagcaacaaacagcgaatgctctaacgaaatggcataagactgcaatatcagcaagaaagaaaggagagagaaaagggtcgatggacatgacgagtggcacttcatcagtaggagggtttagtgttatgatgagtagtggtgaaaacacaccaagccaaggttcatccccactccatttgcttcatacccataacaaacaaaactactactacaataacaacaacaactccactactactactcaaactcgagatcaagttcaatccgacgtcgttcttgtcaactttcccactcttgtagcacaaatagaaggagaccaaccttgtcatcatgtcatcccatgaattcctctttcatgcaataaccttgaaatgaaaactacttcgaaaggaattaatcatgaaagaatattaagtctaaaaatgaagtatatatatgaacaattatactaaatgcgggatgagttcatcgaatatatatacaacataggtaaaggattgaaataactctactcatagtcattgattttttaagctttgtccaaggaatttggatctacaaaagaaaaacaaaattgagttagtgtaggaattcagacttccaagctttctcttattctcttagatgatttattgttttacataatgaatagtgagtttggagatcagtaacgtacatttataaatgatatactttatcgtcacattaattatcagaatattttgataattaattcataaaataaaatcgaataataaaatattattggtgaatcaaaatctaaccataaatgaatcctataattactttacgattcttgaatttttgttgcagcatgtctttaattagttaagatatccaatttattattgcgtgtttaatgaccacttatcatgtttctttatggctataaatacttgatatcaatatactaacttcaaccaaaaattttagccataaatatagtagttgaatttgtctcaaaattttcttaataacttgtatattgaatcattacctgtaaggcctactatgcaattctttaatacactatatgatgtatcctcaaaagaaaatattaatctgacttatgtacactataaaaaaagctacttttaatgacaattttttagtcataacataaattttttgtgactaaaggtaacttttagttacaacgaaaagttacttgtgactaaaacatagtatttagacacaagttgtcactaatttagttttagtcaaaacaagtattgtgactaaaaacacatttagtcacaacaatttgtgatttttgtgactaatacatttaaccacgaactttttagtcacaacataagaatggtgatttgtaattagtcacaactattttacttttagccacaaattttgttgtgactaaaagtaaaaaattttgtaatgataatagaaataaattaaggttatcctgatataacttattggtaattttaagaacgtaattaaatattaatttacgtgaattaatataacagtgaagttaataatttaagtggctaataatattttaacagtgtgaatttattttaataaagtatatatgaatataatctttagtattttaaaatatctcatcactttgtatgaaaattataaagtggtctaagttaaaattattttgatacttcttaatattcctaaaataaatgcaattttaggtcttactcggacttaagcatatactagacttctaaagataaaaagaactaaaagaaggttttaatttattctcatccagatttttcaaacactagtttgagttgaatatatcactcttaaaaataaaagtattatgaagtgaataatatataattttatttaattagtgatgaggggactattctcaaattaattaaaattatatgtatcatttatttttttatcttaaaaataatttgtgagataaattatttcaccttttatacgaaattttttatcattacttgcaagtagcatatagtctataataaaataaatattactctcacttaccttctggtgtaaataattaatctataatattgttttttcaagtctaaagaaaaagataacataatgaaatactatttttgtgtaagatttgttttaatctaaaattagacttcttatgcaaaaaaaaaaaaaaaaaaaatacttaataaatatatataaatataaaagaaaatttggcaatccattcttaaattgggtgcatgattttttagtatcccaattttaaaatacgtagggatttaatactccaaaactccttaaatcccaaaatatcatccttattcaaatactctctccttctaattctccctccttctctcgtctaactctcctcttctctaactctcaccaaacccacctaaaaaaattcatgaccatcgtcgttcgcacgcacatccctaaactagatgaagtccagacctcttaacccccgacaaaacacaccggagacacccaagaaaaaatcacgaaactcacccccctaaaattgcaaaaaaaaaaggtatgtttttgaacttatgtttaatttcaatgggtctttcaatttttttattgtttgtggttgattgaaaggaaatttgtttagattaagtttgatttttgtgttttgggttgattttcattgatgtttgttcaacttctaattttttcgtagattatcgacatttagtgatattgtttgtgaggtcttacgatatcatctaaattagaacaaaatgtgctagttatttttcttttagcaacgattctcgacatattagtgacttttgccgacatagtttggttagactaggaagctctaatggttagcgacattagtcgacatagttagcgacatctcgcgatatttgttaagttattgaaagttgaaatccttggcaacatgtagcgatacgttatcgacatcatttgtaatttgatgtttgtagttagcgacatgtagcaatatgttatcgacatattttgtgatattgatgtctttttattgtttcctcttttccttcttgtagttagtgacatgtggcgatatgtttgtcaacatgttgcgacatatgccttggggaaggaaaatatgcagtacaactacaaatacaattgaatctgcaaacaaaatggaaaaaaaattaagcaaggaaaaaatatgtcgagaaacatcgcaatagatgtcgtaactttggtgaaccatgtcaacaattgcattgcaacaaatcgctactagtagctaaatttcattcgctacttcaccaaacactatttctaaaaactgtcgacacatatcgcaaacaatattgatagacatcgctaaaattgtaagtagataacaaatccttcctagtgtcataaattccatcgctgcatgtcgttatatgttattaaaagtcattcttaacctccatcacactctcatgttgctagatatcgataacgacattgctaaaattcactaaactcgaaaaaaactagaaaatgcagaatttgagcagatcaagtttcgggaacaaaacaactaaatgaaaagaatgatatgtgtagatctatttatatcaacttaaatacaacaaaatacaacaaaatctaacaaaaattactaaataaattacatacccattgttttttttcaagaattatgtcggtatgtgagtttgggttgttcctgcacacttggttgtcaagctaagttgatagactccggcaaaaggtgtgtgtgtgtgaccttctacagagagagaagaatgagagaggaaagagagggaaggggtttagttttattatttgaggggtatatttggtactaaaaataaaggtagcatattttctttgatatctaataggatagtatttattagaccatgcaacacatttaagcatttttaaaaattcaattttaatccaatgacttaattttattatttaattaaaaaaatctctctttttttatactatcaacaattaagactgaatattttgacaaaatttgacctggacccgaaaaagccacccgaacccgacccggccaacccgtttgtttgagaaaacttgttctctacggatgggtcaggtccaacccagtcaactcttacaaacgagttcaaatctgatttttgctaacctatgggttcgagttagacctgtacctgtccgccaacttggccagatttttttttcatgcgaaggtgagcaacattaaatttttagtaaaaattatatgtatatgtataacagtaaatataaaaattaaaatataaatatgattttttttatattatttttttgttatatattttatcataaaaaatttaaggttatgtaagcataggtatactatactaataatagtgtataactattattttataaatgcttatgccttatactatttcgacattaaatttataaatactttttcaatttagatattttaatggatgtggatatatcataatgtatggactatggtggacaatgttagcccgagatatgtttccaagaggggg

SEQ ID NO: 15279 - DNA, 3837 bp, Cannabis sativa
cattctgctctgcatacatcatgtacatattttattagtttgtgagtattttgatgttctcatagtgcaggtgcatcttggagatacgcctcacaacttaactgaaagtgactttgagcatttggcccgaaaaacagaaggattttctggttcagatatatctgtttgtgtaagttctaacaaaataaagagccagattgatgtcttggtttaaatgacataaactatcttttactaggtgaactttcctttttcaggttaaggatgtgttgttcgaacctgttcgcaaaaccagggatgctaaattctttaggaagacctctaaaggtatgtgggttccttgtgaaccaactaaacgaggtgcaattgagatcacattgcaggaacttgatgcagaaggacttggctcaaaggtatgtaggaactcaaagaaaaagggttttgttatttcttactaacatatgagttcacttttcataacattagctctactacatttaaatgaatatagaatgcattgtgatatcaatggtgggtttcaatgactgcagatcctaccaccgcccattacaagagcagattttgataaggtgcttacaagacaaaagccaactgtaagcaaggctgaccttgaagtgcatgagagattcacaaaggagtttggggaggaaggctgattgtttttgtgacttgggaaacaagcttcaaccaaagtgtgcaaacataatagcaataacattactatgtaatttagaacacaatcctaaaatgtggagtaatttgttgtattagcctacaagtgcgagatataggtgctactttctttttatgtttggctccctgtatgttgtacagttttgcacaatgatgtttatagatttgatagtttttcacaagtttccttaggcaactcatatattatatacatacatgaattttgtagaattaaagtcacgtttggagaatagaataaaatagttataatccaacaatttaaataattctagtattaattccattggagagaaaaaaaaaatatcaaccaactctcatcttcatgtcttttgctcattttaaagggtattcatgtttatgctcaatttaatttctcctggtaaataatcaactcattcattctatattttctttttccttatattgttaatccaatctaatctaatttttcaaacgtgatctaagataattgtttggttagtcacaaaagttcaataattcatgttctctatcatgatgttcaattatcattaacttttccggtagaaattggtcactttatcatcagtaaattggagcagcttttatccaattaaagaaacataatccacatggacaaataatttatagtgtaatgaatcaaccttttactacacttatagatacacatatagttgataaaagtttggcactgtctgatacacacatgtaatcaggactgaaaaatatcaaaacatatttgtggaatgaaagtgcaatatgttgttcttgtatggtcaaatttacttgaaccagaaacaaactgactgattcaatatgaatggtagcagttggcttgaatgtccctaaacctaaacctataatgcctcaactaggatcaatatgtatacatttgacagtaataataatttaacaaacacaaaggttcaaaattctggaggacatgaacatgggagataaatgactataacttagcgtcaacctggcattacctctctccatttcccttgcctgaatatctgcttcggcctcggtcatatcttggaatgctactctttggctttgcagcatcgacaactatcatccagccattgatgatctgcaagcaccaccagcaattaaaatgtcaccttagcttcttgttgaaagcactgaattacttttgttgtagtttaatatcacagcaatgaggaatagtccaaaatttgttaagagaaataaaattagtgtctaccgaacttgccttgccattcatttctttgagcgctgcactagcagcttcctctgttgtgtactctataaatgcataaccttttgaccttttagaaatcttgtccatgattattctaactgttgaagaaagcagttaatcaactgaagatactaacaaaaatgtgacaggaatacttataagccaaaaagaaattcgaggagaaaaggaataccttccactagctcaccaaagccttcaaatgctgcccgtaaggttttctcagatgtgtaaaaggacaggcctgtttcaacataaagatcatccagcaattctcaatgttcagcaaatcaataaggataaatgttgcaggagcttgtgaactagtgctccaattggagaaaagcaaggccgggattcctttttttcattcaaatgaatcttaaagtaaaaagaaactacaacttaaaatattaccagtcacaaatagtttctttgtttttacaggtattgtttgattttcttcagaagaatatgatgaacttgtagagctctgtaggcctgaaagaagaggaaagagtttactacacaaaggaaataactggtaagtgttaaatagtaagcgtgaaataagatacgaatgaaagtgactgaactaatttctaaaagaaaatgcaagggaaactaaaacagggtcaatttttccatgttcactattttctatgtgaaccaaaaatacttggccttacaaaacgactcattgtgaaatgtaatgtctatctcatactaccaagaaaatctggtcaaaagttaatacattatagaacactataaattcaatttctgtttattttaaacataatttctgttcagaaggctgtcaaatactcgcaaatgacttcccatcttttaaataactttcctgcaagaaggaataaccaaactataatggcatatttataattcttgtacaagttttaagagcaccaaatcatcatattatagcatatttcactcgagaaaatataaaatgctattgacaaatgacaataaaccccgaaagacatacaggagtaagctagttattcatgacaacatccctgtatcacaataactccaaagatgcaagtggtgtcagaatcaaacgtcgggttgaaaccacaaaaattccacaaggaaaaaatttgtaacttacaaaccacatagaatcattaatgagagaaatacctccataatctttattatctgatccaaaattttgatctagcaggacagattgaacaccaggaacacctgcaccatgaagggtattttgtccccaagttataagtatgccattatcccaatgtggacgataaaattaacaaggaaaaaacaatactcactagctagttcccgagcacactgctcgtcaagttcacagcaaaacccaaagttggactgccaggaaatgtgataaatacacatttgtgcatccttttcactaaatacataacaagcatatgatcccactatcagagcaagaggaacaaattgatgaaaataagcaaaatacatcaacatcaaaacatttaacactcactttcccagaacctttgttagtatctgtgcataataatcaaccatctgagcttttgtaacgaccccaatcccaggcttgtccaaactaacaacccaatgtttagtatttcccataggaaacaaaggggtctctacaatttctgagttgttaaaattttctggttgaacatttgaagaatcataattctttttcacagaatgtaaatctgggtctggcctaacggataagacccctggcaaacctacaatagatacacttttttttattaaaaacaaaaactttgatcactcaacactaattatttaagcca

SEQ ID NO: 15280 - DNA, 2141 bp, Cannabis sativa
acaataaaaatgtaaccattgaaacctcttccatacagttatatatatttaaaattagaatgatattttttgttgtatagtaagccaatgcaatttcaatttcaatttcatttacatgccattaactcttattcatcttctcaaaaatagaaatatatccaaatatatttgacatgatactgttttttttaaacaataaagttagttgatttaaaaattattatatcagtgtttaatatttatatgtaatttttaagtggacatataatcactccttatatatagtttgcataatttttttgttgtatatgtttattaaaaattaattttctagttcaaaataaaagaaagatatggtagtttagagttattaaaagaaaaatggtttgtgtcttaaatgagtgtcttcttctccttatctatttttctcaagagttgttgaaatgaaatgatcactaattaaacatattaaataactaactaataataaactaactctatttagagtatcatttatgttttttctagagaagatgtaatttttattaaataaacaaacatatatatatatataacaattcagaaaattactatctctcatttgttttttgctgacgacactctcatcttcactactgcctctattgcattctgtaattctcttaaagaggctcttactctttataactttgcttctggtcagaaagttaattacaccaagttctctattctcttttctcttaacaccccctgctgtctcttcttatttctttgatacccttggacttcagccaaagccgttcattagtaagtatttaggggtccctcaatgttttggtaggtctaaaaaattcagttttgattttatacttcaagggataagttctcagctctcaatctggaatgaaaggttgctttccaaagctggtaaagaggtacttttgaaagctgttatccaggccattccctcttctacaatgtcttgttttaaaatccctgtttccgtttgccataagattgaaaaatgatggctcattttttgtggggatcgatgggaaaaggatctaaaattcattggaaagcttggagtaacctttgtacctctaaattctttggtggtttgagtttcgggtctttaatccatcataatcaggccatgattgccaagtaagcatggcgtgtcttctctactcaaaattcccttcttgctgttgttctcaaagccaagtatttcaaacatactggtgtccttgaggctagtcttgggcactccccctctttcacttggtctagtcttctttggggcagggatctccttaaaaaaggtttgatgtggaaggttgggaatggatgttctattcgaactctagaagattattggatccctaggtcacgatttcttaatttcaaagtcagtgatccgcctccttctgataaagtaagtttttttattgatgagaatggtcattggaatcgtgctaagcttgatcagtattttgaccatcacattgtttcttctatccttcaagtccctattagtggtcttaataaagaggaccatctcatatggaataaagacaccacatgcattttttctgtcaaatcgacctatcttctagcaaacactgtgtccctccctccttcttcctctaattcatctttcattaaaaagtggtggactacactttggaccctcaatcttcctcctaaagttaaatctttcgtttggaggtcttatcatcacatccttcctactgcccttaatctatttctcaagaaatttttcccaagcccttgttgctctctttgtcgttgtcctaatgatactatgactcatgccttgctagattgttccagtgctgccaagatttgaaaagcttctccacttagacacttctatgctacttacctacatgttgacatcaaagactttttactctctgatttttctcaactcaatagagaggaactaacacttttgttgaccattgtctgggcaatatggaactttagaaataaaaaactatttgcaaattataatatgtctcatgttgatgttattgactggattaactcttatctttcagattacaatgaagcccagctaaatatgaggaagcttatgttggaaattattttac

SEQ ID NO: 15281 - DNA, 9810 bp, Cannabis sativa
  modified_base (2464)..(2466): a, c, t, g, unknown or other
  modified_base (9437)..(9440): a, c, t, g, unknown or other
tcacaatccccccccttacggggtccgacggcctcgtcgaccacacttctggctgggtcaaggctttgataccataccgtactcgtgtacaagagccattaatcctaggtgtgaggacccaatggaggcttgaagcgaggacgttacattatcaaacctactagacctgagggagttgaacagaaagatgcgactcttagataaatttaagcgaccacatatccaatgctcctgaactttcatattaatcgagaaaataacgtgatcaaccaagggccatggagtagcacataacatcctttgccaataatatattgggccacagtatgatccgtgataaaacaaatatatcattttgcttagccatttgtgatgctaacactaaagaggcaatcatttgttataacctttaatttcgctgctttgcctacttaattttcttacgtatgtagtagaaaatgatattaatatgctgagaagtaaaagcaagaaaatattaaataaataacttaaaaacaacacaaaacaaaggtcaatttaataaacaagaaactaaaaaacaattgtaaaaacacttactgaagaagtaaaaaatttatcaagataactaagcttgtgaaaccacatcttattgtccacttcctcaacaccaaaatgaaagtgaggagaaaacttatcctggcccttcagataaacattagttgttttcctgaaaacaaaaatatatatatattaagatacaataaatctaaaaataataaaaaccaacaagaaactaatcaacaaaataaataattacattgatttcttggatctcagtccttgccctaagccaatattgtgtaatgatcgcatgattaaaatatagattagtagggtaattagcattaattatctttatcatatagttttatacgaatatttatgttgtcgactcattttttagaaataggaattagagttataatttctcaattccagaaattttattaaactctaagagtattatttatgctaaatatgaaatatgtaatttttatggttttttgtttggtgactatggaaaatgtgatagatggctaattttgtcacaagggttagcttagaaccctttttatttagtgggaaagtcctttgttaatatttagaatatcagaattaggcgggattatagttttggaccattttactcctagacctataggttgcttaagggtgaagcaatgggtaaaattggaaattttgcctaagagtttagttttggcttttagtgaaaatggtggaatttccctaagtttattatttgattttttatcatttgaatagaacaaatactatagtttaatcaatttatttcattaagttaaggaaaattaagaaaaaaaaactaaagtcttctcaccctaactctagctctctctttcggccctaagaagaaaacaaccagaattaagcattctttcatcttttctcaaggggttcaacaaggaatttaaaaggattagttagccaagagcaaggtaaaatcctagaatataactcctttaattttgatggcttttccttggttttaagcatcaaaatggagaattagattttgtatgttttggtttgagttataagctgttcgatagtttgaatttgggttgtggtagctagttttgggtttctcttgcagctgaaacatgtttggagaaagtttgagtttgagaactcaagctttgctctccaacggtgagttttatttcatgtggtttttgttgtgtttcagttgtgatatatgtttaatatgttatatgttgatgctctagaaaatttggtggtgattggggaagatttgagtaggttttggaggcttaaagtttgagaattttcatgttaaatctacctattcaaccaaaattccggttggttcagggctgttccaactggaattccggttggacagtatcggggaaggccaattttgtgtattttggccataactttttactcgggtgtctatttttgacgttctccatactgttttaaagcttatgaagagctctacaatatggcatataaattagatccaaattatgtattttattttagggtgtcttcaccacatagttctccatactgttttaaagcttatgaagagctctacgaagcactttctaagacatagctgcacatgaataaataagaaggtcaaaacaagtgtgatctaagtaaatgtaaataaaatttgaatacaagttaaagtaccctgcacgtggacatgagcattttcctaaacaagtaaagaaggagctccatcgtctaaagaatcctcttgttcctgctccaccaggaaggtttttccctttccaaccactagggcagatagttaagcaaccctttcagggtcatccttgatcctgatggaccgctcaacaggtacttggctccttggagaagtcttcctcttcttcttcttctnnntcttcttcttcttcttgctcgaagcctcctgtccaggcacagcctctcctgctgcctcgtcagcctttggtacaaaatcagccaaataaagcttgtacttgacaaagttggcatcagtggctagaagagagatatttcgttcattaggagagagttggagaatttttttgagccctcttcctgagttctggtgtgaacgggggagggctgtaggacaaaatctgctagaaactggtgtaagtggtgtccatccccttgacaaagtaatactcatctatgaagcctcctatcttcgtcacctcggtgtccgtggtgcccgtcaaccatgaactctcgatctgagagatgtagaagtaccccgaccagctctatttaggacttgacttcagatcgaaaaaccagttggtgtcatgggggatgtctcaccccatccttgtgaggcgtatagtacgaataggggagatagatacaagaggcccttgggagtaaactaagttgggctgatgtggtaataattggctatcttcttgaagtagggaagcaagggtagcattgcaccctgtttggtgtgagctctcaaccaagcacaataaccctctctagggtcagtagctagttgatccggggagggaaggaagcattcaacattccctaagagactatgcttaaacagattggtcattttcttcatggtcgccacagatggtggagaaatccatcgatctcctggtagacctctccttctcaaaggacgagcctttgtatactcctcaacaacatagttctagcgggcctccaagacatcgtttgctttcgacactgcctctccttcatcattatagccaccgaatggcagcacccgagctaccccttcttcctcttcaccttcagcatcacaaggagtagcaggacggacctcgccttggtcctcctcttcttggacttcaatatccctgatagtatcttcctcgtcaattgtagggagagttttttctaccttagccagagtggcacgacgagcaatgatcgtgttagttaatgaagattttctaacaatctgtttggtctgcgccatcatactacgcttgggcataattttatcaaaagtgtgtctagcaatggtcacagcaaaattggcaacaagttttccctcagtagcaaggttcgggtggcgctcgggcaaagtgttgaccaaattcggatgaatatgtacgtctagttataaggaaggtaaaacctctaatcattcttgagttcccagatgaaacaaccgtatccctcacctcaaatttggtcgggacagaaatgatgttgcacctcgggctccggggaaggtgtatgtttgctacttacttctcaatcttcaaagctagaatttgaaagatcgtcactagacgaaggtgggctagcatagagacgaggatggtcctcgtataaaagttgaagcaaatcttggacaacaatgtgtttgcctccccaaaactcatcagggttcatctacaaaaggtaggagacaagaaagtgagagttggtcggagtaatgaatgaaaaataggttgtatataccgaccaagttcgaatgagaaatcaaaagcaaaggtttcacccagaaatagaattttcaaacccaaaagttcaaaacttcgaattggaatctgatttttactaaaaccctatggacgagtagaaatgaacgttgtaaggttaaattcaaagcacagttagataatcagatgttatggttaaatataaatgagattttcaagtcctaaacctaggtattctatggttaacctagaacagttcaagaacatgcgagattcatagcaaaaatccaaaaattgggcatgcatttcattgcaaatatgtacaagaaagaaatgaagaataagctcactgatttgaagcgttcttcctccgctcagatggtatcgttagagggtttcttgtgaattccttgaaggacttgggaggaaatttggctaatgttttttttttgctctggtgtttaagagttaaaagggctaaaaggattgcctgagatccttaatcctatttataagcaatctgaaaagtgaattaattaattcaaaattcgaatttctcgaatttccccccaaaagtatacgttacatactaattagagggagtgtaaccgttaaacatgcgcaagcatcgaacgtaatttgaggtaaaaccgtcaattagcattaaatggatagaaattgaagagacctctagtcaggtcacatcgttgcgtcattcgacatccaggacacgcatcacccatccggagaagactctagtctcagtgaagtccacgtgcgactaggaaggtcccacgcagacttgggaaaaaaatattatcctattttttgtaccatgacgtggcaataggaatggatgacatgtgtcccatattttagatacctagacggaagaaaatatccctagcagcccataaatgactactcagcatctgtaacattcagacatccgagcagggtgattgaggagatttcctgccaagaggtggacatgtctatgccaagcgaagcatgagagataacgattctagagattaatctctttatgtccaaactcgaagacaattcttataattacgggattaagtcagagaataacggcaacacattctagttttctatttctcacattataattatagaattaatgtagttttctattttattcattataagaaaaagggaaaccaaccctcatgtattaagtccctataaatagtggtgtaacctcactatgaagggaatcgagagaattgcttcaaaaatatattttagagagaatgttactcagagattgattgtaagaactttcgagaagaagaacactttgtttccttccctcaagtcaatacaaatacaaagggagtaggctattaccataatgacggggccaaaactctttaaaatctagtgttcactttattttattatttttttctttcttttatttatcttatctaatcactttatttctaactcactatcgttggctagaagcgaggtcaacaaaaggcaaagattaaaaaaagttataataaaaaattataattaacatcttatatatttgtatataggtgactattcaatggttatatttttattgtaaccacgatggttacatttttttaacttgtaatagcgagttaccaataggtaaaaatttatttttttagaattaaattaattgcagttaattattttctcaaaataaataattttttatttgaatatttaacaagtctcagtttagaaattaatatttataaataattttatttttatatacaagtccatattataatttttttaaaagttaaattatttaattataatatttacaataattttttttttacaaaaattagacttcctcatatatcttaattcagaagttgtggtacagatgaataacagagaataattttcatctaaactaaatccacacatattttaatcgagaggggtggatgtaggaggactctcagaaactcatttctcattcaacacattatttttcgaaaatacattcaacccatttcacatttcatcacatgattccaaatgaatttttatttttaataataattttcaattatggttatatgtgtaataaaattttaaatcatgaggtcatatatgttataatttaaaattataagatgttttgctatagatattttataatttaagtgtaaaataaattaattgctaaataatcgttatttagtaacaaattacaaaaatttaattaataactataattaatttagttttcaaatatagttgattttaattaaagtttaataaaaaaataaactatcaagttagtatttagttagaagttatttattatttatttttattaaatttttaaatatatcacaacactaaaaataaatgtaatcagatacacctttaatgtaaccctttaaactaccttattagtatatataattgtctttaattttttttttttctcaatgtagttgtcttttactgaaatgacttcaaagaaagtatcttcatggaggggctttaataaaaaattatttccatatatagttgatttttttttctttttctttttttgctttgggaggggctttaatcaaaatcacatgttatttcttatctgtacgctctctcacatttaataattcaaaaataaaaatgtgattccattatctctccttataaattttcatcttttgggtagatttcatctgacatttggaatcccactgccttgtatgaatgggtcccataatttgaaatctttcatttatttgctgagaaaaaacaaatgttaataattttattgatatatataatatatatttttgaatgaaaagtaatttttatttaataacttttagcaaaaataatagacttgaaatcataaggagcatcatgtttactgaaagtacaatttgatattaaataagattctctagcaacataatgagcagttctattaacagatcgtttaatagaaactagagaaacattgtttaatgaagagagtaagcattcacaatcacgaacaagcaatccaaattgggaaggcatttcaattacacttttaatagcttgaacaacaaccaagacatcagtttcaaccaccacattagcctattgctttctcttaatctaacttaatgtttcctcgataccaattatctctgctatttcaggttgcaccgaacgaacacggttcacagaaatagcttcgataagatgaccagtagaatctcgggccacacaatcataaccaaacttactctccgtttgaaaaatagcgccatcaacattgaccttaaccgtatgcatcattagtttctttcagtgctcactaacattgttaatatcatcaattaacaatgcccttattttttgtgattgagcactaatccattagtcaagaactattctagctgaccgcaccacttctaatgcagagcaagttttaccattccacacaacatcattcctaacagcttagattttccaacttaccatcgtagcttctctcacgatatcattggactgtgaatcaagcaagttaaagaaccataagctgaaatcattaccaccgctactataaaattggctttttacaacggtttataacagtcatttatactatttgccaatggttcctaaaactgttggctatgtgggtgtcataaaaatgcggaactttaaaagacgatttataactgttgggaaaagtcaatttaaatgacggtttacagctgttggaaaaagtcacattaaatgattgtttataactgttggcaaaagtattatttaaatttaatttaatttctttttaatatatatttttaaaatattaaattataatagtattaatttttattaaaaaatataatattaattaaaataaatagaattaatatatttctaaatttaaatatcataattcattacagaatttattctaaaaattatatattataattcattaaaactataccaaaatcaaagattattacacaaaatacatatgatacaattcagaaaaaaaagaagataaaataagggagaaactagatcgaattataggctatagccgccacataccagatcgatgttgtggccatcataattccaacgagttgtgcacctccgatcctggagtaagagcaaaattgatgaacgcagtgagcaccgaagccttcagcttttgcctcaatgccatggtcaggcaaacaactcacacaaacctccttcaaatttgagaaaaaaaaaattacaaaatgcattaaaaaatcgaaggctgaagcacaatcgttcgaatctaccaaaaaaaaaaaacaaaaacatagtaaaatggaacggttcgtttgacgatcatcgttcggggaaatggccatcatcatgtactggcagtgccgccgcgcaagagaaaatgcagagagagagagagagaaagcgagaaggggagcgaaagagagataagagggagagggcttggggttttctggttcatttgaaccactagcgccggctgtggccgactttggtgttgcgcaagtgtcacaatccacttctaactagctcaaactaaatactaaaaacctagaatagtggggggaactacctgaaacatcaggtttgtcatcaagccgaggtctcttcagctctgtttcttcggatgcctcgccatcaggtgcgtcgtgctcggcatttgaattgacatgttcgtcggggttcagctcggtctattccggagctttgggatccagctcttccagcttccttttatgatccaacaatgcagtgctgaccgtcgccccgcacaaagagaaagcagagaaaggggatcgagagaatgaaagagagaagggattacgttttcccttagggttttttttcatcattttctatttatacctttcaattttccttacaaaatttattttattttaataaataaaaatttgatataattaaggccctcaaattaaaaattccaaatcctatataaaaataaaatgccacaatttttaattaaagacccaaattaattctccaatcacattttaattaaaaatgattgtctaatagtgttttagtccactaataatttttttttgaataactttcacaataaatttttaaatacaactaatttctaaaattatcctctaattgcaaatctataaatttcaaatttcccaattttataaattcacaaattataaatttattaagcaaattttttttttttttttatttttttatttttaaatctgaaactattttttttagtattttattttatggaaattttatttacaccccgaaaatttctaaagacaccccattttaataatttttattttatataaaatttatgtcattaattgtactaggttttttaacttttttcttccaatnnnnattcttaaaaaatatacttatcaattaaaaataaattatattttaaattttatgataaaaagtaaaaataaaaaattatatgaaattttcttagaaaaaagtaaaaaaaaaaaaaatacatgatttacaaaaaattattaaaatataatcaaaataagtattgaaattaacataaaataatgtgtggaaaaaaatttgcaaaaaaatattaagagtatttttaaaaattattcaagtttatttcttttaataacagggtgtatttatcattttatggagggcaaataaaactccccttatattattaaatactaattttttttattatgcaaaaaaaaagtacaaattcttacttttttttttttttttt

SEQ ID NO: 15282 - DNA, 7871 bp, Cannabis sativa
atctagtcaaacaaacaagtttttcacatccatccgaagagcatgcacaattaatctatgagtaacacagattggaaacactttaatctggataataaacttgcaaaaacctctaacaatgatcttaaaatcattagagtaaggagcctgtagtaaaaacaatcacagttgtaaatgattaataagattaatgtattaataacacattaaattgggatacaattatgacaagattaaccaattaatagcaatgcttacttaattagtatacaaatttattaccatacgtataatttgtacataaaaatgaggagaatatgtttctcataatagtttaaaaaaatttataattttttttaaataaatttttttacacatataatgtaataaagttttataatatatattgttataaattttccttttttttttttatcatgtcatgtttttcggacacgtatcgatttcgtgtcgtgccgaaaagtccggccagaatgtacaactctaggcaggatctaaaaactttaactttagtgcaggagtcatacttcattctactagttgaattttaaacttggtgggcactattttcaatcccttcatattttagttatagcagtttgaaagtactctatatatttgacaatttttctttttcaagattggatgatagatatagtataatgttgatgaatgacctgtcaccattttgaaacagatggagtgctttctgttacctcaacaattttttttgggttcaaatctttgcaatgatagggatcaggttgttgcttttgcattataactggtttgcaatggcttagaggaaagcctttctagtcttattcaatatgatactgtagtttatttttcatgaagttgctttccaaaatgttgatctttttgattgatttgcagctaggtaaacaactgcaagtaaagtcacatttttagagcataatgaactaatttttgtttctaaacatggcgattaattcatcaatgtatttaatttggagatgtttatttgctacgctaattagtttgaaaacataaaattcaaagcaatataactttcttgttattaattgaaactgcataattttagtttgtgtattttattattggtgaaattttgctccatttttgggttttttaaacttatgatattttttacttattttttttttagaaaaaaaaaaaaaaaaaatcttttacggcatatgggcaggaaagcatttttttttcaggtgttataaaaaagtcacttttgaagaaagtagttcaatcaagcatacagtcaatttttggaaacatcacttaagtcactctacctaaatcaggaaatattacaaataagatagctcaattactcaacatctaacagcttgaaaaaagtggaaaataaacacttcgggacagaaccggtggtggaggtggtggcaggcagttggagaatttcaactaactaaacaaaagttcaaagaaaatactaaaatacaagtgcaccatcctaccctccaagatttccctcctaacaatacctgctcactaaactgtttttagtgcttgcttaccaatccctaccattgtcttcattcatctcctttattactttaaccccatttctttcatctcttatcttaacgtattgcatttccattttgtagtagccatggccaagatcaagaggcttggcctgattatattgaggcttgctgcattcgctgctaccctttccgccaccattgtcatggctacaagccatgagaaggccagcttcttaaccatctcttttgaggccaaatactcacaaacacctgcctttaagtaagaattctaagcatatcttcaaatcttattaatggctagatagctacttttttctttattatttatttgtttgctaacaacactggtttataggtacttcatgattgcaaatgccattgtcagtgtttatgggtttctggttattttcctcccttcagaaagtttgctttggcgtctagtaattgccatggatttggtaaagttgccatcacctgccttttcacttcaaattgtgttatactagaaacattctataatttaattgttgtgatgaatcaatatcctaattgaagaacttttagatgttctcacaaacttcatgcagcataataagatgggtttgatagctagagagaatcccaaatactgtgattaatgtttagatttataaccccttgatgaactttcaaatttaaaatcaaaataaaaagttctacaacttactgtttaaattttattcattcggtcaggtttttgcgatgttgctcagctcaagcatttcagcagctttagcgatagcttatgtgggaaagaaaggaaacacttacgcaggttggctgccgatatgtagccaagttcaaaactattgcgaccacgtaaaaggagctctagttgctggttttattggagtaatactttactttctgcttcttatgcatgctctgcacaccgccttagatccctttctcctgaaaaagacttagtttcttcttcacaccaatctatgagtacattacgtgaaacttgtattgattttaatactctagaggaaaaaaaaatcatatagtatactacagtgtatccatacaagcaagtagcaacagtagagaattcatgcttataagatatagaataattgtgtcttttctccttcattctagagtttctagttcaacatgtgtaagaaaaactacagttatgcaacttttgaaagcaaatgttttgttttaaggttgacgccagaagctttgcaactcaattatataaatcttcttctgttgacttgtgacattttaatcttcaccttttgggcacaaatgaaatgaggacaattagtcctgtccagtccacctctactatttcagataaaaatatgatataatagaaactttgttattgcagcatgagaaaaaaacaaaggtgacaaaactttgaaatcctcctcaaaatgactcaagccccataccaaattagttgaggtatgccctacctctttcaatgtttttggaaaacctaaagtagacactaatataagaaagatgtgaacatggttaagcaaaacatgcctgttaatggagggagaataaaattgaaaaatagagttcatctctaatcttaccaccaaacacaagatggtgcaaaccaaaaacttgtcctgaactatcaaaaccaacagaagcaaaagaaaaaacaataataagtgaatcttacattagtacagagagaatatgaaagcccatgtaactcttcgaagattcagattattccatcatttgattttccttgtatcatctttagtagttcccaactgagtgaaaacaggagagtacctgtgattgcgaataactgaaacaagaaggtatgtatttgcagccagaaagaagatactggccatccatagttgaagaaaaacattcttccccttaaactcaagcaaatacccccacatcaaccaatgaagctgagctcctacccatatgattatgcatgaaaggcctttccatttaagtcttatgctgctccaaggcagcaacagtggcaacagacagaagaaccatacaaagtactgtgctgtaatcacctgttaacagtcagatggagtattagaccttatggttgatgacagccttgttcttgcaattcagtagaaattaagccttgtaaaataaataaataattgattgatgatgatgatgattagactaaccttattaaatgccacaaatgccacagtctgtacaaagaagcaaaacgggaggtcttcagcaaaacttgaaataagtacaagctgaactaaaaactgaggcaaaaatgagatgagcttctctgctatcatgagctcacggtcatactgaaggtagatgtggtaaaaataaacagaaaagttgtgccttggatctgtacgggtaagatgatatagcagggcctcatgcagaaaatcccacccatacaaacaaaagaaaaaagccgtacaggaaaagaacacagaccccgaaattaagccaaaaagtattctctccttcgttagtacacttttcataaggaaccacggatgtatcaaatgagccattcttgtaatacatgattgttgagatgacttctgttcaatatgactccagctttgaagagcaggccgacgaccagattgaaaggcttgtgggtcaagaatcagaagaatgggaagtgcgtatataatggggtagattctaaagtgaacaactaggccataccaaagtgcagcttgaaaaacacgtcctgttgcaaaaagggagacaaaccatagggagtaagatagatgttggtgaaaatgcatcagtcatcattagaaacagtgctatttacagaactagctatttgctaatgctgacgggatgctaaggacatgtcattttctcaatcaaacagtaaatattgtaataaccagatgttaagactacactatggaatagttagtcatgcatataatttgtatcacagagaaaaataatgcatagtcataaaacataacaaactacataactctttctactcaaatacaagaaaaacttcaaattggaaatttgaacaaatattgaatacattgtctaatatcataactgtaatcctaggtcatgtgtgaagagaaacggagaaatagattggatttgataagtttatctaatattattttgttggtgtgatttagtaaataaattagaaacattaatccaaccacctaaataatccacctagcaataatcccactgagaaactttgaataattctatactacaaaattagtattgttcttttatcaatttactcatttagtttttgtttcttctctaatttttcttaagccaattcagtaagagatactaaaattttgttccccgcaaccaaaatccctatgtatatatagcatacaattgtggaccaacttcaactcttaaaatctctcctttcccatatttcaacgttctttctagtgttgttttttgattcacacttactatcctacaaacggtatagcatgtatagagaaacaaaaacaaagtaacaagagtgaaacttacaccgttcatgagacatataatgatccaaagaatcatggcgcagacaatcggctcacagtttccacgagtcccaatagtaaaggtgaaagggttaaagagccaagaaaccacagaaacaatacatagattctcaggcaccccacgcatcttcaaaatagtacgtatgaagaaacccacaagcaaatctgcccaaaaaaaaaatcatattatcagtgaaaaataaatgtatctcttagtgaagatattctctggaaataaatgcataaaaaagaagaaaaagaaaacgacatttctagttagtatacctgaagctgagaagatgaattttccccatgaccgatggataaaagaattgggcgtcagcaaaaaagcgagcaaaggggagtatctataagtggatctctgaaagggagagttcccagatgccattagagaagcagcatctgagaagacgaagtaatcaacatctgtgtacctaacctccatgtgtgtatcttgccattctccatataagattagaataatcctaaatattgctgagacaatgatgagcgtggtaaagctcacgaaggccattggtctgaatgagactggtaaaaccctagttagtgtatttgttccataacccaaaattcacgacttgtgtgtttggtccacattgtggaccaaacttgcacaatgtgatgctagtattgcttgtattacattatactaagtttagtctacaataatattagttaaagaaacaatataaatatattcaaaccatataatatgtgatgctaaccaaaaccgtaccacaatacatacccattcttatttcgatccaatcaacttcaaataagtaaatatatcataaatatatcctcattctaaccccaatcaacatcaaaattgtcagaaagtataaaaactagtgttgtaaatataggctgtgttttttgacacggcacgaaacaggcacaagcctaggaggcacgagcacaatcaggcacaaaaaatatatggtttggacgcaacacgtcgacaatgttacaaattgccacaacacgacacgaaaagcgcaattgatgaactccactctgttgtagcctccttcccctatttaagtgtcactgctgacgtaagggctcatcgctcttgtctacaaaagctagttcacaaactagagcaagatgatcgcttccccatttcttactagggagtcctccagttcttttcaagatatcaatgggcaaggtttcaagaactttgacaggaacaaattcctcggtatgccaaatatagtcaacagtgcccataaacttggagtggtaggatgttgctaggggttctccataattatcccttgttctacaacttccagaagcaccaagatatgcactgcaaagctttaaatggtgcttgagatgagtggtcacttcactgcctgtagcaagccttaattcttcttcactccatctatgtgacacgggtaagctgcttatcttcacatttgaaggcctgaaggatttgcattttgaattagcttcgatttgtcctgagattttacagcgatcataaagtcgaatgtccagcttcgatgatgccaagaattggtatataggactctgtggaatgctatttagatctccacaaagtataacagggatgcagccccattcacgtgatagcttggatgctttttcaataagtagtctcacctggcctagcttgatgtccccacgtttcggattgaaaagcacgtgtatatttcctatcacgaaggttcggttttggaaaggttgaatgattgattgggtatcagcatctaactttggcatatgttcgttcatctttagaacacaaagttgggcaacattgttgcgaagaccataatcttgatactctatactctcatgatgcaaaagagaaaataattcttctttccaaaatatagcgcatccatcaaaagcttcaccagtccgtgccttgtaaacacccttaaatccatctttttgaaaaagatcttttaactcagtaaagcgatcaacctcctgaaggcataggatgcttgcattgtactgcttgatctccttgcaaacaagtgtcttccgcctgtcccacttcagatactttggtgatacattacaatacaggtcttcatgattggatgcattttcaacacctaatatgttataagaaacaatcacaaccttatctctataagatgaagaatcacgcgaagagaaaacccattttctagagttcatcgtactactcgactccagtatagactgcttcttgcgccgccgatgagatcggcaaatggcattgtaactattaaacccgactaagcatcgaggtggatcaggattcaaagcgatggtttgtgcttctggtgataaggtgcttttatttttgtgatggctatggaatcgttttgatgaatggcggcatttagaaagaggaacaacatgtgcgtgctccgacagtggttgtaatcgtttaggtggtttcatggtgcataaactgctgggtaaactgcagggaagtttaccagcaaaaatataaataaaacgcttggaagaatctgcaattaatttatttgtagtatgtaagcagtcaagtgcacacaaaatctaatatgatccaagtaacagcaagcatcctaatttagtcattgcacacacacatcttatcttacctatataacaaatacctatctaacagaatttcttgtggtttaacaaaatacctttaaaaacttagttttaaagatgc

SEQ ID NO: 15283 - DNA, 9098 bp, Cannabis sativa
  modified_base (2467)..(2494): a, c, t, g, unknown or other
  modified_base (7943)..(7943): a, c, t, g, unknown or other
  modified_base (9064)..(9065): a, c, t, g, unknown or other
ctgatgactcatgatgcgaaagctgaattcgctaagtgctgagtgctttgcacggctcgctgaatatctcattctggatgtgccaacgaggcatcctgctcagtctatcctcccgagcagatgctccaagtagagaaggtttaagaaatttaaagaatcttactaaaaatacgctacagtaaatgctttaaactctgttattttaaatttttttgagaatatattattttgttctatatttatagaatactatttattgctttaaatatattttattaatttttttgaattttaataattatttttgtgtgagtatgtatatatattaatgttatatatttaaaataataaaattttaacaaaataaaattttagtgatatatttcaacaaaattaatacaaaattaatatatagtgtaatataaaaatatgcttaaaacagaaaaaaaaaaaaaaaaaattaataatatattttaagaatagattagattagttgttgggttgggtgctcttagcaatattttttcatgtcaatctcaacatcctttatacttaaattttgtttacattgactttctttcagcactttcgaggtcttctgctttttgtttcttcttcttgcatattcactctcttggtgggcaacaatatatttatatgcatttaattatgtattttttatattaaaataatttaaccgtaaatatgtaattttaatttttgaatataaataaatatttaaattatatttaaaatttttgttagtatttaaaagttaaatatgttattatttatgtgttattaattattgatatttttaaataaaaaaataaaaatttaatgatctgtatcaattaaagattattacgtagacattaactcgacccttaactactgacattatttactgaattctgaaaatataacttacaataccgtctctgtatttatgagaaaagttattaaagtatatgtaaactatctacctcaacgtgataatgcaatatgcttgtttttaggtaaagtaatcgtaccaactcttgaacaaacatgtggactaagattcgatttgtattgaccatgacaagattgaacaagtcaccacttaaaagagaaagaaatatcactagcatcgttaaaatcagctattaatgatcaagtttaccataatgtagtataaagaatttaattaatcaggcttaatcaaaaagatgaaccaatgccatgtccttcactcattatttcaactgtagtactctacagtatatgcatgagtgacaatgtaaaacaaaaccctgtatcttgacactatgttcctctttttaatggtggagctctacttttgctcatcatttaatcaaagccacgaactagattttttctttttttctctttttaacttcttttgatgtaaatgtcaaagcccgccatagctaaagcttcaaagttggtatagctttctatgacaagcgactggtcaaaaaaaaaaacaaaaaacattatcacctttatgagcactatgtcctttaatttatatggtatagacgtgtaaaaaaaatcagcatattctacttgtatcgcagctgtttctagttgtatcacacacgaatatcaggaaaacacgaaatgggattctggattgaaattagatagacctgtgaaaccccaatttgctcctttaaacgccagatttggtgcaccttttcaagggaaaaacaaaaacccatctgcggtgagtagtcctaatccgtctgagtgggttatctgtttgtttataatccaagtttatgctctttctattaaagtcttttggccgtttctttgttttggggcttttctatgaccaattgtcaatattccatgttggcttatgctgtaattaatgctggttcagtgaatctctaggtgtggtgtgggggctagctagtaccaattttcgttatgttattatgcatgaaataaagtggcggggttctcatttgaagccattcaagctcatggaagcaggtgtttctaggcataagcgctctaaaaggtatcttttttcgcgcttaactttctacactttttttggtgtggctggtctttgaacgagaaaacaaaagaagggagaaaacgaaagatctaaagaacaaagactgcctcaatgaatatattggtttcaataattgggaggttcttaccaagtttttatcttaatctcttgtcttgtgagacatgctccaggattttcctctctgtaaagtatgtaaaacattttactctttaatgatttcatttgtgttgttattttcagtgacactgatccatttaaaagaaactcaaagtgggacaaaatgaataccatcctggaagctccttcccaagtcaagatggtaatatattcgttacattttgggcacctttaatatcccattgccatttgtattaaaacaaagacagtaagtgtgtgtgtgtgtgtgtgtgnnnnnnnnnnnnnnnnnnnnnnnnnnnnagagagagagagagagagagtattctttatgtataaatttttttatgtcgtttaatgcgttaattatggaaacttgtaaagaaacattttttttcacatgtttttatttgttaatgcctaggaaaatcttaaaatatgtgcaaccatattaattacatatgggttaaatgagctctcttaaaaaggaatgaaaccatattcttgatcatttacaagtctggtctggtactgtgactactgtccagtgaccatttctccttaccggtattcttttttgcttttatagaaggagatggtaattacagaagactctgctgaagctaggaagatgcaaccctcaaaaccaatggtccagagctctttaaatcaggaggtaataatattaatcctagctttaaagagataattgccaagcttgtgaaagtattgcctttaatagtttgtgaagaagaagcttatgataagtgataatttgcaagatgtactgttttcattcttgttctctgtgaaatgttgatttcataaaatgatactgtctactagtttatggctctagtcccttgcattcatggtaaagaatgtggtaatgtagttaggggaaattgaattcttttctcaatccgaaatctggtgttattttcgttctgcgtcattatggtaaatatcaggtctcaaatctttatcctctctttaggttctgaagctacagaggcaattagaggaccagttagctgtacgtcatgcactggaaaatgcattaagttatcagccattgtcacatgaagcagcaactgatgaatcaataccaaaggtaaccatcaattatactctacaatgtgatagtactaatttgaatgttctttctcttattccttctgtgtgtacagtcgaatttctatggtattacaaccccgttgtagttcttctattatttgatggatcaagaaaaaaataacttagtgtttttattgcttcacttttttagtcttgtatgttcctgggctaatagttgatattcctttgtttgacatcagcctaccaaggatctaataaaggaaatcacagtgctagaactggaaattcagtatttggaacgacatcttctctcattgtacaggaaaacatttgatcaaaaagtgttgtcagtgtcgacggtgaatggaagacttaattcagttttaagcacagaaaaagggatatcttcagaagcttcttcacaagatattataccccaaaaagaaacttctgtcatttactctgggagttcagtttctcctcggttttctcttggcaattcccaggaatgtgtggatgcatgggaaccagagaaactgctggattcaagtatccatcggagtcactcctcactatctcagcgttcagcttgttcatttagagcatcaccgaggaaatttctaaataaggctgtagattcataccactctttacctttgtctatgttggaggtgatttcacaccagaaattcaactaaataacatgttttagctataattactgagagtagtaccttaattggtgaatatgcaatttttccttattttttgtacagcaagctgagaatgcatccccaaatgctaatctggcagagcatttagatacctgtttcagtgatcatgttccagagacaccaaactgtctctcagaggagatgattaggtgtatctcagccatatactgtgaacttgcagacccacctttgatcactcaagattacacttcctctcctcctgttacattctcctcttcaatatatgaggcctctttacaaaatcagaatgaaaagtggagctcgttgagtaaaaagttaccatttttcaattcacatcacgataaccactttcactttgaggggccagaaggacccggtggcccttactgcagaatgcttaaggttcagtggatctgtagagatgctgagaaactaaaagatgttgagcatatgctaaagaaattcaggttcgcaatctaattgttcgaaacctcagttcttttgtttcagagtgacatttcctacacttgattgatgttacaccaatgttgctgctagttgagatctaaaatggggatactggaatttctgcaagtgtgattttcttgtaatttaagttggagattccccatgacttttgtaaatctgttccttgcttttcttcattgtttcatacatttcttgcaaatctttgaagttggaattatttcttggcagatcccttgtctatcagctggaagacatcgatatcagaaagatgaaacatgaggagaagctagcattttggattaatgttcataactcactagtaatgcatgtaaatatctaaaaccaccaatttaattgttgatttgttgtttctatatcacacttttagtaactgattaatacttctgtttgatttcaattattttgaaggcatatttggtttatgggataccacaaaatagtcttaaaagagtttctttactactaaaggtaaacaaattttctcaaataaagtttgaagaagagaaaaggtaaagaatagaaactgcttattacttatggtctgtgtttgattcaggctgcatacaatgtgggaggtcataccattagtgttgatttaattcagagttctatgttgggatgccgattgcctcgacctggacaagtaagcttcattttcatttctagatagactgaaccttattgttttccgaaagtttcttgtactggatctaatgaatggtactttgtggtttatatcctgtaattctctatgctagttcgtactttttgttatggcttaactagctcactactatctccagtggttgaggctactgttttcttcaaaaacaaaattcaaggttggagacgctcgaaaagcttttgccattgagcatcctgaacctcttttacattttggactatgctcaggaagccagtctgaccctgcggtaactgtctttcgtaacatacattatgcctcttttttctacttgaagataaaaaattatttgttatttttattgaatttgtttgatgagttgtttttccttagttgtcttcttttctgctctgagtatatttcaagaaaatgaaagaaagtattagataagatactcccaagaggcttgctaaggaatcaggaatcttatcatcaagtgatttacattagagtacatataagcaattactttccttcactaacttttaattacgagtgttaaaattggtccataacaggagcctgctggaagaactttccatttcatagcttttctttaggcacttgttaccaagatctatctcaaagttactgttccttgtgttaggtccgtgtgtacacaccaaagagagtgtttgaggagctggagatggcaaaggaagagtacattcaatcaactttcgttatgcagaaagagcacaaaatccttctccctaagcttgtggagtcttttgcaaaggattcaggcttatctccagcagatttggtagagatggtcgaacattttgtacctgattctcgaagaaagactattcatcatcactgtcagcacaaaaaattctggaagggcattgaatggattcctcacaacttcactttccattatttgctttccaaagaagtggcttggtgatcaaatccttcttgtatgagtgccaagaatgatcctctacttgtactttggccactcacttttgtgtcatggcgggggttaaacatatagttaagctcaaaatgagtgaatgacagatgaatcactactagacctttcattgttggcaccagaaggatgatcaaactggctcaagatggttaagtttagaaaaaaaaaaaaaaaaaaaccttgaaatggaaatgaattcaaattgggtaaagatgatattggaaaaagaaaaaaggaagaaagagagagtctagcattcacttgtaaatcaagtcatgagtttttctcaatttaaagcttgagcttgtttggtcatgaatcctggttctgattcttctgtcattcacattcaaagacagttgataaaggaaaatactgttatatatatagaacggccatgaagtttatgtaatatatattcagctggttttgacatggtattattactaaagatccatgtagtgatgtggaaatgctaatgtgttgtcacttgtcgaaatcattattataaattggggtttcattcgcattgctacaagtcaccataggatctcaacactgcgaactttgatatgaattatgagcacttaaatttaatcattttaatattttaaattataattttcttttggtgatttgttttaaatatcattaatagggtctgattttcactcacgacaacactacttcaaatgaattacgagcacattaattagattatatcaatattttaaaatagagattacaacctcttagtcaatctttgtgctcgaaaattcatgttgaaatattttttttcaattttttttatggcagtattcattatgattacagttttatatttgtaaatttttgaaaaatttcgaatggtttaagtgctgaaaatacgtctgaagttttttgaacacgcgtaataaactagaatattagaaattttgtttttgtcattgtaaactattcgaaattttttaaaaatttacaatgatgatattaaaactataacaaatatcgctataaaaaaattaaaaaaaaatattttaacatgtaatttcgatcgtggaagttgacaaaaaaaatataataatagattgtaattagattgatcttcaaattattataataaatatgatatgtcacttcaaaactcttgaacactataattgtttgggtaagtcagaaagatgctaatggcatgtggcatactattattgttatattttaatattgggtctcacacattttaattttttgttggcaaaaaataaaatgtcattaataaatcgtgtattttaatcttatatttttattatatattttaaaatcatcaaataactatcattaaaatttattatagtcacttaaataaaattttaaatatatatttaaaaaattaataaacaccgttcataatcaataatcataaatgattaaactatatatatatatatagaatacttttcaatgggtattacccattaatgggtactaaataaatttaactatgaatattaatttaaaaatattaaaccattaaattttggtccgataacgaataataaaagagaaatttgaatttctatgcttaatttagttacttaattaaagaaaatatcaaaaaatacttctttttacactaaattaaaacatgtttatatgaaaaatatttaagtcaaagtcaacttttttatcactttttttgccgaaaaacttttttttttttattttttttttcagctgatgaaccaatccaaacccatgtaatgtaaaaatgagaaatttttntaattaaatagaaaaattaatcataaaaactcaaaattttctaatattatccattcatgggtaatacccattaagagtgtagaataaataaaatacttatattaaaatcttaaagttaaaatacaataaacaatagtgatacagacatttccaccaagaacatttagtatttgcaaaaataaatttatgaataagtgtgcaaaaatcatgagatcaacaaataaaattaagtatctcaaattacacaatttggcaagacaatgaaaggagaaagcataagtcaaatttatgtggtctattttggaataaaatttatgacttaagggcatgattgtcatgattttaatatgtgcataccataaggacaatttctattttgatgagaggccaaatagaaatagtcaataaatattactaacagttttatttgttggtaatataaacgataatgattcccaatttgtatcgtatcttttcactcttgtatccccatcataaagagaaaaagtttcagagaaaatttttgatgcaaattggaagatcaaaccatttaaaggtcgattctatggacaccggtacgcttccgctaatttatattctattgtttgattctcatgaattaattagggctaatttaaaatttacagtgtttttaacacaatagtgaatagtaaaagagaaatttaaatttatatgcttaaattagctacttaattaaagaaaatattaaaaaaaatacctctttttatagtatactaaaaaatatatttatatgaaacatatttaagtcaaacaacttttttttttatcattttttttgctgaaaaacttttttttattattttttttcagctgatgaaacaaccccagcccgtataatataaaaataaaaaaaaatttctaattaaataaaaaaattaatcataaaaatttaattttcttataatattactgattcatgtataataccgtgtaccatatgataaaggctgcgcacatctatatatggatagattattaattgatgatatattgattagaaaggaaaatttaattttatatactgaaaaaactttaatattttattcttaaaccaatacatttcaaactaaaaaaatatnngacacttttatctaaaacccaaaaatacccctc

SEQ ID NO: 15284 - DNA, 6504 bp, Cannabis sativa
  modified_base (5387)..(5387): a, c, t, g, unknown or other
aaaaaaaaaaaaaaaaagcaaatgggatttgaaaagaaataaaaaacatgaagaggtgcatacctgatatgaatagtgggtatgaacatcaatggaagacataaaacatgactgtgtaggatgagtctgcaaaatgaatgagaaataattgatcaggacaagacaagggttacataatgcaagagtatctgacactaatataaaaacgatgtacatcctaaaccagagatgctaataaagaacattgcttggttaaataccagaacatgaagacacacactacttttcaagtggcagacaagatgaatttccagcaaaaaacaacatatttagacaaaatactagaatagactagctgctggctcaatggtcatcatatgctccaaggtttccttataagtagggggtcttctataaaaagttttggattctaatggattaccgcatctaggaaatatttataacttttttactgataaagataaattaaagcataaagagcatcagaaaacaggaaagggaaaaataaaaagtctacttttggaaacatttcaacgtatgacacttacatgaatccaaccaagtgggaaaagtgatcgcttatcctgaacctcaaatatttcctcctcatttgttgtctgacactgatcagaaatacaatttaacgagtcatatattttgttgagtaaaataacaaaaacattaaatggtgtctgcagaaagtactaagaaaaatttgccatacagaatctgatgtcgattcttgtttaggaatgatgagagctgtaacataaaattttctgtttttctgcaaataatgaattttgatatattagttagagaatataaaatgtaagcaaaggtttatacaataattgcacaaatttaaacaatatgaagctgaaattagctccattgtaagcaaatgttttgaacacttacaagtgaaccagcaaggacaccacaagtttccaagtttctatcagtatttgacttagccagcttcataaagttctccatcattgttgtggactgaaaaagaataaaatcatccttgtcacgcacatatcactttttgtcttgtactagcagctttctatttattatagaattatacttgtaccaccatatgcaataacacccatgaaaagaccactaataattaaaaagatacttcagaatctcacaatgtgtaattgtaggggtgtttcagcgcgaattaattcatctgtcataagtgaatctactccagagtcaacttcagaaacttgaggtgagacagctggaatcaaatcttgtacttcagcaagtacaggtggcggagaaggctgcctgataatttctacatgtgcaggagcttcttgtgtttcaaatgaaattagggaatcctcatcttgactcgtcttctgaacatcactactctgtgtatgaaataactccacgagtagtctttcatgttctgattggttattgtttttgttaactgtgggctcctgttctacaggttgttggctggcctcccaggaatcagaaaggtaaatcaaaatagcaaaatcagtatcaaatcatggaaacaaaattagtttgtgtgtttttgtaggcttagattaatatgcatccatgttactcaagcaaactaacttgagttccatattaaaagaagatgttggacagaattttagtaccaaaccttaggatttcgacaggactcaggtctatcatgcttggataccgaatctacattcatagggaaaaagttaacttaaattttgcatcaaactaaaagatatagttaaatatcatcatacccctttgtcagttataggaggttgccaccgcccattaagcccatttggtcctaaaatagaatgccttgagagtgtttcatctgttgggcgtggtctaagagatctacaagaagtaacaaagtaaatatgtcattcatgtatacaactccaatcatttggtaagtctaacaggatgcatttcttaacagtaaattttcagcctaaatgtcgcaggctgcaaacctaaataaataaacagaaaaaattattaacactaactgctcttccaaggcaatatttttatccacaaaccaccttcctcaatctttcataatgaaaaattcacacgaaaatgcttaaggctatgttagtgacgaaaaaaaaaggaaaatgtaagaaagaaaaagtgtagaaaataaaaaataaataaaaaaaaaaaacacagacacacacgtaaattttcatctttgatatggaaaaatttgttgaatcaagtttttttccataccatttttcattcaataccaaatatgagaattatttttttgtttccacttgtttttttcctacatttttctttcctcactaaaataaacttccaaacatagcctaaaagtcaaactcaaaacatattttgatacatcagtacaaagtagaaatatgttaattgtccattcatgaaacagacgattaaaaatgcaattggagcgcctcgatttgaccatcatagtagttaggaaattatcacataagtgtgtcaagaatcaagaaaatgcatgaatattgttggttggcttacgcattcaagcctctatagatttaaaaggtgagccaaaagaaagatcaaaagcatacaatttccgaaatcgttcttccatggaattaggatgagaaaactgctgaggccttgaattacgatgtacagggccttggacagttgatcttgctaactgtaacattaagaatagtgtcaggaagcagaatttactctaaatcatagaataagactatacctctaaaagcacgaccccacggagaacccttttaactaccatttgtgtttgatgaagcaaaccaagtaaattgaatcactaaaacactttcaactaaatgattatagcacaagcggtaccttggttacatcatgtgcggtcaaagtttggtttttgatagaaggccactccagaaaacccttttgattatgatgggtccgcccattggtttgatatgcgtactttctgttcagttcattgatcttctcttgcactgctggttttaacttctccagctcactcaaagcattcaataaattctacaagaaattaaaattaactgacatacctgataccttaagttttacaaaagtgcttttccataaactaactatgagtatattacctttctcaagtaatctcttttgcttttaccagatgcattataatctcgatggcatggtattgtttcagagaccaagctacagcataaaaaacgcaaataatgtaagcttaagtaagggaaaaaggacaccaatctaactttcaccctgttccacaccaagccagtagcacatgtgattgacgggttatatcacaaaatcaaagagggaccttctcaattgattgacatgtaccttgagaaccttagaagcataacatacagatcgatgatattcttttcttgtcgaaagatgttggcctacaatacaagcatattaggaactaacagtcatctataatacacataataaaaatggagaatcagaaaacaaaaaaaaaaaaagctcatcataaattagttgatacatgcatgcgctgttctgtctgcttgtcaatttactaattataaaaataataaagtcataaaaagactattaaaaacaaaaaaaattacaataaaagtgcacttctgggctcaaaactaaataataagccactctaagtaatgatgtgcatatatggtaggagtacccttgaatgattaaaactgtaagtccactattaataccacactgatcttgtgcatttgaagacttattatcctaaaacagtacagatatgcatcattaaatcatactggatcatgcatgtgttaaaaaaaagaaaaaaaaaaacaagaaaaaagaaacatagtttggaacttccagatagacatagaggcattacagatactcattccaagataaactaattcctctttttatacgaacttcaagacaaacaattcaagcatattacgatgaatgtcccgaaaaaattcatctccagtcttcaagaccataggtctaactactagccatattccttaaagatggaaagtaaccacattaacttcagatagggtctcaactttctaattttaatagtactacagcatgcttacaaaattaccttcaagatcatttacaagtacaggaagagtataagactgtcttattggttttacaatagccaaataaaatctaaccattgccgctgtcaatgttataacaaacaataatctccaaactagaagttaatggctactacttacattattcagaccaacgcatgtcagttgatcggcaaagcagatgcccagcataatgaagcacttaattcagagtcaataagcacatcaaaaacctccctcagtttaagaatagcatacacaactatactcttttctcctaaaaattgttctttcatgttcaccaaaagaatccaacaaccctatattggtaattgttggaattaaactcatgtaatctgtcacagtcagtaggtacatttttctcttattagatgaatctggagaaagttgttcttagttataacaattggttttatcatcaacttaaagtgagtcccaccaatagttataaataggtgtgcctctattctcaaagtgatctccaatctcccagtctcataatttagattcagaaacaagtttagagcgagagagaaagtccaagatcatagtgagtgtttgtggagattgtgagacatttcttcgtaataatttactatgttgagttgtcatcttgggcttattcaattgtgtactactgactattcttaatcaataaagatccatcattcattcattctcaagctaagtttattcttgtctaatttcatctaagttctagttttaactttgtgattggttctggtttgaattgtgttttcttgaacattgttactgctgtaacaatcagttttgagggtgatcattcaccacaaatggtatcagagctcagagtttagagttcaagaatcacattcaaccaatcaagattcatcttcaacatttcaagaatcaaactcgaactttcaagaacttggtttgaatggctacagcaaggtttgtggtggacaagttcacttgttccaatgatttcaacctatggagaatcaaaatgaagacttttcttgttcagatctatgaagcactattgattgaagacaggaagagaaaacttagaattgaagccaaggcacatagtgccatcctccttagtcttggtgataaagttttgagggaagtttcagatgaagacaaggccttgagtctctggaacaagttggcttcaatctacatgaagaaatctcttgcaanaagttgtatctcaagaagaagttgtacacacttcaaatggatgagtcaaaggaattgagaaagcatctagttgattataacaaaatcattcttaatttaaataatcttggggtgaaaattgatgatgaagaccaggttggtaatcctgttaagttcacttgccaagatgtatgagtactttgttgatataatcttgtatggcgaagaaactctgaccatgacaaaggataaggctgcattgaatcaaaagaaaggagatgagaaagatgacaccaatggagaaggattactcattgttaagggaaaattccccaagagggaatacaagggaaatcaatactcaaatggctacaaaggtaaccattcaagatccaattctagaaactccacaggagggctaagctctaatggagctgcaggaaagcaattattgcaagaaggagagccactttaaagatgattgtttggctttaaaggctaaactgaagagagaaaatcatcacaactccaaaaggcatggagttgttgatgttgctgatggctatgagtcatctgatgcactcgtagtgtcatttgatgcacttgtgatgtctagatcagatttaggtggagattgaattttagattcagtgtgttcatttcatatgacactaaacaaagaactgtttaggactctttcagagagtcatgggggcacagttcttcttgggaacaacaaagcttgtgagatcaaaagtgtaggaacaatcttgttaaagaatcatggagtcatgaagaccttgcagcaggttaggtatgttccaaatctaaaaaagaaatcttctctctattggtatgtttgataaactgagttaagttttcaaagttaaggaaggtgtaatgaaaattgcacaaggcaccgaagctgtgatgagaggaaagttgagtaatggattgtatttcttggatggaaagacagtgacaggtagtgcagcacctgttattaacttaactaaatacagtcaagcaaggctatggcacctcagattggagcatgtaagtcagaagagacttgaggaaatgaagctaacataaagacttgaattctgtgataaatgtgttttggggaaggcttgca

SEQ ID NO: 15285 - DNA, 8122 bp, Cannabis sativa
gaataatgcttcctggtgtcatacaaagacttagcagttcttcccaagtaatttgatccacgtgtcccttcctgattggtccacgtacattgggcgattttaggagcaacaagcgtatttgcacattctgcttgaatgtgtccaaaattatcacactcacgacattgtatgttcatattcttcttatctccaggctgtggttgcttattattttcactatcgtttcttctatattgattatctttctcaccaaaaggaattttcttgtagttatttttcaaaaatcttgccaaattctcgattaacaaggcaacagtgtcatctgtcaggcatccagataaatctgaggtcttatttctttgttctttataaacaaaagcaaggttattctctgatttttctttctcaatttctttatgattcgtccatttattcggcctcaaaagagccatttcattattctgaagtgacccaatcagctcatccaagccaagctctttaacatctctcatttcttctatggaaataactttagacttgaactttctcggaaaaacatcccaacagtttttgaacaagtttagcattcgagtaagtcctcccaatgcataaaactcattcaaaatatcatgtaacttagcatgaaattaagccattgtctcatcctcttccataaatagattttcaaatgcctttgccaaagaccgcaacgtaaactttttcatagcatcaactcctttattttttttattctcaacttttcccaagcgtctttggctacctcacaattagcaattacttaaagttatttgtagacattgcgttaaacagcgcgtgcatagcttttgaattgtaattaggcttctacatctcttttagagtccgtgtgctcattggtttagaatcagtcactcctttcacaatataggacaacgccaaccatcttccatagccaccaaactctcttatcagccactttgagaaatgctcgcatcttggtcttccaatagggataatttacccccttcagcattggaagctgggaggtagatccagctgccctaaacatttccataacaaacaaaaaacacagtatatactcccaaagatggatctcagggggattagttccaactagatattacataaaagaaaaaatgcagaaaaattaacaattgcaacaacaacaaaattcagtacaacacaacttgcaagaaccctaaggatcaatatttcaaacaaaaaagcccgctctaataccaaatgtaagcaccatgattctagtgacctatcttgttcaagattactatagattttaactagatctaagagcataaattagaatctaaaacaaaacaatcacacacaatgatttacaaggttcacctattctagaaacacattctaggcagctaatgtttggattccctaaacgaggataataattctcactatttcaaaaagtattaattaccaatccaaaatacaaactgtaaacaatacaagcgtttacaaaatacagttacccatattaaccaaatatattggttatttacacaagatccctttgtgtcaatgttgaactcccttcaacatgtttctcaatttgaaatcccttatcttaaagcctaaaacttaaactgaaatcccttcagtgcttccatctcaactttgatcttcacataaccttgaatcatttcccatggagttcctacaagaaatcaatacaaagaataaacaaagagaatagaagaataggtattcaatctaggattcaatatgctctgcgatcaagggttagtcaaaacaataacaagaaatggtatttatactcagctaaataatgaaacctaaaatggatagttgtaactagctggacaactaaaaacccaaaatatgttttgttgacatggactatcactaacagtacaaaacgtagacttaacatcaaccactccaaacatgactctgggaaataattctccacacacaaaaataatgacaattagatggtgtaaaattttaagttaagttttgcttttgtttctctatttttttatatattgaactttgagatattagcaataaaattataaatataattttttatatattatattactttaaatttcctaacaaccgataagagtaatttttttatgctatttttaaaaataaatcactaaaatattattttattttactttcaaaaaattactttacaacatacaatttttttaaaaaaaatacatcaacaaaactccactatattcatttttttcatataaattattcatttcaaatttataatattaaaatacacatccacatataaaaagaaaaatttaaatcttaacaattaagtgtgcttaagttctttgacgaaggcgcctctattatatatttgaagctttgggtttcagcctgatatagatttctatgcttgtcaagctgatattgagaagttattggtgttggtttggactttggagaatttggtttcatcgcaataagtttgttcatgatcattaggatcattgaggacgaaggtatgcttggtcaggccttggagtttcatcatcgttactctggagagaacaagaggcctgatagtgtaactcgattaagggttgaatactattccgattccacatcaaaagattgggtgtgagaaagtgattcatgaatcagctggtcgctgcctagcttcgactgttgtccctgtcacttccttaataaagctgcgtgtggctgaagcaatggttattttgcgaggtttgcttctttgtgctcgcatgggatgtcacactgtgaaggtagaatcaaattgtaagcgtgttgtggtttctctatcgaataaaactcctttgtagagtttggtaatgttattttttattgtctttctttatgtcctagtctaaatgtcattagtttcccttattgtaataggtctctcaattgtttagcacataatttggctaaaattgctatttctcttgatgataataaagtttgctggcttgacacacctttttgtatttgaaatgttgctctccttttcgttctattcaaaaaaaaaaaaaaaatcataaacaattaataaaatataattaaagtaatgaataataaactacccatgtgtttataatatctaataccattaatactctcttctggtgttggagctctctctctcttccacttagaccatctctaactctaaccacaatgtaaaatttggttatactattactattgtagccgagcttttctgattttattaggtttatagagttaagaagttaaagaaaaatattctagagttaaaaagtatctaatttttctgactaaaagaaaaagaagtatctgattttgttgaccacacgacattttgtatcctatcaggctacaccaatacaccaccctacctattctaattgataattaaataagtgtctttcatgctgccataacttttatttaaataagtgtcttccagcaaaaatttatataaaaatgagaggaatttacaaaaatatggaaaaaaaaaattaatttgtactttgtagacataaaacttatcgttcaaaatataataatttaaaagttttttcatttaaaaaaaataaaataaaatccctaacaaaataccctatataaataagttaacaaaatttctaaaaacaatttattgtcggagcaattatcattaccgcagaatttattatcgaatctgaaaaatcacaaaaattatcatcattatcaaaaaaaaagtaattaaaaagtcggtagagttgtcattcttatcaaaaaagtgatcgtaactaaatttagaagtcagagttggaagctgaaatctgacacaaagatggttacgtttatcaattagctattaatcgtatatcttttgtcaaaaaataacagaaaaacaactacttgtttttttattaaatagaaaaaaagtgtaaatccataaaaatgttaaaacattctatatttttgtaaactttttgttatttttgaatatttattaaaacatctttctttctttattgtgtgtgttctttcttttcttttttttttttttttgatattgaaaaaagagaacttgaacttaagagctcataaggaaagtgtgaaactacatgactactttttaactcatttttattgctagtagtaacgagagaattcttaagatgaataaaaaatatttagtcaaaaacaaatttcccataatattctccctttttttttttccattttcatcgtgttttcttgttttaatttatatttcttcatgaaagatgtctcatacctctgcaactatgtccatctttatgcagcaaacaaatacggtttcatatatcacatttattagatatagatatgggtgccatttagttttgtttatataagttataaaacaattttttttttttttaaaaaaaaaaatgatttttgagaatctagttttagagttagagtgaattacataatttttactttactcacaaaaaaaatatttttcatcaatatccaaattaaaaaaattgatttatcatagctacaagtgaaggaagtttagctcaacgaaagtaaattaaagattaaatagttgatgtgttgcaacttaaaagttgaatgattgaacgttaacaaataataaagttataggggaaggaattatggctatgaacttgcaaatttctgggagatagagaagttgttgtattactggactgtatccgatatagcttgatagaaacaataaatataagcacattgcataccaaaaataatcaagttctcttcttcgccacttttgcagattgttcttcagaaaataacgtatcgaaagagtcttcttaagttcacaatttgcactcatcttcaactatataaattacaaatatacagggtgtatacagtattgcagtaattttagtattgtttcgttgagaccaagaatctaggttattttacagggcatacagcctatgttgctggcgctttgcctagttgagacaacaaatggaagaagatattgacatttaacaagtcaataccagcccataaagctaacagctaagaaccaaccatggcacaggcacggttttaccaaaattttcattcactttaagcatcactaagtactctcagacgatgatgaggatgaattttcaaaaaacgttggttttggggttgatgggcagccaagagattggattatatcctgcacaccaagaaccttgaactttggaggtgagttcaaagcaatgttatgaacacgatgctcgaaaatcttcccttccttgtcaagcttgtaagccgaggttccatcaaatcgaccacgactctcccacggaactcgtggaataccatgaacagtccagcgaaccattataacattctccatgggctgccacacactgctaatgtcaacccacaaggccttaaaaaacattttcccatgaaatcgcagtgcccagaagataaacttatagttctcaatgcccataaaagtattgagaggatctttaaacacaatatcatccctaaacaaaaatcaatgcaaaaaataggacaacagtcaacaaaataaattaaatattcaggatttcctagaagaaaaataaacatatgccacaaagatttaagtagatgtcattctcttgcttggaaaattgaatgccacccatgacaaccctaccaccaccttaaataacaaaagaaccatattggtccaagccagaggtaaataatttctatgacttgttaaactcatgatataaaaagtcatcatcatactgtccacaaactctgaggccctgccatttaattttgatctaaacacccatagcattgctaggtgtcaaagaggcatgccaaacaaaatgatacagcttatgtaaacttatatggagagagttatatgttcaatatgtgtatgcatcatatatgacagtgctgaatataggaagatagatgatcaaggcaggtgctattcagctacaatgctgtaatccaagttaacataagtcacactcctaaaacaacaagatagaaattaataaggatatgcactgcactgcactactattctgagaaatgtcacttgagcctccatatggaaaaggacatagtaaccaaaagtaatgtcattggcattccaattcttaagccaccatttctctactttactgcatcactcaattcattttgaagaatgttgcaacttattttatactttcttagcaaccaaacagaacataaagccaaattcatcaaaatgaatctataaattgcttaccaagaactccaagaaaataaaagtattcgatgagtgcattttttatctacaacatctttatcacaacacaaaaagcaaaactttaggaaaaagaagatacctgtatatatcgaagctgagctccctatagaaaagctcagggaattcctctctgatcgtgcggatagcatagcccatattcacatagtacttctgcttctcttcttcttccttgctcggcttcgaaccttgcttgacaggagccgaaaactgtccgtacagacttacattctgattgcgttccgaaaccctaacctcaaactccctgactttggcacacactgtgatcctagacacgaacctcttactggtcgtcaagattttcgagcctttgaactttgtagggatagggttggggtagctgaaaaccctagaaatttctggcgaagggacgagaagggccataagaaaattgggattttcagtgagcaagtgccatttttttttctctctctcgaaactggaatggaatgctgtgattttcgtggggcgagcgagaagaggaagacggcaatagagaaatctgtttggataatatcaagttacgatttggataatcgaaattataagtaattataatatagaaaataaaattaaatgattggctaggcggtcaatacacggaaggaagatatatattcaaataaatatcaattgtgtaaggaaaagtatctagacaaaacgggcacacccacacgaattacaacacgaattttacgaattaaaatcgagaaatttaaacacgggtcgaaaatagatcgacatgatttgatacaaaataaaaaaaaaaaaattaaaatattttaaatttaatacgaatttgacatgttaatgttaagttaaaaaattttaaatttaaattttttaacatgaaattataaatattttaaactttttaatttttattatatatataataaattatatcatatacaaatatatataaattttctaacgaaatctaaatttataattttctttataactccagcattaataatagcaaaacagatcacagtaagtcaacccgagcacgatacgattttttacgggttgagttagggttgagaaaattagacacgagtcaaaaaatgggtcgatacgtctgacacgaaatatatagaagcatattacaaaaaatatgacacgaacacgacatgatgacacattaatttatacaaaataatgctcttaaaaaagatacattgatgcacctatatctcttttagtatctagaagaattttttaatctaactttttttataatcatgtatattatagttatacgagacatagtgtgaatgctaaaaaaattctgaataatttactgtatataaaataatgttcaagcactctatttcacacatgtaggaaatttacagatttatcctacacaaactcacacacacacattaatattcaaggtcagttttgacctttcttttgctgagtcaatgagcacacactgtgacacgtatttggttttatctattgcttttattattctttttactttactaatattatgttttatgtctgaacagccttcgaaggacatacacacaaaattagggcaaagcaaattgaaagagtgggattatagaagaatgaactagctctgatcttgagctgtgatatgagaaatatgcagcaaaaatgaaataatgatcaagtgcaaagattagggtaatagagagtgcaaacacagagagttttacaaggttcacccctgaaattggggctacgtccttggtgagctgcctcagagaa

SEQ ID NO: 15286 - DNA, 6208 bp, Cannabis sativa
tttaaatacttataccactatttatttcttttttttcttttaattttaaaagttaaaaaagggcttatagaaagtaagtcaaatagggcttgtaagtttcattaggttgagaacgttacgacgccgtttcagatatgaagaggacattttgggccttatagggtccattcaaggtcggtttgaagtaaactcggccttttcttctctctctaatacccaaaaccagaaaatctcagacgaagctccgtttcactactttcctctgcttcaatggccacctccaatggagtccaagtttcacctttaggtactcatttttctgtaataaattttcttccttatttccttttaagattctttttaagtttaaaacatggttgtttgttttctcggaaaaactgtgggaatcaatgggttgtgtacccaatcgtttgataacgaattgtttctagatttcaggctcagttatttactttttatcgttaccgtgttcctatatacctgaacttttagaacaaaactaaccaaaatctcttgtgcatttcataacaatgtttagagaaagaaaagaagggtttttggtatttctatgtcatttatgcagtgttagactaatcatatagccagactttgggtgctgcagtgtgattttagtgtttgtaatggttaatttaagtttaaatcttgggattaggcacttctattgaagagcatggcaaatcaattgagcatgttgatcccgcgcctactccaaacacagagaccactattggtaagaatatagtatagtttagtatctactacattatatttttattctatatctgcaagtatcagcaaactgaatgggactggaagagtagtgatttacttatttttctcattctagctaaaaatgcccgggttgatgccatgtgggagcaaatgaataagggactctctaagaaggaaatgcaagatttgttaaagaagcctacaaaaaaaactgtgaaaacttcacagaagtcggctaatgtaaggacttttcttctttccatcaataatggcaatttcaggagttcttaaaagttggtttggtttaatctttaatatttgcttcctagaattggaagacttatcttggcctggcaccaaaggggatagtctccccgaaacaagatgtgccgaagaaagaacctagcaccactgataacagctccagtgacgaagccaagagggttgcagctgctgcgcttgcggcagttaaggatagtgcagctgctgcatcagtaaagggaaaagtcgaggtaataacattaatatgtgctgaccattcaacttgtattggtgctccctattttagtagcattttttgagaaccatggttataaagatgtttaaactgtgttattatccagtagtaaatgtattgtctttcgcatgttttgttgatattgtgaagaatgttttgtcatgttctgtgattctatccctttacagattatggaggttcgagactttgcagggcaagatattgaagttaagaagcttgttgatgctgactcaaaggaggcgttggaaaagaccaaagctagtgcaccttctgctgttgatgctgttctcgagcaaattaagaagaaacaaaaactgagcgtgttggacaagactaaaaaggattggggagagttcaaagaagaaaataaaggattagaagatgaattggatgcttataagaagagttctaaccagtatctggatagagtttcattcttgcagcgaacagattacagggagttcgagcgggaaagagatgcacggctggctgtgcaagccaagagaaagccagatatgagggaggactgaggaactgtaacagcatggtgatggtattttgactttgctcactatttccatttgataagcttgattttcttacagccaaatattatgcatcttcatggtcatgaggtgtgtagtttaaggtatttccaacagattagagaatcctcacccaaagccaagagaggagagagagaggcataattgtacaaacgcacattatatatgtccttaaaactttcatttgatttagttggtcgtttgttactttacttgtaaacaaagagcagacattaattgctacctcatgaatcaaattgccttaatatattttgtaaagaaagtaatttaatgatacttttccatctctctactactctttattagtcccttattagacattatggcttattttttcggatggagcatagtcatggtctttattagtagataaattggctatttgatcaagatttcagtttataacaataacaaataagataattgcggtttctaccatacacagaccaattagtagagctcaacatactattcacttatgttgttattaacactcggataagaaacagcatacaaagttatttcatcatcttggcccaagaggaagttaacaaaacaaatttgtattcaagtacttgaacttgatctggcagctataataataacaggagaaagaaacatgaagatgtggaaagtcttggcaagtcatttccaaaattccaaaacaaaaatcacaagaataaaaaagtaatttctttctctaagatctacatgtgaatgggtttgtcataggtagccatggcagcttccttcaatgcctcgctcatcgttggatgagcatggcaaacacgagcaatgtcttcactagatgcatcgtactgcaacgctattgctgcttcatgaatgagctctccagcatttggggacattatgtgaactcccaaaatcttgtcagtttccttctcagccaaaacctttacaagtccttcagcatcatcaattgctttggccctgctgttagctagcaaagggaattttccaacacggtattcaataccaagtgccttcacctgctcctcggtctttcccactgatgcaacctcagggtgagtgtagacaacaccaggaaccttgtcgtagtccacatgaccgaccttaccagcaatgaactctacacaagcaactccatcttcctctgccttgtgcgctaacattggccccggaatgacatccccaatagcaaaaacaccaggcacattcgttgcaaatcgctcgttgactagaattctccctcccttgtcagtttcaactccaatcttctccagaccaagtccagacgtgaatggggttctaccagcagatacaagaacaacatcggcatcaagagtggtctgatcaccaccagctgctggttcgagtgtcagtttcacaccaccactagaagtgtcaactccaacaaccttagtattaagcttaaatttcatcccttgcttttcaagtgagcgttgaaattgtttgcgaatttctccatccatggaggggacaatttccgaggcaaactcaacaacagttatctcagagccaagtcggccccatacagaacccatttccaggccaatgtatccagctccaatgacaacaagtttcttagggatttctttcaaagccaaagcaccagtcgatgaaacaattctctcctcatcaatagtaataccaggtaaagactttacatcagaaccagtagcaacaataatattctttcctttgacaatggtattcccaccatctatggtgtccacagaaacctccgacggcgaaatcaatttaccataccccttgacataggtcaccttattcttcttgaataagccttcaatacctcgggtaaggttcgaaacagctttatccttctgacccatcatggcagggaaatcaatttcaacagatgcaaacttcactccatgattggcaaaagaatgcatagcttcatggtacatatgggaggaatgaagaagtgcctaaactacgaaaagaaacaacaagttagaaaaattaatttcctttcactcacaactcaaatcaatgctaaaacaaacaaaaaaatacatctactaatgaactataagctctctttttttaaccctttttcactcaatttcgtttcatgcagcattatgatatcaaactgaaccatttccattccagaaatcaccattaaaattcaatcttacataaaactcaaaatttattttcatttttgcgttcattcaattcaaaactccacaattatcttccaaaactaaattaacagatctgagcagaagtttcaaacccaatcaaactaaaataaattagcaaaaacaaataaagagaccgaaagaaagcaaatacctttgaaggtatgcagccaacattaaggcaagtaccaccgagagtcccacgtttctcgatacaggtggtcttaagtccaagctgagcggccttgattgcagccacgtagccgccaggaccaccgccgatgaccactacatcgctctcatcagatcccgatgaggcaaaacccctggaaaatgaggtaagagaaagcgagtacctgagagcttcggaggtctggttcgagaagtttctagaaagaagataaccctttcttctcgctaagctagccaaagccattttcttctccaaaaagattgttcgatcaagttcttcctttgatttttttttctcaggctattgtctaataaaaaaggcttttttatttcaaaaccagggttggtgctttcccttttttcctataatgggaaatctggtgtactctggtacagggtatttatatagtcttccactaagctattacaacgtggacaattgacttttgttagatatgatcacagccgtcgaatgagaacgggaatattttcctttaggtttatatgtttaaaatgaagtttgtatatgaaattctgaaacattaagcagaagattacagaaaaaacaaaaataaacagatattttttttgttattattattattatcaaaatccaagaaattgcagccttacacacattaccatcccttgtttggtgttagagcatttgtacacaagataaggaagataaggtgttatggtctctagccagaagagcccaatccataaaaaattgaaactgtaaagaccaatgaaatttaagaacaatggaaatttgatcatattaataccaacaacactgaagtagttttaatacaattatcagcaatggtgaagaccaagatcaatgtcaaggccaagaatccaatttactaatgaaaaataagaataataatgatactaagtttccaacaagttaacatactctctctcgatagcctaaatttatacccaacattctttaaagattggacaagcctagattttttattctactctctactcaaaactgatggctgttttttcttatgtcatctgaaacagccacaaacagacagatataattccctgtagaaagaatatctgtgataacaaaaatatgtattcacacacattcaattgccttctattttttttttcagtattattagatagacacttaattgccttcgagtaggcttttcaaccttcttcgggcgtcttcagaaagattgcacggtctaaaccttgatcgtcgaggagctggctcatatactcgagatggggatgaaaagcagatgactattgcagttagattatctgatgtgtttagttgtaatgcttcattgacaaggtccctagcacactgctttgggtcatcgtgtctcctcagtccacgacggacgagactgactgcgtattggcttgacataacgtcccagattccatcacagccaatgatcaaaaattcgtcatcttctgttaacacaacctgttgaacatcaggctctgcaatgagtggtgttgctgaaccgagtgggaatttcaggtcccagtcccctaaagctcgtgtgactgataagtaaccattgagataaccatcatcaatataaccacccaactcttcaactcgcttacgttctggcgagaaagaaggcttatgatcttgagacatctcaactgccactccatttctacaaagtactgctcggcagtcacctgcattggcaactagcaagtgggatccaagcagtagggcagtcaatgctgtggttccgcacgaactgttaacactagtttcttcggctaacgcaaggtctgcgagcaaaaatgctttcctgtgagaattttccaactcgtttaagaaaacttcatcgatatctgtcgtttgtggcaactcggaatcttcaaaaaataacctcatagcattcctcttgatgtatgcagctgcttcgggaccc

SEQ ID NO: 15287 - DNA, 4750 bp, Cannabis sativa
  modified_base (4699)..(4712): a, c, t, g, unknown or other
gaagtgtgcagagcaaaacggaaccagagtttaggtagtttagccgccaaaatttagtttttgtgattaagtgttacaaactgtaaaattcagctggtttagcagccaatatccctacttttaaataagaaataaaattattttttcagaagaaaaaaaaaacattatcttatcgaaaaaaacattgaattgatcactctcttctcttttagaaattgtgagtgtcagtgtctggtcgccgcaaataatggagtcaaccaccgcttctctaaacgccggcgacttaaaagtcaccgccatagccgctggtgaagcccacactcttgctctcaccggtaaccataccttctcattcctatatatatcttaagtttttatttttatacttttatggtgatgtttaagaaaacccatatgacccgttactcaaagattgatcctttagctcaaattatgaagtaaaagctcatttgagctgacccaagtaaaggttgaattgaacccagttcaatattttgttccttatcactgtttttagaggaatttagacaatactaaaaattgtgagtattcaaaagttatttgaatagcgagtactcacttagaatagtactaatatagtaataatatgtgcaattatgtaaataaaatatagaaattataatggtttagtagagctcggtctggttagtccacttttaaaagactactcttgttctgtggtcataatgagaccgttataaccataattggcgtattaatcaaatgtaacactaactttaatgacacttgaatatgcttgactattatctccgttgattggtgtgtgttttcacattctttgatactgtgagttctctttaacaaagtctttcttgtggggtaggggagatttatcccactaacatcaccaaaaaaatggtgttttatttaaggttttatgagtgttgattacaggaaatggaggagtacattcatggggaagagggatgtttggtagacttggaagaggttcagagacagatgagatttctcctgctgaggttagatttgagtatccacaacaacaacaacaacaacaagactcagatgaaaagagtatcaagattgtggctattgctgctggtgcttatcacagtcttgctcttgcaggtttgatttttaattctcttcaattaaactcaagtacttaactgttatcatctttgttgttgaaaatttgagttttgggagagtaaagatattgttaatgttattgttggattcagacaattttgattaattgtgcccaagtttaacaaatatgctctatttagtaatgacttgaaagaacaagtttataaaatttatcgaaattcgcttttgccatttgatcttttttagtccaaaacacacgtgttaggcaaggattgtcttgaatatatgcgtgttcacctactctattagtatcagtttttttgggaagatccacaaaaataaatccgtgcgaaatagactgaaagcggtatcatactaatgtgggagctaaggtgagcttgcagcccaacaagatggaagaatggggtccaatagaaagcatattcctcaagtttagagcatattgttaagcttatttaatggagtggctcttgtgttgtgtgtgatgtttttgctataattcaaatgttttgaacttttgtttgtgataatgatgttaaggtttataacaaaaaagatatagaatgtttggtagattgtttaaacttgtcagttagactaagtacatgttgaaaattgatgcataaatggtttaatgaacaaaaacaaggttcaatagatggattagagtagaccagaatcagatttaaattagtagatgcaacttatgtgcagtcttgtaatttttaagacaatgtccacatgatcttgctgttttcggaattgaataactaaccaagaacaaacaccatgaaagattctttcttttttctaaactaaattgtacatgttgtaacttgatcatcgatattttcgtgtctaagctatatacgatttgatcatatgcattgatgcttttctgattgttttatgatctgttcttgattctaatggcagatgatggatcaatttggtcatggggctacaatctctgtatccttaaatagtacattgccggtctatttttgtattcgatatcttgtctggcttgtttagttatatctatcatccttgactgttaaacggatggccaacttggttctgatggagataactccactgttccctgcttagtgaagcagtttctcaagtcagaaacaacgactactaattcgtcactaaaggtttttgacaaaataaaccgaaaaactaatgaaaaccttatctgcaattcttgttttaacagtttgttttaatctcagatatgttctatcaaagctggaggaatgacatctttagcgattgataatataggcggtctttggatatggggaaactatccacagcaaagcaccgaagggggtttgtctttcgtgagcactttcgctccaagtcctgtaaaggatttacttggctatactgttatgaaggtagcatgtggaaccgagcatattgtggcgctagttagtaccgagaaaattctatgttactcttggggtggcaacaaacacgggcaattaggcctcggggacacacagagcaggcattgccctgaaattgttgaaacgtttaaccaggattccccttgggaaatttatgaggtggcatgtgggtcattgcacacagctttgcttgctcggaagaaggcaccaccaccaagtgacacacatgaaagtacatgttggacgtttgggctcggtgaaaatggtcagctcgggcatggaaccacaaaaaatgccatgtctcctcaacaagtgaatggcttacctgattctgtgtctctaatctctgttgattgtggtttgttccatacgagtgttctttcatcttcgggagaagcatggtcgtggggaatggaaaggggtcttggcctgtgccccggtgcaagagtaagtgcggtttcaggggacgctgtttcgcctttactgatttcatgtagcgaacaaaatgctaaatttgacaagccagttcaagttgcttgtggagcagctcacactgttctcgtcgccaaagatggatacgaaatgtggtcttgggggaggggaagaagtggggttctcgggaatggaaaaacagacgattgtctcacaccaacgcgggtgttgtggcctgaagtaaccgaggatgacaagcaagtggaaacaaaaaccgatgatagtgaagaaaccaaaaccgaagaaaaagattccaaacaagatgaaaacttggagaagatgaaggttctcgagtcgagactttcaacaatggaacagtatgctagcatacttcatggctcaattttcgggaaaccctttgaagagaaagatatcccaatgtcattgcagaactcggggactttcgacgttgcaaaggaatgggagacgatgttagagtcagcagaccgaggtaggcttgttagattagagatgttttatcgaaacatgctttcgggtgttaaggataagctgatgaagaaaaggatccaagaagttatgaaggaatgtctcaatcctttttcatccaagtgaaacaaatagatgttagaaagagtttgcattgtgttgtgttccaaactaaaaagtgttttggggggtttttgggtgattttattatgaataaaagtggattcttgtaaggtaatttgaatagcaatttgtaataataataatgttatatttagtaatacttttgtttttggcttctaaagaacacacttaaaacttaccttaaaattaaaaccatacaaattaagttggctaatgtgagactatatagataagatgaatgaaaactatgtttatagtgcaaagaaacattgtaaaatatatgattaaaatactaaaatgaaaattgtacattaccttaaaaacggctattctagtatactctttatttcaatagttaagttagtttattaactttttttttaatatgttgtactaatttaaatcacgttctttaaaatcacttaaaaaatattaaaattgataggaataaattaaaataaagaaaatataatattttttttttaatttaagcaattgataaaagaattatttacgacataaatacttaaatttaatttacggtagataaatacttaagtttaatttttgacagtaataatgtttaagttatatttttagaattttcgtagctacttaattatcaagtcaatgaccatgtggtaatccttaaattttaattttttatttaaaaattaatttaaacataccaataaaaaatgtcactcggataatataacttacacttaataatctaagtttcacaaatataacttaattattacgaaaattactctatatatcaatttttaactttttttttttaaatttacggtttgagttgctccagtagtttctatgtgagttgttatgtgaatttaagttgctccgttaattgctattagatttccgtaaaaacgtaaaaaaaaaaaactgttttaaagcataaaaataataaaaaaattattattactgtaaaaaattaaaattaattatttatctagaaccgagaattgtatttacgccgtaaattatttgggataattacaccacatacnnnnnnnnnnnnnntttttacttttatactgtggggcggaatttttttcaaa

SEQ ID NO: 15288 - DNA, 3441 bp, Cannabis sativa
aaaatgcaaaaacaaaaggttatattatgcttgtatgctttactttttttccccttaatctgtttcattcaggaaagaatataataaacaaccaaatctctctttgatgaaaggcttgaccaaaaataaattaaaataaagcgataaaaaagcaggttaaaagctctggcatagttaaaagacattctcattctgcatattaagctatgtaaggttgcaattgcaacaaagataaggctgagctgaacatacataaccatatctaaaaaaaataacaattaagcaagcaactcaataaactctaattttatatatcaatctgattattgcaaagtttgactataatattagtaagggatgagtttcctgttaccaaaacattgttagaataggaacaaggtcctaattagcggccaaggatggagggtttctcattcattttgagagacagagagcatagtttttattactttgatgttgaaatgaatggatattattatactattaattggtttattatgggggtgttaataagctacttacagggtgaaacatttgcttaatcttaaatgcaagagggcagtatataacatatataatagtaataataatagaagatgatgatgatttgatttgaagtgaagatccaatgaaagaagaggtagtcaaaacaaatgatggcaccacctttctagaggatactggaaaccgcaaaacattccaaaattagaaagcctaggtcctgcttaccatattaagctcgaattcctaaattctagaccatctatatataattatatttagatacaattactcctcctccacatctctcacatggcttcttttcttctttttcactaaaaagctgtatcttggtggcggtgataatcctttaaacgccccccattggcctacatctcgaggaccactctctctaccctcttcacttcctttcttaattcagacctttttattttaatttcaccaaacttgatgacgagctgagtgacgctacctgcccccacccacaccccccataaccatatactatattgatcgttaattataataataacctttaattaatttgtgatgtgatttactgacacgtaccttcttgaagatatattattctcacatgttggttttgattaattaagccatgcattgtggtgactaattaagtataacttaactttgctttttaattaggataatgcctgtaatatctttagagtgacagagaacacaacactcagcttctaaccatatattttgtgtggttaattatcatgcatggtgtcttagtaataagataatatttattataatagtctaatcatgttcaagaaagagagattggaagatgggtattgaaggaagcacgtattattagtttaaaatattgacactttgactcaagtgaactccatatacgagaacagagaactataatataattaaataaagaaacaaaagtgactggttagtattattattattagttactatactcattcattataggtaagaagaagatatataataggattcagtattttatatgatagacaaatgagaggggagctattggaacttggggaatgggataataaaagattaagtcaacccgacttctttggcacacgtgttggtccgacattacatgataagagttcctttgtcgtgacacgtacaaccaaacgccaaaagcttctcacatatgaaaatatggtgggccactctaatcttacgtggcaacatcttgtatgttggttggctgctcaactgatttgatggtggcagatgatcaatttttatttttttcttttgtaaaacaataatattaatacatacactaaaaattataaaatcattcaccaaaatattatactttatatttaattaaattgatcaaaattttaaaaaatttaaaataatttataatataaaagttgtgtttaaataatttatcttatattggtataaaataaaaaaaataatatattatttaaatcttattttttacatattaaattttttaaaatttcttaaaattttacaaaatatcatatataattatataaaacaaaattagactaaaaaatatttgtaaattcagaaacaaatacaatgtaagcatataatatatttttattacataatatatagtatctatcatatatatgtagctacaacattagaaattataaaacagaagcatcgtattgttgtagacattattgattattccaaaaggcaagttttaattaagtgtcaagttaattagtttgttgtaatggaaaatataattataacaatgcatattaatcccttttaatgtgatctcgatctatatattgcttctattctatatataatgtgatactaatttcttctgcaaacttctttgttctgtttaggtgtcctttgagttaacatggggatttgtagttaaacaaatagtactgtctatctatctttttccttgagagagatctggcttgttaattagcccaaatttcaacgagattttgcttaaggctattattcatttcgtgtcatgactcatgtcaagtattttacataatggcggtgacaaaattaaattaaaaatataatgaaactccaataatctctcgggaaaatgaccaaatctttctatatattacttatgctgataaagaaaagagtactaaaagagaaggagggtaaaaaaaagaagcaggtgtcttattataaataaaactagcaatattaactaggctattttctaaactttcaatatctaattttggagtaaaaaaggtattgacaaatataccctttttgttaggcatatacatatatatcgcatgcatatatatgcctataaagttattgtgctattgatatttactctattattttgaacgttttaatttttgtaatctaagtccgaaataattaatttttttgtaaatgaatgtaagccaaatgtgatttttttttaaaaaaaatgtaagtcaaattaaaaatacatatattaatttaaatttagaaaagttccgtaaattacaagaagtaactcttggattttttttaagggactcttggaaataattccaataattagcttgaaagatgtcgcggtttctacttcctaaaacaatataataaaaaataaggctaaatatatattaatgactctaatcaaattattaattgaattttttattttgataaattaaacctttttattttttaaaatagtataaaataatatcttaaatttaattataatatatattgtctactttagacataagtcctcattgttttaaaaaatctcataggaatagaaatatatctatacttatatactcatgatctttattatttctagagattttgattgcacatccaaaacacatatataattggattttatattaaacgtgt

SEQ ID NO: 15289 - DNA, 9041 bp, Cannabis sativa
tgctgtagttatcgttagtttgtacggatatgttactcatgcatgtggtcaattatatgcttatattgtatgagtattatttatggaacacttaaattgtgttttttaaaagagctgccggccttagaatagatctaattgttgaatattgtagctgagattctttgagctttttttttttttttttcatattctctttgtgtatgcagaattattgtttatctgattatttttctatctgaattgtcaatctttgtaatttttcgtagtttatatattggatcatgtgctgttagcctgttagtgtatcaaaatattggaaattattaattgtactacaatcatgttttgtttattccaacctaagatacacgaggaagcatgacggttgttctgtatttcgataagaattggaacttggttttctcgctagtatcttgggtgtatcttttgagtacttattccgtcataacactaataactgttattcctgttctttgttcttttcaactgcaacctggtaattaggaataaattgttatcatttgtgtttataggttatctttgattcaacgcaatggctaccggacagctgttctctcgcaccacacaagctctgttttacaattataagcaacttccaatccagcggatgctcgattttgacttcctttgtggtatgtatagggatatatatatatatatatattatataatgcaattaactgtttcttatgttgtctttattgtgtttttattcagtagtaatataagttttttatattcttatgtatgtagggagggagacaccatcagttgctggaatcattaacccaggtgctgagggatttcagaaactcttttttggtcaagaagaaatagccatcccagtccattcaacgtatgtgtttcttttctttctcacgttctgttttcatgtttcatacatctttatttgctttaatttgaatctaagacagtcataaataaataaatgttcatgaacgtcaattgcaagatgagagtgtactgttgtgttatgctcttctaagtcctacattctaacatggcttgttcacaaccatatagcgagcacacaaatttataacttatacaataagtttcatttgatgcacacttattttttatgattttgttcaatgttagtctcaaaatttgtttatgacagacttattacaccgattaattatttcaattagcctcccctgtacataaattaacaagcatgctcatgtgggcacgggcacatgtgaatctatatattttcacacaaatctatatattttatttttaattttaatgtctactgattttcaagagattcacatatccttataatttatcaagcacaaaaacacacaaaacatgttttttcatcctttgcatgcacgattgtagtaacattactatggacttcgaagatggaactttagggctagtgaacatcttaaaaatggactatactattagttggcctttcttttctgagtttaagattggcttaccttcatattgaatattgttaatttttgtagcattgaagcagcttgtgccgcacaccccactgctgatgtctttatcaactttgcttcatttagaaggtgggtacttgttatgctcattaacgattagaattttgaagtcttacataagttcttattaatgaacatgtattatttatttcttccagtgctgctgcttcttcaatgtctgcactgaagcagccaaccattcgagttgtggctatcattgctgaaggtgtacctgagtcagatgctaagcaattgattgcttatgcacggtctaacaataaggtgagagaactactgcaatgccatctgcaatgaactgattatgaagatgaactaattaactgttaatggttttgcaggttgttattggcccagctactgttggtggcattcaagctggagcctttaagattggtgacacagctggaacaatcgataacataattcagtgcaagctgtacagacccggatctgttggttttgtctccaaatctgtgagtatacactccgactcctctttatctcttttgtttttcattatgaatttgttgaccagctgtatctacatatattgataatattttgattttcaaactggtaactagttgtttgtacacattgtcctggaaaataatttcacttttctatcacagggtggaatgtctaacgaaatgtacaataccatagcccgtgtaacagatggaatctatgaaggtagacatgtgtgcttgcttctctgtaaagtttctcttcccctacactatgctagctaaggtaaggatgtaataaaatttggaaatgttggaccattgcaggaattgctattggaggagatgtttttccaggttccactctttctgatcatgttctgcggtttaacaatattccacaggtactttattgctatcatctgctccttaagttctggtgacacaagtgcaattttttcttcttcttcttcttcttctatttgggtgaatatgtattacatctgtgtagactgtggtcattttgcatgactaaaaaaattaggaaaagaaaataaaaatgattgtctcctcctcacagactttttctcatgttttgttcatggtcaattattctaatctgattgactggtgcagattaagatgatggttgtgcttggggagcttggtggacgagatgagtattctctggtagaagctttaaaacaggggaaggtgaacaaacctgtggttgcttgggttagtggaacctgtgcacgccttttcaaatccgaagtacaatttggtcatgctgtaagttaaatatttttttttcttaattgatatttatagacctagtaaaatgttcaatttgttttaatcttttacgctatgtaaatcagggagctaaaagtggtggagagttggagtctgcacaagcaaagaatcaagcacttagggaagcaggagctgttgttcctacttcctttgaagcttttgaagctgtaatcaaggagacatttgaaaaattggttagttcttcctctttccacccgaaaatgacaaaagaaggcttaataaattattcactaaagttcatgcttcctacttaacatatttgattaatttctcaggctgaagagggaaagatttcacctgtcaaggaaatcaagcctcctcaaattccagaagacctaaacactgctatcaagagtggaaaagttcgtgctccaactcatattatttctaccatctctgatgacagaggtactacctgaactagatactgctcactctgctcaattttctaagaatgtttgtcagattaatgctgatgaaattcttcttttaattatgcaggcgaagaaccatgttatgctggcgttcctatgtcttccattgttgaacaaggctatggtgttggtgacgttatttctcttttatggttcaaacgcagcctcccccgttactgtactcactttattgaggtagattgttcatctgtataaattttgcattgtcttgatttttgattcttaatgcaaaattttatactgcgggctatgtaactaatgcatttattgttgattagatatgcattatgctatgtgccgaccatggtccttgtgtctctggtgctcataacactatcgtaacagctagggctggaaaggaccttgtttccagccttgtctcaggtaaattgttgttgttgattgttttgtttctcgaaatcgcaagccagcatattattgcaatctacagagaaataaaagatgatctgatgaaacaggtttgcttacgattggtccacgttttggtggtgccattgatgatgctgctcgttacttcaaggatgcttatgacagggtaaatcctatatcaaactacaatgactgattgggataactcagtgccttgccgctaaaatgtttttgtacacttacccagcttatatcttcatgttattgcagggtcttacaccttatgaatttgttgaaagtatgaagaagaagggtatccgtgtgccaggaatcggtcacaggtatggagacttctttattgtctgtctattcataatgccatgcactcgtttagtttttttaacgccttgaacactattctttttgtttgccaaaaaggattaagagaggtgacaacagagacaagagagtagaactacttcagaagtttgcacgcacacatttcccttctgtcaagtacatggaatatgcagtgcaagttgaaacatacaccctctcaaaggcaaacaacctggtcctcaacgtagatggtgcaattgggtccctcttcttggatctccttgctggaagtggaatgttcaccaagcaagagatcgatgagattgttgaaatcggttatctgaacggtctctttgtgctggcccgatccattggtctaattgggtaagtaacttagaatcaatttcttacaagttttttgtgcggttcatcgtgtatgttgctaacccttgacgcatcaacagtcaagattatgacctaacttgtctttttatccccaaggggtgattttcttaaaactttatgtgcttaactaaatacatgaataattggtgacaaaagaaatcagttttgttagagaagcctacataagatattgcccaattggttttgagatgaaccatatacatcttaccgtacaccttaccataagatgcctggctatggcatttatttcgtttttgttttcaaattagaattgtgaagttccatactaactaattgttatgttatcgaatgttatcaatcaggcacacctttgaccagaagagattgaagcagccactctaccgtcacccatgggaggacgttctttacaccaagtgagagaagttgagccccattttcatgccacacccacctgctttacccgagcaatgtttgttttgtttaattttttttagtctccgatttgctgagacagttatttctgctgttagtttagtgtctgtaatgctaatggctgagctaagctaagtataattctctatctgtaagttgtaacaaaaaaaaggttcacaaagataaacattatcttcctattttattaaaacaaacgcaatttttcacgacttaaatatggaaataagaaattgtaaaaatgagtaccaaactttctcaaataacatatcacataggaacgatgtgtatattgcgtgtgattcttaacatttttgttttttagttgctataaatacttttacaaagaaaaaagcaaaagagactgttcaaactatcttttaaacaccactcacaaatccccagcaaaaaaatacgagtcataaataattgcacaatttttttaagttcatgtttaataaataatattaaattattcatcaaatatatatatatatattattgcattagattaaaaattataagaaaaaaatataaataaataaacgacaattgagactgagatatgtatagagatgaaacgtttgaatataataaggttattcattcatttattatttattgagataattacggtagaagttttcaaaaagtttactttcatatattatcaatttaaaaaaatagcgataataatctctaaggtttcaattcttatatgtctattcatacccaattcaacagaaatagtcactggctgtgtagacttaagaataaagtttggaaatgagtcatttacaaaataagtagtcactagctgtgtagactttgaatatgctgggtgtctagacacaaggaggtctctcactgattttgtgttcacagtacttggtggctgtgtcagttggaaagcaacattgcaaaaagttgttgctctgtcttcaacagaagctgcaactgaagccattaaagaagcactatggctaaagggtttcaccactgagctggggttaaactctggagaacaattatacactgtgcactctatctcatgaagaatcctatgcatcatgagagatcaaaacacatagatataaagctgcacttcatcagagatatcatctccagcaaccaagtccaagtaagcccagcaaacatgcttacaaaatgtgtcatcctagacaagtttaaacactatttaatcttactcaacattgaagaagcttaagtctcatctcctcaaagtgtctcaattaaggtggaaattgttgtaattaagacagttaaggactttgagcctgccacatcaccaactaaccttaactaactgtgttagttacttaactacctcaaccaacttctataaatagcatactacaacctatttttagttgagggacttgtattgatacacaaaaagaaatagaaagaaaagtgatcgagcctattctagagagaatggagggatgtaaaaataaattgtctattcttgaaatagcttctccatgtgaggtcaatttgtagttttgattacattgtcacagtggcttggatcactacttttctctctgttattgtaattaaagatcatcaataaagcttcttcatgattcatggtggtattgagtaatgaatcacattgatcatagctcaatccacttcattcttggctgttattttctttaattgttcatagaattcttgttttgttaagtctttctctgctaattgatcttgctgaagaacagttcatcttttacaaatatctttgttagagattttactagtttactaattcatattcttaatcatgaattagagtggtggatagtgaactagtttgaatagattctccatcatttcttcatgatgtattactctcatattatttttcaataaaatgtatgttcattgttcaaaaaaaagtgttcttataaccttctagtgcaagtgacagaggaaataattctccttttccattacagggtgggatgtctaatgaaatgtacaataccatagctcgtgtaacagatggaatctatgaaggtagacatatgtgcttgcttttctatagagtttgtcttcctctacatttgtgttatcaataattgcaaagataacatgtaaatttgcaaatgtttgaccattgtaggcattgaggtgatgtgtttccagcctctactatttctgatcatgttctgagatttaacaatattccacaggtacttgagatcttctttcttaactttcatagaattcagtgattctaaaccatgtcaatggtgctggttacttaaatatttgtacatatgattgtctagtgttattagttatctaatatatatctcacaagctgatatttttctagacttttccttacgttttgttcattttctagtctgattaactgactcagattaagatgatggttgtacttgttgggggggagcttggtggagaagatgagcattctcttgtagaagctttaaaacatgggaaggtcaacaaacctgtggttgtttgggttagttgaatattctctgcttggtcatataacttcatttatcttgattgatttttgccaggactagtaaaatgctcattttgtttaatcatttacattacataaatcagagagataagaatgaagcacttagggaagcaggagctgttgttcctacttcatttgaagattttgaagctgtaatcaatgagacatttgacaaactggtttgttaattcttgctctttccaggctgaagagggaaaattttcaccagtgaaggaaaatctaatgaaagatactgcttaattttctgagccatgttgtttaatgctaacgaaattgtttcattcaaatttcaggtgaagagccacgttatgctggtgttcctatattttctcttgttgagcaaggctatggtgttggtgacattatttctctgttatggttcaaacacagccttttatggagctagtgtgctcatcatgtgtgtaaattttaatagtttcttgatttttgatgtttagctgctgagtcttgatgcatttattgctgattagatatgcattattctatgtgctgaccatggtccttgtgtctctagagctcataactctatacttacagaacctcatgagtttgttgaaggtaagaagaagaagggtatttcgagtgccaggactcgggcacaggtatggagatttcgtcgactctgataccacaaaaccggctctaggggaaatttatcctcaccttattcacacacaaaacaaacataaacttgtttagtattttaatgctttcaacactaaggatcaaaagaggtgacaacagaagtttgcaggcacacattggaatatgcagtgcaagttgaaaccttaacatagatggtgccaattgggttcctcttcttggaagtgaccaagcaagagatagatgagattgttgataatggctatctaaagggtctgtttatgctggcccaatccattggtcttattgggtaagtaacttcaatcaattttctttgcctgaattcatctcatctctttatgttgcctgttaaggtagatacaacccatgacacatcaacagtcaagattatgacataaacttgcttttttatccccaaggggtgatgttcttaaaactttatgtggtccaaaacagattagatgctcttatttaactaataatacatcacactaactaattgttgacaaaacaagtcagtttcatcttttagatacctggctgtggcatttatttatttttgtttttaaattagaattgtataaggagagggaaaacaacaaacaaaactggccccccaagaatgcatgcagcaacacaaatatttctctttacttttcttaattgctatcatactcaattttccctaaatggtcctatagtatagaactttattgtagaataataaagttccataataactaattgttgtgttatcgaatgtatcaattagacacacttttgaccagaagagatttaagcggccactctaccgtcacccatggtggacgctctttacactaaagtagtgtttggttggaagtaatgaaataatgggatgaaaaggaaacaattttcattccat

SEQ ID NO: 15290 - DNA, 18107 bp, Cannabis sativa
atttttttttttgttgtttctatatatttgtgaaataatcactttaacaaaacagaatgttcaatctataactttggtaaaacagtacaaacttattaatcaatgaagctcataattgtcactttcatgttttctcaacattttggcccatattttttggtcctacaagttactagtttttctaagaaaattacaatagttatggaacactgtctttaaataagctaagcccacaaacctgcagttttcttagttgggctatacttaaaaagtgccagccaagatgaaggcatgttaaaatatttaataatgccaacatcgtctaaatataattagaaaaagagaatgtttattttttatttttattaatggaaagaagattttttttaagtaagtaaagtttatttattttggaaaatacctaaacataaataagtacattataaatatcataaaagaaaaaaaaattattcaatacaattgtacaagtcttgtaatgacagcatggaatgatgaagattaatattatagaggtgtttatggaatattatataaatatatatatatatattatttaaatgggcttatgaaagagaggaaataaacaaataaagtcccatctcactaccatatttattcttcaacttgtcaattttttaacaataaatggggaacaaaacaccaaattatgaataaactgaatgattcataaatgttaatacatttgcttttttttttttgttgtaattattaatctatttacaaatatcaaaatgagtacagtttagtccagctatcaattccatataaattatatattagagataatgcactattttttttttttaaaattgtttaaacatttttttttatatttttataatgtattataaaaacaacataaaaataataaaaaaattacagaaaagtaataaaaaaataacattaaaataaaaatgaaaaataatatacaaataataaaaaattaataataaattaataaaaatacaatataaaaatctatcaaaagactatatattttctgtaaataaaatcataaaaattataaaaatatttaaaattctatacaatagtatttttataatttttttttgttgttgttgtgtatttgtaaaaatttcccaatattatatatttttgtaagaattaattccatatattatattaataataataaaaattaagatatcatatgttaagtgcaatttcctttcagtaaatatcaattatactttatcttctttaattagtaatatatatgtgatgaggctctctcaacatttttttttctttttaatttagaatgagcttaatcttctaaagttattttgtaagataatttggaaggctataatctataaattaggtgaatatttataattttatacaagttttaataaaatttatttatattattttgtgtagcatcaagaatcggcaattattttagatcttatattaatgtaatagtattaaattaaaaagtaaaaatatacataaaataagtaaaagtttaatcttttttgtagttattaacttttgtacatatatacatataaaaatatgataaaagtgattttagttatatgcaattaaatatttaatttataaccttacaagaaaaatatatttaatttattagaatctaaaatttatatataaatttagagtcaaatttgagccaaaatatcaatctttataatttcaaaatatagaggataattaggattttttttacttcgaaatttaacatgtattaaattatactcttgaatttttcacgttgttaagaattcttgatgaaatattaaaattgttagatttaaggatttttgtccaattctgttcaattttactaatatgacaattgtttatctatcaaatcacgtcgatcgaaatttgatatttaccataccatcctcttcaaattttattatgtattaaattatgctttttgaactactatctacgtcaaacatttgttaataaaattagataaaatcaaatttatattttagtgaatgtttgtatgtacaactcaaataaatttaaatgttactattatttttcttctcttcaaaaattagattaccaaacatatataagagtgtatagataagtagaccataataacagttaattgaatgacacttttaatttacaactagttcaattttaaagaattttaccgtttaaatttaaacttacaaaattaaatacaaggaataattgtgggagtttaaccgaaaaaaacatataatataatttttagagacaggtggggtggcacgagttggatgagtgtgtgtaccttcaccgacacaaaataatttaagtcggtcatataaagcccatgccttaaccttagcttccatttttcattcccggaaatttatcgaagcagcccaattaattatttactgtctggttccgactttccttgatcagcgattgcactcctcaacgagtaagccctaaacttcctatttctcattgatcccctgttcgtaccttgatctgccgtgatatttttgaaattttaggttttgtttccgtaaatttgatcgttgtacataatttgttagcttaaagtttatgattttttgctgaacaagcttgggtgatacagctgctgcagcgaatatggatgagtttggtgtattgacggagaggtttggattgaagcctcaaggtaaatcggctccaatggcggcttccaagagatctgtcaatagtaacgatggccagaattggaattcggggtttgattcgggtgtaaaccccaacttttcatctttttcagacgatcggaacggtttttatcaatccggcaaagataaggtagctcagaacagcggaagcttgaatgattatgatgatatatttggtggacctagtaagcaatcgggtagtcatggtggtagttcatcttttgatatcggttcatttttatcgggctcgaatgtgaattcttcgtctttttctcatacctatgataatgatgatatttttggtggaatgcccggtttgaatagctccacttctgctagcaatgccacgaagagcgatgatatttttgggtcttttgcttcgcctccgaagccgaacgttccaattgatgacttgttagctgattttgctggagcagacgcaaatcctatattctcaaacaagaaccaagcatctggttttgatgatttgatacctggttttgggcctagtattccttctaaaaacgggtatgcagcatttgagaaactgattatatctggtcatggagtccttttttgttggttaaatgccattgttctactgctacattaatccattaatctacatggtgaactgcattttctatttatagggtattgtatctttttcatttatctaccatttgggggataagttattgtttatttttttttctcaatatacagagtatcacttagtaatatatgaatgttatttaaccgtatttgagtttaatcgctaacagctacagatgttcaaggttcagattttgaagagtctgggttatcttacagactacagatcatgttcttcagggttcaaaacttgaacctgatgcttttttaaatcacaaagaacaatgtcattgttacttatatctgattatctgttctgatgattaatgtttgtcaatcaatattgccttatgccttattttcattgttacttgtttacaagaaacacaaacttacagcgcccacgtcaatcatccacatcagaagacccttttgttgtgctagaatcaactacaactacaacatcaacatcaacatcaaaaaatgcctacgctactgctaatttgctagacccactggaaaggatcagtaagctcaacacttctggcggcacaaaacctccacgtttgaaatcccctccaaaaggaacacaaatttcaaaaggacataaaggtttgttcaatagtgcattaaagattcaagagtaactcctttgtaatatgttttgcataagctgaaaaatgctctgtgaacatttccccttttcttattagcttctcaactgatgcagttaagagctcaaacgtgtcttcagttaagagctcaagtgtgtcttctatagatgagcttgaggactttgccatgggtaaggtgcaaagcaatgtaaatggacgtccaaatcctcattctagtggggaatggctgggaacctctgccaataggaccagtagtcatagtggagatgatctagaatccatttttgcaatggggcatcgttcaagcagtgtaccaaggtcaaggactactactttggtgagaaaacaactgtagtatttgtaactctttttatgcattatttgagtaatatatatatatatatacatatatttatttgagtaaaatattagtttttaattcctctgatcctcttttaggatcctatgtttgatcttcaaacaaaaaacagaggagtgcctcaacctggagtgcctcaaaggacgacttccaggacctcacctgttatgaagaagtcttcttctgcaagtggaatttttgacgacctttcttccatgtttggaggtatatattggtgaagtttggatttctttttcatttgctgaaaatcaaatgctctttttggacacatatttgtatcaattctgatttgatttattatttatttaagaggcccaaattttggaagaatttcaagaaattgaaggggaaagtcgagaaagaagaaacgcgagattagaacggcttcaaagaacccatgaccgtgttgtacgtttttcttcctctaaaagcttttctcaccttaaaacattacagtgagatgttattggataagagggcttgtttctatttttcttttattttggtaaaactttttgagttactttgggtaataattataaattacaatctaactggtaaaaagtaattcagatcacgacatcaggcgatgtagtaagactaaagaaatatgtagggcatccggcgagacttctcggactgttaacgtctattgtttcctttttgttttaaactaactttgcatgatgttgatgctccataaatagcattatgtcgttactagaacgacaatgagttttggcgttagttttaaactgattctgcaatcattggcgtctgtcccgaaaactaatgttgaaatcacgacccaattgcatattagcattggggtcgatctgcaatagacaccctactaaagcgttggttaaatgcgtcggttagcgctgttaactgtatacgacaaaagaggctttggcgtcagttttaaacctattctgtaattattggcatctgttgcaaggctttgatgttggttttaaacctattctgcaaccattggtctgttgcgaaaattgacgttgaaatcatgatgcaattgcatttagcattgtggttggtctgtaatagacacctcagtatactcttggttaaatgcgtcggttaacaatggtgactgttgttttgactgatgccaaaggcatattttggtgtagtggtatatttaacctttttggtgtgctttttattcatttttgcattggaatactgatttggaaaattgtctattatgcagacaaaagcattggctgatatgaaccagcgcgacttccaatctctgcaagaacaggaagaaaggagtgtaagtatttggtttgtttcattagcaagttattcatcttgatgtacaatgaaagcttttattctcatttttgatctcttgctgtacttttttctcctcgcgcatcaactcttataatgtgaatttttgttatttaattgtgctggcagagaattgctgagactttggatgttaagattaaacgttgggctgccgggaaagagggtaacatgcgtgcattgctgtcgtccttgcaatatgtatgttttgtaatgtattatgctcttgcgttgtatttttttgtacaatttcctcaacatgcgctgatcaaagcaataaagtttgtcaaaactgatttacactttcctcttgaacaacaaacaggtgctttggcctgaatgtggttgggagccagtttcgttaacagatataattacttcttcctctgttaaaaaggtctataggaaagccgcattgtatgtccatcctgataaggttcaacaaaaaggagccactctggaacaaaagtacactgcagagaagatttttgatatcctccaggtaacctcctctctctatttaccgaccatgttccattcttgagtaatattgcatattactaatgttttattatttctaattacctcattactataaattattccataatagagtgagaccatggattacatccatacctatatatttatacatatgtaagtgtaggagcactctcaacagtttttcaaatctctactatattctttaaaatacaatcatcaaaatttacttcatctattttacctcaacgttttgcattatattatatattaatttttttattttttctttatattatttaaatattatatttttaatatattttatttattttatctctatatttaactaagcactatttattaagttagaaaaatatgtataatagctaacatttacttcacttgttcgaagtttaattttgtaacatttatttctgtatttacgtgtgagtgttgtttttccccttttctaatatattttggttccataccaaaacaggaagcttggaacaaattcaacaaggaagaactttcgtaggtacggttagagccaaaactcgtccttcggaatttctgaaaatcacatacggtcttgtttgctacttgctatattatatgatgaagattgggacatcaacttcccactttagtgaaacaaaatacttattatatacgacaataatgtaaattgaattcttatacacctcataatgggcacctcccccattgcttctctttgatttttgttttcagttttcattttggaatatactcttacgaataagttttactttgtggggttttttttctttgggagatttaattctctccaaattttagtttaatatttatttggtaaagctggaggataatgtatgttttacctgttcataactgcctataacatctcgtttggatttaagcgttgcatattaataatttttattaggaaatttgtatacaaaccttttattacaactttttagttaatttttatacatgttagaatatttattttcaattaaataatttgcgacaaaacttcctcaactatcaatttacttgtaaaaaatcatctaatttcatattttggtggaaaattcattcaaagtactattccgttaacatttttaaggtgtcgtctgtccagttttattaaattctaattttgctcacgtgacaatgacaggttactaaaaaattatccacgtggttatattttactaaataaaattaaaatgtgtaattaaaataaaaattaaaacataaagagtaatttgttgcaaaattccccaactatcagtttacttgcaaaaaaccatccaaaattttttatatattttgaaaaataaaattaaaaacttaataaaaataaaaaatatgaataattataaattctacttaaaccgtagtttcgaaccaaacctaaccgttcttaatagtttggtttgagaaatttattggtctggtttggtttttaatattcaaaaaaccgttatactggtttggttcaaaaactataaaaatcgggaccaaaccaatttgtgaacacccctattacccatgttaatgctctgcattcgagatgaggtgaaagttagaattttatcaattttgcctaaaaatgaaataaaaagacttggaatggtttgagcaatacaatgattttgatttctcaaaataataataataataataataataataatattcagtactgcactaaacttcaactataaatgttaaaagacataatgtttgtataatattttagattaatttgtggtaaaaccccccaactattaatttacttgcaaaaaattatctaaataactttaaggtttgatggttttttgcaagtaaattgatagttagagagttttttttgcaaattactcttaaagtttttatttttattttaattactcattttaatttttattttgtaaaatatgaccacgtaggataattttttagtgacctgtcattgccacgtgtgcaaaattaggacttaatgaggctggacagacgacaccttaaaaatgtaaacagaaaagtactttggagggttttcccaccaaaatatgaagttggatgattttttgcaagtaaattgatagttgggggattttgccgcaaattactcttttcaatttttttagcggtattcattaagcttaaaatatctccctataaatttttaaattttttttgaataatttatagtgctaaaaatacattcgaaattttttgaactgcgtggtaaattgaaatatcaagaactctgtttttagtattgtaaactattcgatgatactataattataacggatactgctataataaaaatatttcgacatgtgatttctgtcatgaagattgactgagaggttgtaataggaagctataattagtactcaattttttttttttttttatgtatatacgtagtatatattttaataatataaataactttcatcaattaaataagatattataacgtgacttgtaagcaccatatactgtaatataaaaaaaattacttactagaatcaaaaatgaaaattggccactttgcaccaagaacgcgccatctcctccattaattatgacaacgagactttgaatgtgaaaaacaaaccaaaatggaaacttataaatttacttctcgtaaaacaataaatcacaaattgaaacccatttttcaccaaaaaactccactaacgtttaaaagaaaaacttcatccacaaacaacataggatcgatcatgagttcagcaccaaaattgttcctcaaactaccaacaatacctgaaaaattagagaaagaatcattgctggataaaggaataactcaatcaatactttcaaaaaattgatccaaaattttgtcgaaaaattccattcaaaccaataaaaatttaaaacttcaatcgtgaccaaaaattacaacttcaaccacgaagcaacaaatcaaccaaacagtcgacacaacaaggtggtaaaattttgaaacaaaaagcaactttacatttcgcattgtgatcggcaattactgaatcgtcattatcatcatcgatgcatgattcatctctatcgttcttcttatcacttcaataattaataagcccaagaccaaaagctttaaacatgagtctaccattgtatatagcctaccaacatcaacaccataataaattgacaaaaataaattattatgttcgtatttatataacaataacttttttatatagctcaccatatcttatatgctaataaacttatgagtttatttttgcatattaaaataaatttttatttttgtttattatagagtagcatatagtcagcatttcatataacttttgctagaaaggcttgattcatctacatagttttttgaaaacctaaccccttgagactaagagagacaaattttaccccacacttttaaggcataaaccactgttcctttctgacttcctcattgaaaattctggaccatgccatcacttttggtcgtcagccattgaaaaagttttgtagtataaattgggtgggacacaccaaccgatttaataagcttggcacgactcgctttggaaagggtttttactttccaaccttggagcttggaggataggttcgttaagataaaattgaaatcaacatccttttgactgactgtctatgcctagaatatctttaataactcttttgattttttaagtcgtgttcttgctaaaaaaaattaacattttaagcttgttgactttttgttccgaccaagaacaaaattttttcaaacaatttcaaaagttacggacttcctcaatattagttcttcctacaaggataagatcatctggaaagaatatgagataatctttgcatccctactcagttgaatccctttgattctaccactgtccaacacctcctccaacaatctaaaatagatttcggccgcctaaatgaagataaatgggaaagaggactcccccgacgaatactacattttccagtcaaccttcattaagacaaatattgagcgatgatgttgcaatacattgggagaaccaattgcagaatccctccggaccctataacttttcagcaactcctctacagacgatcattaatacatagatagtatgctattacatcataaataaaacaatttctttttcggcttctactgtgagcttgggtagtgagaggatgagagagagggaaacgtgaaggagagaatgagagataataaggggtatttttgatattaagagaaagataattataattttaaaaaaataaaggggtatttttgatactaagagaaagataattataatttagtataatataatttgaagacttttttttaatcatagtgtcccaataggtatctacaattatgcatgcagggagtaacgttgcttgttatgacccacgtctttctattttttatataatttaatgacaaattatctaataagatcaaaaataaaaataaaaaaaataataaaaaagcaacacggtgcttatgttttccttgaaaaatcaattttttttttctaaattatcccacctaacaagtaacatcaatggcaattacattattatttttttttacatgggagagcagacctcttctttgtatagtttgtccttaactatacaaactcaattttcctatctttattaattaattacataaattgtctatataaaccgagcacccaaatattaggtaataattatataattaattgcttttaaatatgttttattcattaagggtacgatatcacgtacttctaaactagcttttagctatctcaatcttacctcctcaagtgagaagtcaagtcactctatttttttcttttaaacttattattattaccggataaaataataataataataataaaattgactaaaaaagaaaaagaaaaagaaattaacatctctttgtacgtgattatatgaaaacaaattctttattattttctgttacaataactcaacagcagcttaactgattccggatttttcgctcaacacgggcctcgctcttcttacatgacaatctataaatatatatatatatatatatgtatataaggacactccctaatatcaactgtcaacaattccttaacgaaaagaatcaaaaacgtacgagagagaagaaaagattgagccatggaagtaagcgtgatcatgatgagaaaaattgaagaagccgtggaaggaagcattaaaagaagatcatcagagatggaacaattagtcaatgccatggaaagatcaagaagaggagatcatcataatcaaggtgtagctgttgccatggaagtaagcatcagacgcactttcccaaacgatttgtttaactttgtcgttcaaatattctcaacatggccacccatactgggcggtggccgaatattattattcactgttcacaccgtctgggctgagatcgaagacgacgccaagaaatgggtttcatacatccaaaagcttttccgtaaacgacgtcgcatcatccttgctctctccgccgatcgcagtcttaactaccccaatggaaacttcaatactctaatctacaacaagaaaggtacctatacctatcttttttgtatatattatcaatcatgatcgatcaaaattcatcaagaactaattaagtttagttttaatactgtgtgtgtgtgttagatcacaaagaccaaccgtacgagctgttacagatttgcattgaagatcaatgccttatctacaaattagatagcattggccaaaaattcaacccaaaagtgctgaaggatttgcttcacgacagccgcgtgacggtggtcggagtgggtatagagaatgtggcgaggcggttggaggaggatcacggttggttcatgcctaaagtggttgaactgcgagatttggcggcccaggcccaggcccaaaccaaggcccaaaaggcagatattcagggtagtactagcggtcatgataatggaaagaagatcatgacgaagaaggtgatgatgatgaaaagaaactttagccgatttggtatagcgaagctggcgaaagtggttttgggaaaagagatgaacattgtgaaacccaccaacattcgttggtggtcagtctctgacaactttaatcgaccaccacgattccattccgaagacctaattaagtatgccaccgttgaagcttttctcatttcccaaatgggcaccaagctcattattctcgactccaaaactgatgctacgacgtcgtctcaggatcttaattaattagtcagctgtttacgtttactactactactactatactgcgatgacgacgtcgtttcataccacctgactactactactacgacgacgtcgttttaggatgatcgatataagcctcttgcctactacttacctactttcttaccactaatactctgtttcaatataatacaggcctatcatgagatttctgtgtacataataataaggagaataatcttgaaaattgcaacaatttacgtatacgtcgtattccttttctcgttttcttggctactgccgtttctttgtgaattctgtcgtttcttccatccagtgctgttttaataaagattgttccgtctgtggtgtaattactgtcgttttatggatatgtgtgtgggaatcaaatttttattgccgttttcattatatggctgtcgttttatcatatatgtttttgtttcgcataatatcgtttcgtttctcggttcttctaccatgaaacccaagaccaagattacgtgtttagtttcaaatgtaatctcaattgaaattcgaacgaacaagaccataacatttaaacttttttacagattcttttttgttttttttttttgacatttttactgatattttttttgccttttattttacttatatttttctgaaaaaaaaaacaatattattttcatgcagcaatataatataatatagtaatatatctttgtaaaaataaaaaataatccataaaaatatttaaaatattgcacttttttatcattttcaagtatttatgatatccccacaaagaaaaaccaaaaataactcttataaattttatagtacaatgcaatattcgtgactcttgcttctaacaaaattgacatgattatcataatatttaaggcattcccacacaattttgttgcgacttataaaattcagttataaattttatgaactaataatagttggtatgtactctacacaactctgtttagctattccccaaaattagagcatgtttgagatgaattatttcctgatatataattcttacatatatatggcatcacggtgaagtcacccaatgttccagccttataattttttttcaattactccagctttattattagttcgtaaaaattcattggaatattattattcttcttcttttttttttttttccaagaaaatcaaataaccatatagtgaaaactagattcctctaagtcattataaaaggtatacactttgttcttaaaacaaaatcatgatatgtatagctttaattcaagttgagttaaaaaatctaaattgcactccccttaaatcttggagattcttctttcatttgtctatactaattaaaaaacaaaattaagtgggtgactttttttctttttcttaattaatgcctttatttattattatttttttttaaaaaaaaaggcaaaagtggagaaaggactttcctagaaattaatcacataatgaaccccaacccactaaatctgaagaaccaataaacccttccaaaaatggaaggtgtttttagatatagcggcggccgatgaccaaaaccatggtgggcctaccacgactctccggtggcggccggggcatttctctttcttcccacttatatatattatgtatatattattacacacatctattatgtataaatgtttgtatacattaattgactaagaaatcacatatttattttattaataattacatatatttcagcaaaaagtgacatatatcgtacctaatacctatgtatctatccacgcacgcttgtgaagtgaaggtgtgcaatgatcaaagcacgtgtgtaaatttgatcaattgtattttcacttacaaatgggattactatacatatataaagcttggttaattaaggcacgccaccacataatcattttatagctaatattccgctttagggtgatgaacaaaataatggaattaaagtgtcaagcaatatgaaagatacatattataaattttagtttatataaaaaaaatacaataaaaaaagttaattatcaagatttggagaagggttaaggccagccgtatccgtttctggccacattggtatactgttaggcaacttaaagtgccttaatagcaatgctttaataattattttccttggggttaggcaaattgtcctcttcacataaataaaggaaagttggtatacccaatctttattcgcttagctagttaagtttttgaccggttttacgtactactggtcattgtggttggagctagtactagtatatgtatgaggtgttacactcattaattttggtacgttagttgttcaagcaaaaacaaatttcgtatatatgttagtttcatatatatagctaccacacaaattctcaaaagggcaatcaaaattttgatagacttagaacctttcaaatctattttcaagttccaatgattatattaatgatctaaacgttgcttccttcatggttgagaaaaaattgctaaataatattagtgatttttagcattttttatgtattaataatgttattgatgcaattaagtaagtatcatataatttaattcaataaatttaaaaaattatcgataactaattacaaaataagatatttgtattacttttagaagttgctcctcatcccaataacaatgctaaatataattacctaataaaagcaatgtcctttctcttataaggatcctctttattatggcctttttttggttgttaaaaagcgttcttagattaaataatagaaacgacattagacctcctagtcattataaaatagttcagtagaaatagtttcaactggaacaatttcaactcttcggtggacgaatgcctacctagccacattatggacaacaaaattacaagttctgcttatatgagaaaaaataaaaccagagaaacgagaagagtaactattacaaaatgagatatagttttctaaagcccattgagaatccatcccattgagagtattgataactactctcgagtcactctctacaatagcaaacttgtagcccaggtccatggcaaccgaaaccgccaaacagcaagccgccgcttctccctgctaaggtggtctctaacaacaaccgctaaggtggtctctaacaacaaccgctatacacatgctttgaagccccattttaacatcgcaattcaatttgagccaatccgcaagaggaggagaccaaacatccttccgacataaagctggggaaacaaaaagagaagcatgtaaatctgcaaaagcattacaaatattgtcaatacattttttcatgtcaacaggataattattataaaccttatcatttcgagtgagccatagagagtcaacaacaatcgaaacatagaggaatacctcttgagtatcaatgcccctgtgtttgagatcccagttgaatttgactcagtcccacatacgaataccagtatcacaaacaagataaatatcccaaggggaggccctccaaacatgaagagccctctttattatggtctaaaaatgctttcagtttggccctttcaacatttctatatagtacagttttgaaattcatgcgtatcatatcttaactttatgcagtaataagtccactgtggtggggcagctgagccaccttcaaatatggacgccagtatgctgcttgagcttaaataacatttcttttctcttttttactattacgaatagtttacaaaataagcactatatattattaattatattacttggatccttcccacaaaggtaagaactatctaataatacagctgtgaccttaggctgaggatgagctaaatttggtcataattgatttctaggatagtgggtttttctgtggttctcatacagagactactactatatttacacactaggtttgaagagattggttgacatgaaaaatgaacatagtcattcaaaaagaaaagaaaaaagataatttattgtcatcatatataaaacggaaattaaaaatttagattttttttctaattaatgtacaaatgcataaaggatagtagtactatgatattatccatttgagcctaattaatctttacccaagtggagatattaatatgtctatcctcttaaataccagtgattctccccattattacatgggattttggttgcaaaattcaacaattctaccctcaaattctcgagagcaccactctaacgtgagcgccttgctctttctcaggtcaaaatcatatttcattgttttggatgagttctcgccgagggccgactctacactaagagagactatgtttatacttagggcctacttaacttagagccttaataaaagttcagttttaaaaatacacatgttttatttatttatttatttttaaatagagaaaatacttattagtacattttgtttttacgaaaaacatatttagtattttgcgttttaaataatacttaattagtatctcatatattttcgcattgtaaaagtaaaatttaatcaatataattttgtcaatttaagtagacaaatttgagtaatatgtaattaaataattaaatttaaatttagaattcataaaattttagacaattgtattgataaaatttttttaaaagaaaattgaatttaggatagtaaatatgtatgattttaaaatacaggatatcacttaaacattattgaaaatacagggtaccaaacttatatttaaataaaatacaggataccaaatgcgtaaatgtagttctcgcctatcatgatattacttaagaatctagggtgaccattttggttggacatcctgattatccttccacatgattaacttatcctgattatccttccacatgattaactttttgatattgccaccttactatctaagacctttgaataatattgttcatatttggtctagggccttaattattgtgaatttgcccttgggttatatacaaaataaatcataccaacgtgacgtcaacaggaatattatacacatgattctccttatttatatagtcattataattgactcaatgtaagacttttttgtgaatgcacacttagaacatatttcttttccttaaaataatgtccaagtttgaatcatttctcggagaaaaaatacgaatgtgttatatattataggctgaaaaagaatgtcagtgtatctccacctctcaaagtcctcttgcagaaaatacctctccattgttttggtgataagacatgttgatcttagttgtatgttggaagaatgggtcagtagatgacccatcaaaatgaatggtgataatgtattatatgaatatgttaatgggtttacaaccccctcacagtgattgtgaacatatttaagtcaactttaggtctatgtttaattttctttttccatattttataccatttttatcaagtatatatatatttttattatttaagggtatatttttttttatcagatgatgaaatttaagctttgatatggatgtgtaaatgaaaaatataatatatatatata

SEQ ID NO: 15291 - DNA, 2425 bp, Cannabis sativa
tatataaagtgcactttctaagattctctgcccaaacaacaactgatctctattcctttgctggtttatctattattcttccaaacaccattatctgcaattccaacatataaaagtacctctagtgttttaaaatcaaattagttaaattatttattaaacatcaaaacataatgaacagatgatttaattatatttaacaagaaaaacaaaaagacggacctaaataaaagcgaaaatcaccattaaaaaaattaatgaaaaaaatatatatattttagttaattataatatatatttgtaataaaaaatatacacgtggctcaaaccaattggagccttaggccaaaaattttaattgtttttttttttttttatttgaaaaaaattatgtgtttttgttatatatattaatggctcgttaagtagactgtataagaattgtattatattaaataataaaaaatactattttggataaaatattttattgtattagttattatgaccataaattttaatacaatatgagtcgtattatttaatacataacaaatgacccatattagtttgtattataatgtttacaaatggtctggggtcaaccccgattgtgaccagacctctcggactcgaatccataccctgaccagactagacccagacctagacccgaaccccagatcccagacccagccccgaacaccaaaaatggatacgaacctgaaactggttctggaccccgaacccagatccaaaccccaaacttgaacacctgacctggacccaaacccgaaaccggcactggacctcggaccgacccttggcgcggacctcggatgtggaccctaaacacggacctcggacgcagacccggaccccagacccggagtgggttccctgccccagccccaaaccctagactccgtacccggacccagactcggtcataaatccggacataaacttggactaggaccgagaccctggaccccagaccctagacccaaactccgaaccccaaacccggaccccaaacccaaacttggaccccatatacgtacccaaacccaaacccagacccacacccagacccagacccaaacttggatctcgaaccctagattcaaacccgaacccggatccaaactcggacccaggcccaaacccagttccgcaccttggacatggagccggacctcagacccaaaccacgacttaaaccctgaaatcgaaccgcaaaccgaatcccggacccaaactcaaaccctgtacacacacttaaactgggacccgaacctcaggttcgattgtgggttctgggtttgggacccgggtctggggttcaggtctagggttcaaatttgggtatgagtctagggtcgggtctaagtatcattaattttattatgtaaaacaaaaaaaattatccataattcaatgctatagctaaatatacaaataaaataataaaaataacataatcgtaagtaaaaaagtaaaacatattatatttcctcttaaaacaaaactcattacacagcaccaaacaaaaccgaaaacctggacatgttattcaaatatatcaactttcctttttacaaacttgcaattcattctctatcttgttttttttttcatcttttggtatgatcattcgagagctcgtatcaacagattctatatcattgatattgtttcttaaatttcaaattatatatgtatgcatataaattcagaaaattaaaaataattaaaaaaacctaacaactacaaactttgtaaataaattgatattaccttacaaaataacaacaaatcctcaaatgtatgagttttcctttaaaacctaacttcaaactctaaaagataaccactcatcaaatttctaccaaaacatagcttatttatcaaaataaaacagaaaatagcttatattcatagttctaaacaaaaccgcatgaataattcatgtaaacttacattcggagctcaaataggacctctgcaccccttaaatgttgtgttcgatgctgccatttcctcctagttcgaaatcgcgaaatggctaagaaggaagaagaagatatggatttgggggtttgaatacgttttattgaggcccacgaccaatattgtcggaggtgacatgcatgcgggccgcgtccaacaaagcttgatgtgaacgacacgtggtggtcatgtggcgttcacattctccgaaaaaaaaaaattaattttttaattaaaatttttgccatatcatgtcccctctcgctttttatatccaatattattagacacgataaattttttcatgtctatcaatgctggacatgaaaatatctcaaatcttttctacgttcaatattttttttttgctgaacatgaaaaaagtttatttagaagtgaaaaggctgcttgc

SEQ ID NO: 15292 - DNA, 5944 bp, Cannabis sativa
  modified_base (3006)..(3014): a, c, t, g, unknown or other
cgagctcaagtcttattagggctcgagccaaggtagccgctaaggctaaaatggtctcgagaagaagatatatcaaaggacaataaataagcacaactagattatggtgcatctcttttttgtagtcaagaactcgtaacaaaacaaccaaaaaaataacctttgtgggaaagttgattagatgtcgttttgaagcttgttttatcattttgttgttagatgggttttcttttatggcaatggggaggcaagcaatgaccacgaaaagccctagagaattcgagtttgaagctaaagggcctttttcgaaagcaaagagtaaaagtttgaagttcgcaagccaagagatgaaaaaggcagtggcgcctcctaagtttatggaattgagtttaagaggaagcaatagaaataagagcacaattgggagaaaacaaatgagtcttttcataccttttgaaactattttactaataatataacaataagatagagaaacaaagattgaaagccataccttgatgaagttattcatttcatcctccattttttatttttattagggaattgtttctacaactagaactatgacatgaattgttaaataagcatgaaataagtaaaagaaagaaaaaaagagtatttttgagaaaagtggtccaaaccaaataatgggaagaacttggaatttaattatgttgtgtaactgtatagagtagacaaaactttatagtttgcaatttgcatcataaagggacaatatgatatttaatagaattatctactatatttaataagaatgggcaatgggttgtgataaaataatgatactgacttgacttgtcacaaaagtgtctacaaagaacactcatccattttaatttagggatataataactcatatatgtttgttccaatatattaattgtgatcctaataaaattttgtcatttttcaatataacttgttgtagtttggtatactctggatcacattgaacaaaaatgtcaaacttaattttttttaaccaaaaaattaacttttattaaatcaaatcagctatcaagatagctttcaaaccagcagagatataaccctgaggaaaacacaacaaggaatagaactaaaagaacgagttaaaaagttagctgcctgattctcggactgttcaacaaaattaattgaaatagaaaacaaaagagaagattgcataatccataattaaaagtctcaccggagtcggagacaacaaccgcttcttgtttcattagttttgaagttgtgtgtgtcccacattgttattattattatttttgcatttttgatatgctataaattaaatatagtatttttaaacattttataatataatcttgaaaaaataataaaattagattatcctatctaaataattagaagatcatagtgatgtgaaaaatattaacatgcctgaattatagtaaagtaaatttatttattttaaaatgaagccatttaataatttattcaattatttcattattaatggcacaaattttgtcatagtaagttaaaagtttgtccaaactacaaatattatgtcaaaaaaattacaattacttcctagaatgaaaatttaaaaattaataaaaaaaattaaattataataaatttctcaaaaaactactaaaattagcatactcttgaacgagtttaacatcagccttgcatcgaagaaattgagggaaaaaaagccaaaaaccagtcaacattacaaacccaatagtcaacattctcgacatcactttaggaacctgccatgtgtcacctaaagctttcttcagaatgatctcaaccgttaaacaaattccatgaagaacaaaaaaacacgtcacctcccatgtgggtggcacgcgcgacaggtaaaagtacataagttcgtgaactagcccagagacaaggaaggtggcaataatggctggaattgaggcccactttcggcccattaaagttgagataagcccaatagtgggttggtatacagtgtgacgcagtatacgcgttaccataaggttccacctacgtccccaaaaatcttgaagggatgtagaaaggtacggctcattaaactgtggctcgacctcgagtcccaccacggctcgagccaagccagcagtaatggctaaaataatctcgagaagtaaataaatcaaaaaacaataaagaaccaaaacgagattttgatgaatttgttgtttgtaatgatcaaggaattgaattagaatagccaaaagaagtgcttttattgggaaattgattagttgtcgttttggggtttcttttgtcgttttgatctctattggtagacaagcaatagcaatgaaaagaccaaaagattggttttttaaagctagagggcctttttgaaaagctaagagtaaaagcttgaaattggctaaccaagaaatgaaaaaggcagtgccaccacataaatttattgagtagagatttagaggaagaaagagaaataatgagacaattgggagaaaaagaaagagtctttttatgccttttgagattagtttagttataatgtagcaataagataaagagagtaagattataagccataccttgatgaagttgttaatttcattattctccatagttttgtattttgtattatgaaaaggtttgaaacaagaaatgaaatggtgaaaggatatgaaagaagaagaaaaagagaattatttgagatgtggatatgaaatgtggtatacattgaatgtgggacccacgttgtggacctttatacaggtacaaattaagatttaattaatgtataggtttttcaaccatatacattaattgtagagtggggtgtcttgattgttgactattgggattgaagataataatagtatgatattagtcacgtgtgataatagtgttttaataatttgtgggataaatatataagtttaatttttaattgtaaatatgtatgtttaatttttggcggtaataatnnnnnnnnnatatttttagaactctgtaggtacttgactattaaatatcaagtcattgttcacatgtcattttcttattgatatatttaaattaatgtttttttttttaaaataaaaatttaatgacatggaccaattaagaattgtcatgtgacaatttacttaatgtacttaacagttacctatagaagttttagaattataacttaggcattattattgccaaaattatacttaattatttatttacaatcgggagttaaacttatgtgtttatgtcgcaaattactcttagaaaaataagatcatatttaaggtgttgtgtggtgtattggtagagatatttttattgggattctcttttgtttaggttaaaggttccaattttactacagcccctcatgggaggaatatatgcttcgacctatgggaggttagcttgttgtagcgatgtcattcttaatggaatggaaaccctcagattgtatacggatgactcaattaaaatagatgaggtataagcttattaagtagtttttttttattaattagtagttatcacacgtattaaaaacagtcggcacatacaacatattttaactttagggtaagtttacagaacacctttttaaaggagtgtttcggtagacccctatctaattcggtatacgaaagagctttttagtcgaatttttttcatgatcacgtatgttatagttatttagaacaaggactagccctgagtaaatttgggtcctaacaaaacgaaatttttttggccatttataagaataatggtgttttgaaaattattaaaaaaatatgtatatatatcaaaagttttttttttatttgggccctaagatgagtgagtcttaggcgcggatctagcctcccttagcttagttgggccggtcctgtttagaaccacttgtgaatttttaaaaaatttcgagtaatttacaataccaaaaataagatttacatattttgttgcacaagtgactattttcccttataggtatggtaaataattatttatacataatttttaacattaaaaactattcgaaattttctaaaaatttacaaataatcctaaatagttacaacatacacaatcatcaaaataaatttgattatattttttttcaaaatgtctaaataaataaaaaaatctaccagaatttttaagtggtgtactatataaatttcctaaacgttatacaagttatcatcctatattatttatatacataatttctgagcacgaacataaataggataaaatataaacaaatcatcatatttctttcttcctttaatgactaaacaaagttattttactcttaaaaaaatcacgaatagcatcatattctccaaacaatcttaaatcggttttacaacgaagaacatgaggaaacattagcctaaaacaactttccataacgaacccaacggtcaacggtccagatatccacctgggcaatcgccacgtgtcattagtaatggtccccacaagcttcttcaaaacaatctcaaccgccaaacacgttccatgtaagacaaaaaacaacatgggctcccacgtgggcctcacacgacaccaatagaagaatatgagttcatgcatgagcccagagacaatgaacgtggccataattgctggtatagaagcccatttaggcccaattatacgggcccaaaaccccaatgtgggtttgtatatagtaggacgtagcacacggcttaccatgaggttccaccttctaccccaaaaatcttgtagtgagctagagaggtatggctcgtcgaaatgtggctcgagctctactccattcgcggctcgagccagagccgttgttgtggctaagattaggtcaagaatgaggtatatgtatatagggtgtaaagaaataaaatgacctttgggtgcatatatttcttgtactcaaacacactagtaaccaaaatagccaaaatcaagcctttaattgcatatatcacaaaaacccaatttttttggcctcgtttaggttttttgagagatgggttgttgttgtgtttattatttttgtcatcagaattaagggtattttggtcattttgaatctcaataggaaaacaagcataggcaataaaacgaccgagggaattactctttggcgggttttgaaccaaagggccttttccaaaagcaaagagcaaaagcttaaaatttgcaagccatgaaatgaaaaaggcggtattacccccacaattgattgaggtgagatttagaggtaagatgagaaaaaggggtataattgggaaaatgaatatgagtcttttggtacccttcgagactattttaccaataaaatagcaataacataatgataaaattattataaggcatacctttatgaacttgttcatttcatgaccctccattaggttagggtaatcctctaatcttaacatcttgtttagatattttttcaatgaagaagaagaagaagactccaacatgttgaccaaatcaaatgtggacaaagtataaatatgtatttaaaattacaaaggagagtgtgatgagaagtgggatatgaattgaatgaaagaaacatatttattcatatattattattattattattattattattatcatcatcatcaatgagcctagaacatggtataataaataataaaatggataatagagtattttattttgcttgttttaagcaaggatttttttatatttatggagaaatgagaatctttttttttatatatgcataaattaattttgtattattgtagaaatagtcttggagaataatctctatattattttttttaaaaaaaaaaatcaaaacatgaaacatatataattagttaattgtatactatacatcatttgcttttgaaaagcctttatataattaatgtat

SEQ ID NO: 15293 - DNA, 2882 bp, Cannabis sativa
tgttaccaaacgacacctatattattgcaaaagttatattttaaaagtgtattattaaagccggatactacaaaacttaataatataaaaagtttaaggtaaaaatactaattattcataaatatatacaaatgttagatggtgtcaccttaataccatgctaatacgactagtgataaagatatattaatatataataagtaaaaaatctcatatattttaaattaataattattataaaaattaattcttatttataataagatataaaaagatagtgttagacattatattgatgttaatacgcatcaattttattcttattgtaggtattattgttttgatatattgaaaaattatattaactatttttcttgatatgatgatataccttatagttataatagatatattgtttgtttttgaagagtttttttttttatttttacacttgaaagcaatttttgtttacatttttatggaattttatataaaaactcttattgcaactagcagagcaatctaaattacaacaaaaaatcgtataataacttacataaaaatcactttaaaaatcccgcgtgtaaaaaaattattttcaaactttattttcaaaactatataatattcaaaagtttatcaaaaaacggatggtaacatcatataaagaaaaatataatttcgaaagagtaaaaataatgtcccacctaattaagaagcactatatatatattattgttttataaattgtattgctaggtgtcttaaaattctatattaaattgcactttaataattctgttaaatatgatttattccctctaacgattcacttgttttaattaattagctaagttaattaggttataacttgttataattaatatatatatatatataaatccatattcattgccaaaaatatatatacccatatattaatttcatattataaattattaattaatttttctggcacgcgtttaagcctgatacatattatatcaatatatactatatgtataatatataataaaaaaatgtagatgtagttaactcgaagtagaagctctctatgggaagatatacatatatataaatattagttaattaattatggagttagtgctacgagtatgatatatagtaataatccaaatttggccaataatgaaattcacgttgtaccataactaatagaaattttgaaaaaaaaaattccaaaattcatattgacacagaaattttttcatttttttatttataaaaatacgttcaataaaaacaataaattattatttttttatatgttttatagtttatttttagttgtattatatatagttatatgaagttgtttttatggttgttttaatttttttgttgttttataatttatttattgttaatttatagttgttattaattttaatatatttttataattttaaaattttataaaatatttttgtaattaaaaattataaataaaatataaaagaatgatattttaaaaaagttccacacattaagtatatttatattaacgtaggtggctgggatttatattgttatatatacgtgtacttttatatagtctggcaatttgtatttgaaaaagctgtacacagcttataaaatattctcctctagtgctaatatatatgtaaaacatatataaattattaaaacttcctaattatttttataaaaacaatatatatgacttaatttggccaattttttttccttttcgcataactttatttcactttaaataattaacattatttgtaacatgcatttaaatttttttttttgcttaataactacatgcatttattaattaattgataattgattatcactatacatatgtacatataaataaaatcaagtcacgcgcacattagtaattaatttagtatttaaaaaattaaaaaagaataatttaatgatgttaatatttaaattgatatataaatatgtatatttcaatatattaaaaccgtatatattgtacctaaaataccctaacataagagagtcacatagagagtatcttgaagtgacagggacaaagttagtacaatatttaaaaaaagagataaaaatgatagactttaaaaaagaaggtaaaaataaaagaagacaatataaaaagagtatagattgtaatttcctcatttattttcatcagtataggggtgacaaaacgaatttcaacacacgaacgcaacataaattttatggattagagtcagaaaaattaaatgcgagttgaaagcaggtcgacacgaaataaaaataaattaaatagacacaacttccttaacacaaatttaatgtgattttttttaaataaataaaaaaaaataattaataacaatataattatgtaaaaatatatatttagtaatttaatattaagttaaaaaaaattaaattaaattttttataaataaaactaaaaatattttaaattttttaatattatatgtataaaaaactacatatatatataagggtgtactcttaatgggtattacccatgaacatgtaatattagaaaattttgactttttaagttttatttttctatctagttagaaaaatctcttatttttacattatatgggctaggtttattccatcgactaaaaaaaatcaagaaaacaagtttttcgggaaaaaaataaaaataaaaaattgaatttaacttaaatattttgtatacaaatatatttttgatatagtgttaaaagtaatatgttttaatgttttttttaattaagaactaagtataaaaatttaaaattttcttttattatttgccattggatcaaaatctaataatgtaatatttttaaaattgatattta

SEQ ID NO: 15294 - DNA, 4825 bp, Cannabis sativa
  modified_base (4001)..(4008): a, c, t, g, unknown or other
tttctggttaaaactttggcaggtttttccttcgctgttttcatttcgtttctggtttgatttcgaatttgaagcgctcgaaaatttggtaagtgatgtatatataattctatatgtttctaacagttagcaacgagtctgcttcttcttcagtttagctcgtctctattacttggtaatttcagattctgagtttgatctctaattatttttttatgctaattaggttgaaagtaatttaacgctatttttcattttggccaattattaaattaataatggacggtaatgatctatccacaatttgattgatggatgccgaccgtagagatacgtatggtcgtggttaatgcttaaaagtaaggaatcaaatccttattttacatcaaacaccttcttttcccctttttttacagcccctgcttttctctctctctagcttttttttttcttaataaataaaagtcaaatgggaagggtatttatttacgaatgaaaactcaaaggagctttaatcaaatattcatggcagttggcaggtaaattagttgtgtgattagactaacccaatttttctaaatattgaatttacacataatccaatagaagtacacgtattggaatccatgcaacttgtgaccccctttcattttcaatcattcaatgttagtagtatgaggataacaaaataatgcttccttttcctcattcaaaaatcgtttttatttttttcttttaacaacttttggtggaaagcatcattcgtactcctccatatccagcataaagaatcggcctacagtccttgattattgtttatacgcatttttcagtaacttaattaccataatttgttgtgtcaataagtgacggcccttcatactcaaagcagtagttccatctatgattgaagtgggaaagtgtgaagtttatttgtggcgcaggtaaggaggagtttcaagttgatttgattaagttgtctgagatttaatggcaagagtttgtggaccgtactttgatcctgagtatgagaacttgagcaccagaatcaatccacccaggtgtttatttttcttttactttctttttctctgccacctcgataaaaatgttagatgtgttttgttaagaaggaaaaaaaaaaaaaaagagaaaaaagaaaagggtgctagatgtgttgagttcaacgagttggggaagctaccacgaccaaaaatctcagtagcatctagtgttataatggcgttgttcattctgctttatgatctaattgtttcaggcttaataacctgcttttgtgaccgtggtgctcaatttatttgccacataacgcaatgctggaattatctagattggctgcatatgtcaaattggcgttgtcagctatataatttcttctattttgtattctcttttcagggtgtcagttgacaactcttcatgctccgactgtactctaatcaaggtaatgcttcttatttctccttattttccatagaggtaagaatattactatggttggacacttttttgttttcactagtgtacgtccccttcctaaaccttttatagttataatgagtaaaattggtataattgagatgtgtaggtggatagtgtgaacaaaccaggaattctgcttgaagttgtgcagatattatcagacattgatctcatcatcactaaagcttatgtatcttctgatggcggatggttcatggatggtaaaattgtcgtatttactttgaatgcttggattgtagagacatcacatatatacatataaatgcatatatatgtatataattgtcctcgttctgtcattggaaattcatttacgttagtaaaatattaaagtactatttctgatgttcttgatttgcttttggtccagtatttcatgtcactgatcagcaaggaaacaaaattacagatagaaaaaccattgagtacatagaaaaggtatgcctgcttctttatcatcctcctatgctcttgtgtcccttacttagaaaccaaagaaaatgttcatcctagctagctaaaccagaaatcaatataattatgattgtcaaaatagtttttatagaacttttaagccgacattccaaagggagaaagcatcatcaaccatcagggtaaaagctcttatatacatgttctggcaatattggaaactttattttcttcatgacagattactttataccccttctttctgcgtgccagaaaacggacttattcttgtttgaccaaaagagcatacaaagtcctttcatgacattatgaaaagctccacacgaagagaaacagattttgccacagattgggcgaaatttgtcttacattgtcatcacttgtttgttacaataggctttaggaccaaagggacagaccagagagggaggacaaaccagagagggactgaagactacaccagggagacaagttggtgtccattctattggggaacagacggccatagaactcatcggtagagaccgtcctggtctcttgtctgagatctcagcggtcctggccaacctccactttaacgtggctgctgctgaagtttggactcacaacgggcggattgcatgtgttctttatgttaatgataacatgacatgtcaagaggtacaggatccaactagattgtctttaatggaagagcagctaaaaaacattctacggggttgtgaagatgatgagaaagcgggttacactagtttctcagtcggatttactcacattgatcggagactccaccagatgttatttgctgatagagattatgagagtagtggagttaataaagaggtttcttctccttccttcaaaccaaagatcacaatagaccgttgtgaagagaagggatattcagtagtgacggtgcgctgtaaagatcgtgcaaaactgatgtttgacattgtttgcacactgacggacatgcaatatgttgtttttcatgctaccatctcatcagataccccttacgcatctcaggtatgtgtacagttaatcttgatactagctttaaatctagtactattgaaagatcatatcttgtactaagacttgctttggaacatcccaactcttcaatatgtcacatatgcattgcttggtgcagcactgtaatataaataacttctttattttcgaacatcctcgataattgactgttagttagtacccaccaatgaaatggggttatcaaataaaattctgcattgacatgagacttgagctgtttgaaacaatggtttttgctgcctcttaaatctaaatcagttacggtacgtttgccatatatggcttaatttattcctagaaatttgattgaaattattacaccatatgtaactgtaggaatattatatccgccacatggatggatgtacacttgatactgaaggagagaaggaaagggtcatcaaatgtatcgacgctgcaatacaaagaagagtaagcgaggttagtgacaacctttcacaacaccatattaaagaatcatctaagttaatttttttgcgatttgaaaatgtttataacacgtatttgacagtcacaatcatttatatgtctatctacttaataggaacatgaacaactttattagctgtcatccatcttttttttttctttttgtttgtggtgttgtcaatagaaatatgatgattctttgtgtaggacatgtgtcacatggctttaggatattttgtttgcacttgttcttcattaagtaaatatacattaaattaaacaactgagtcaagatgcctgataaatagtggtgtttaaaccaatctaagtttaataggttactgaattttttatttattaaaaacttaaatttttaatagagtgaacaaaagtagttagtatatttaatataaattaaattagttaacttgtcaaaattaaattggtttagaatacaactttttaagcgggattttaggtggcgtttggtatggaatgaaataaaatttaaaatnnnnnnnnaaattgataaaaaaaaattattaagttttttcaaatcttgcattggaatggtctttcctttcattttaaaatgtaatagtcattccaccaaaatgatggaaaggctattctatcggaatagtattccaatggttttaaatgcaaccaaacaaaggaatggaatgaaattatttcctttccatttcactacctccaaccaaatgccaccttagtgttggaaatttattggtgcttcaatagaaagaccaatgccaaaatacaactcaaagacaaaaaatacaagaacaataatattataacttgataaaatatacacataaatatataaaagaaaatgaagagaaaattacaaaaacataataaataaaagcacaatataaatagtagtaaatatagatgtgagaataatctcaacaccactaacactaagtttcaagtagaggaatcacaaaacctgaataaagttttacacctttgtccaaaagtttatttttcctaccacaagcacttagggaagaaagaaacgaaaatcgctttctggatttatcaagcttatagttactagcaaggtgttttttttgatagaaaatcagaaaaaatgtgtcttcacaagtgaaccaattagacatctatttatagtgtttataatcacaaactttgaaattcaaactcataacctcccatagataataaggactcaaatgtaactcatgcatacaccataactcttatagcattaagaatttaaaattaagatgtgtaacaccattttacacacttaatattggtaataaatgtggaggttacaaaatgtaag

SEQ ID NO: 15295 - DNA, 6844 bp, Cannabis sativa
  modified_base (1233)..(1233): a, c, t, g, unknown or other
  modified_base (4427)..(4427): a, c, t, g, unknown or other
atagtgtatatgtttatttattccgcatgttatatacacatacatatattttatattatacatataaatgtctaacataaaaaaaaaaacaagaagttgagcggggtcatgtgggggattagggcacatgaccctttttgtctctgtttccaaatattataaagtgtgtcttttattaaattttgtcacacatgataaactaaatattgatgttttatatcattatcacgttaacatcacatgtgtaatataaaataaaaattataaatatatcttttagaaaattattaatcttaaagttaattaaagattgaaaaaaaaaagtaaaattaatattaaaaacttttttttttcgaagttttggcgtggtaaaagccatatcaacactttgtaaatgtatgacaaaatttaatagaaagattattttataacactaaaattattctaagactacttttaattggctgaaagaaaatacaataatatatcatatatatataagggacaaaaatccgaaagcctataataaataatgtgacattattagatctcaatgatgaagacatgttttatagttgaattatctaattaaatcaagaaatgtaagaagaggaaaatgtaaatatatgtatcttagtaactaagccatcttatgcaaaagacacatcaaacatatggtttgagccagctacggccaaattttacacagtcaaagaagtggttacctaatactttggattatagggggtggtcaaacatttgatccattccatcccaaagcctagtttggtaattaacctatgttttttttttttaaaaaaaaaatgaaaataatagaagtagaaatatgaaagagatagaacattacaaagaaaaaaatagaaaacttatttattttctaattctatatatatggtatgtaagtttgaaagaaaagaaaattagtattttgtaaaattacaacattgtctttgtaattattaaatatttatatataatacttcagtcctttcatttttatttaactgtatatgagaattgatttctcccaatttttattggactttttttatttttatacttttaaatatatatatattttttttatatttttacgaaattttatatagaaacctctattgcaactaaaaaatcgtaaagaaactcctattacaactagccctgtaattactttagaaaccgaaactgtaaatttgaaaaaaaattaaaaanaataatatatagggtaattctccatttttattttcaaattttgagcacaaattttagtagtttaatttcattctatatttttcttattaattttctcttattcctttattcttttttatatatgtatgtgagaaatgttaaaaaatactactactgtttattattttcctcagagtcatattgttattagtgtaattaaatatcgggtctcatataacttaagaaaataacgaaatatcactaaccaatcttaaggcactgcttatataaggtgctgagtgtaggaccaaaaagcaatgtgatcatgaatatgttacatcatgtactagaagaaactcatgtctcctagactcctacaatgcaatttctttaccgaacttataatttgacttaaatttattggtgttttccaaaagagaaaaaaaacaattacaaaaaaagtgcttaaattaattggtaggacttcaaaattttcagcattttttcaatgtggaggtccttatcatgacaaatatatatagtcaaacgttacttgctgttttctaaacgaatcacatcatggtaaattaattaaaaatatagagtattgttattagatattaatagtgtctaacatgtcattttataattggtcagtaatattctttaaaaaattattacattatattatatattagacgatatttaattgtaccaataacaatattaatacataaaatggtatcatgcactactgataccttttaatatttgtcaaatagtatacatattaattaattgtcctttatgtccaaaggaattaattattacgagaacattctcactccaaaatttgagagatatagtcatgtgatttcaacatcattgcatgctttaaatattgatcaattaatttactatatatgatgttttcaaattaattaagtcccaccaactttatacacaaaaagaaaagggatcaagttaattgattgaattaataccatagattattgttcaatcacttccacaactagaaagactagaaaaccttaattgaataatttagtgttctcatcaaaagtttgcaataatatatattaatgatttgattccatagatacatcctataataactttcaaaagtacatcattatttagtctattttacataacatatatataaaatgtacagtagatcttcaaacagtacagaaagtaataatgttatcacaaaaaaaaaaataataataataataataataatacaggtctatttattatagtataggaagaaattatttaagaggaagcagatccatatatatcatataccatccatccatctcaattatacctgaacaatgtaaaaatccaatattggtcatgatgtataaattataataattaaataaatatatatatattttaatttcaaacataagatttgttaaaaaaaatagaaaaagaccaaattaacatggggagatacagagaaattaaaggagtagatgttattgggttttgaaattaattctctggaattaatggagctgaaacttaatttctcacaataatagtagtatatattcattaattaaaacaattatatatataaatataacttacattcatgcattgatcatctatgggtttggtttgtttgggcgttttttctttcgaccaaagcatgcctgaggagagtgcggttgaatcgttgtagcttcttcttgtttttcctcttcttggctattattattattattattattattattattattaatgcgttttccattttcaacagctagaacctcttgtggagaaggaaaccatttagtcctggaagaagaagaagaagactccattaatttttggctagctattaatgatatatttgataagataataatgatggcattgcaccttgcatcttctccaatatttatagcacactaaacgatctttaaaatgtataatttaattttttcatttttttattttggtattaaaagtcaataaaaatggcagcaaaatcggataagtttagttaattaatatatataataggactaataataaaagtatacaatatggctttaaacatatataccaaatctcatgaatctattttgttgaagagttatagaaacttctacaatttctgtttgtgtacatattttcaacgtacaacggcggttcatcaagtgatgaggtgttgcatgaaaatgctttattaatttatgtgttgtgctacatacgtacgtgtgaggaacttaattagaaattaattttagtgtaattaatagatatatatagttgaattaattggacacaaaatctacacgcatgcatcttccatctcatgaccaccggaccagtcttttagtgtgctatgcatattgccgtgagccttattatataaccaagtccaaattttatgcctttttgaattggtaattaaattctttgccttctacattaagtcttataatttattcttaaaaaaaaaagaaagaaaagatcaacgcatatcttgatgttaagaaagagagattataattctatatataattaaatgtaaaatgtaattggagttgaaaatgtctttgataattaatgttatatatatatatgggtgcactcttaatggatattacttatgaatgagtaaaattagaaaattttgagttttatgcttaatttttctatttaattaaaaaaatctctcatttttatatcatatgagctgagattgttgtatcggtaaaaaaaaaatgaaaaaaaaaattagcaagaaaaataagaaaagaaaaagttgagtttgagttaaatatttttgtatgaacatatttttgatatagtataaaaatagatatttttttatatattttcttttaattaagtagttaaattaagtatagaaattcaaatgtgtgatttcattatatattcgttattagatcaaaattcgattgtttgatatttttaaaattaatatttatagttaaatttatttgtaaaccattcatgagtaatacccattaagaagtatttatatatatatgagaaatactataaaagagtgtagtatatttttacgtgacaatattattattggtccaattaaatatgaggttctatatactaaaactaatcaattacaaggttatatatttaaagagattacacattatatcatatatatatatatntatatatatatttatatataagacacggcaactatatatggccataataacttattagctcatagtcatggttggtttcttccaccaactcgattggactagctattgtcgaatgtatacatttaaagtcaaaacatacaaattctcttgtttattttacaaaaaaagggaaagttattaatggaagatgaggtgagccatcaatattatactttggaaaatgatagaaatatctatatagtacttagctgtattgggctgatttgtcacacatttgacacgtgatgataaaattaaataataaattgatcgatagatattgaatttgaggttttcatgtcacgtgattcgatctaattcattgtgacaaaatgacatataaatcgtaaataaacataacattcttattagtaattcacatacattttctttatttgaataaattcacatacattttcggataaatatcatacctaatatattggagttttctttctttttttctttctattaatttctattttgttgtggctatatattttttttcttaatttttttttaatattggccaataaaaataatattgaaaatcactaatatgacactaaaacagaagtacgtataagaaagaaaaagagtaggaatacatatatgactaatataacttatatactacacacacgccgacataataaagagtaaatatatatatacatgtaaacataaatttatatataatatgtccaaataatttaaccttgcttcggatccaacccattaaatatcattaatttttgtttttctatatatataaattaaataatttacatgcaaaagttttcttttgttctagatttttccacttcgatgaacaaaaataataattttgtacaggtagaaggttattatttggaatgatagagagagattccctttacctaatccaccttaaaaaatattgcaatctatatcattatcaacctttttaataaagtcttatcagtatataagagtgacatcataaagtcaaagactttcggttttgtctaaactaaccatataacgtacgatatatgtatagtatgtcgacaaaattaaatttaatagttgattttgcctcatcactgaacatatatatatatatgtgcacgttcttattaattttaatattctctttgtattaaaacatattgataatatatattcaaacacatcttgtgtaaagattttgagtgaacaaatgtgaacattgaaggaaaaaaaaaattgtgacaatatgctttgcatcgatataaattggtcaatatataattcatacataaaattattaataattaatcactatacataaaaagattagaaaattaaagctttagaatttccacaatccatttaacatactaaattaattgaaaagaaattaatataaagttaattataattagtagtcaaaagaatatcaattccatccactatttaattttattattaataaataattctagaagattattcataataataataataaaaggtcataacaagatcacaggacagatacaacatgaatattgtccatttaataacttaattaatatattttaggttcaacgaatttattaattattaaattttattatttttactcaaaaaaaaaaaatatattttagattatccaaggttacataattttcttttttataacagaaataacttaacaaatgtatatgagaaaaataggagacttattaatatagtgaataatatttcatcatatatcttaataaataaatcaaatgaaaattgtgtatatatatacataaaaccccctccccccaaaaaaaaacaattacaacttacatatagagatagagatgtattgaaagagtggtagtagtagaagtagtagttcttttcttatttgatttgggttttttggttgggccaaacatacatgtcgttaaagagggctgaatttagtggaggagtactagttgtacttgtaggctgatcatcattatcttggctaatatggtttgttacaatagctacacattcttgggcagtagaaggatacttattaggagccattcttttactcacaattagggctgtacaaaaaaattcgtaaatcgcccaaactaaaccgaaaaaattgataaaaattacaaaccgaaataactcgaaaaaattacaaaccgcctactctgttaattgggcaggtagaaaataggttcaacccatctaattaaaccgaccaacccgatttgaattttaatttttttttaacttttaatttttattataaataacataaatgattaaatatataataatataaaggtatattcttaattgttagttttaaagtcatatatattgtgttatactttggtagaatgtgatatttttaattt

SEQ ID NO: 15296 - DNA, 11164 bp, Cannabis sativa
aaaaaggattatagaacattcataaatgattgaactacacaatccaacttacaaactgatccaaaattggtataatgatgaaatttttcgtatgaataagaaagattctttcttttccaagctaacgactttccaatttagaaaccaattgaaacagattaaataagtctgtagtgtatttttaattcatttatagttcatgtttataaccccatctcttattccgccggcgcgtgtatgtgcacgtgcgtaaggtgggagagaggaaaatggcggtggtcaggactggtgctgagttgacgaacttgaagctttgatgaataattcgaaataatagaacctctgatttttcttttcgaacacgagaaccaatataaaaactcaacaaattccatatgtatatgtataaaaagaaaaaaaaagaagaagacaagtttatctttttatgtttttgaaaattcactatttaaattgtgttttcttttttgtttgtttttttaatttattatgatgtaatgtaaagagtcggactaaacaaacccaatttacaatttttggtttgtttgttctgtcaccaatcaggaattgtctacttttctttctttttttttcctattcattatttttataatcagttcataaaaaagtagtttttatgtttttttttttcaatttgaattatttttgataatgtttgaccctgaatatgttgcaatgatatttcctgacacctacacctcatttatgtttgataactttttaattaattttaggaggactgtggccatttgattttgtgtttttgtgttagagaggcttggaaagagaaggagataatttataattcttatcgagaagtagattctttttatacggattatttttccctttttattatttttttttgggatttgatttttaagggctagggtttgctgtctctatactttactctcttccttgtttatgattattcaaggtacgaactcacttgggtcgttgatattttcataattcctcatctgggccacttgacgttcctctctttcgcatctgggtcggtcggtaatcttactttccttctctcaatcgcctcaagtcgctggatttttccttgttttctcgctcgattcgtgggtttcctcatctgggtttttgtttttcgatttttttcttgaatttagagtatttttaaggttaaaatcgagggctttttttactacttgattccattaattagtgaaatttgttcttctggtttcgttttgcgtttttcctctgtaaatttcatgggatcaagttgctaggacctctgtatgagtacaattttttcttcttctgtgatttagctctctttcattattgctccgcagaaggtagaatttttgaattagaatactgattaggaggacattgctgcctggttgtgatgaatttttcaatttagctctactctgaggacgttgacgactttcctttaccaaaaggaagtttaataccttgtcaactctctaggaatctgttcagaacaaatgtttcatcctcagggagcttcgaaacaatcttgtagtctcttagcagttacttgcggcggtgtctcagaatcaaaacttaaaaaggatgtgttagggaatcagtcggcatatcccttcccggagttggtctctgcagggcgtttggaggtgaaaaatgttttctttatttagtgtcaatcattctctctgttataattattaattatgagctcagttgcatatgcatctaggatttgcatagttagaatcccaggctttgtttccagtgttatatgatttccccccctgactgggacattgtatgaagcaggttcaaactctgactagcccaagcaaagaggagttttctaaacttcttgaatcttataaaccaaatcttgtatacttacaaggagaacaacttgagaatgatgaggttggcgctctagtgtggggaggagcggacttgtccacccctgaagctgtatctgagctctttggcaccacattgccttccaccgtaagcaaatgtttcatgtttagttgtaatattgattgtggactgtatctataatttgtttttcttccattcgaaattcttacacttcatagctattactacttatttctctcacttgtgtgaagttaagaaatgttaatgttatcacgaaaacactatgtctgtaacttgctgtaaaatgtgataagtactggaatgttatttacagtttcagccaagatgctagggtacttactgcttatcgtgcttgtatccatttggattcacaatttaaaagtagagagacttgaggaaggtttctcgatttggaatgtatatgtgtaccattaagtgtcaagttctataaggaccatcaccgtccgaaaggcattttttttaatgtagattgttttatattaaagattttcaacacaagtaagtggatagcatggaaagtaatggaattgcaattttttatgttaagtcccaaccagatttggcaaataatgtgatacttttttacacagttattcctttaatctcccatttcatcctttcttggtgaatttccttctattgtttgctatgtgctttctttatcgtgttcatactgcttggggttcttgattccttactactcttattttggtgtaggtttatttggagataccaaatggtgagaaatttgcagaggagcttcatttaaaggtaatttttctttgcctatggacacacatgaccaatgattactgtgaaaggagtaatttttaaaaataataaaaaaaaaggattgcttgtatctctatggcatttacattagtttcataagtttcattgactcagaatgcctcattctgcagggaattccttatgtgatatattggaagaacactttttctcgctatgctgcttgccactttcgtcatgcactgctttcagttgtaaagaggtatagtataaacttttccaccagcctataaattagcatttactatgtgttaagaaatataagtttctttctttcatcactttatgtgtttaaatatgtataaactaaacataaataattaaatgtaggatctgacttagatggtgtggatcattagtttggcataattgtgatccataagttatggatcaaagacgtgatctctttctgtctgctcagaagcagcttgaggtttcatgtagttcatctgtatttgttttgcattgcagttcatcaactcatacctgggatgcttttcaacttgcggatgcttcctttaggctttactgtctccgaaacaaccacgtccttcctgctaaaggccataagattagtggtgaactagggccatgtctacttggagagtgtttaaaaatcaatgtagatcctccggcagcagaggcagaggaagatgaagatggttctttagatgcagtccctgccattaaaatacacgatgatgatgtgagcttgaggtttcttgtttgtggtgtaccatgtgcattagtaagttcacaaagtaccttttttttttcctgttctatttaccttattactttatatttttgcttttgtacaatccctagaatccatatttgaacttacgagatttcttttgtaaatttgatttattttcttccaggatgcaagcttattagaaccgttggaagatggccttaatgcccttttaaatattgaagtaagtcttatactttatgctccctggattaagacccttaatttgcttatgtttgtattttgcatgttcttcctgatgaatacattccatgcattaagtgcactatttaccagttgaaactggatgcatttttctgcaacaaatttctatcgaaattaatttgctctggttttcattttcttgttctggtcctttttctacttcagatacgcgggagcaagcttcatggaaagttcaggtatactgcgtgttgaacgatttttctataaatgcacatttatacactagagagttctgtgttgtcctcctgttggtttatttaattgggatgcatttaggcgttggttcttttaaatcactgtttttatgtgactgtacttctctaaatagtatctagtttgtttgttttttttctatttttattattatcctagttttagtttttcatagtgcatctactgctctttgtgggtatgtatatgttactaatatctttgtaatgtggtcagtgctcctccaccacctcttcaggcgggaactttctctcgtggtgttattaccatgagatgtgacgtatctacttgtagttctgcacacatctcacttttattgtcgggaagtgcacaaacgtgctttgatgaccaggtgattgcaaagagttttagttggaaaggttgttgtgttcaagcattttgtttcttactataatttattttcagctgttggagaatcacataaagaacgaaattattgaaaatagccaactagttcgctcacttcccagcagcgagggaaacaaactacctttgtctgaacctcgaaaatcttcttctattgcttgtggagcaactgtatttgaagtatgcatgaagattcccgcatgggcgtcacaggttttctaacttctctatctaatgtgaaatctgcaaatgattttttgctacagttaagcttttgtctttaaaattactgtacatatttcttttcttgttgttcgttcttccatttttctttaattttaaaaattcagatgtatatgatatctatgtttgtatgggtagctaatttattttgtcctacaatttcaggttttgaggcaactagctcctgatgtttcttatcatagtttagtggcccttggaatagccagcattcagggattacctgttgcttcctttgagaaagatgatgctgagcgcctgcttttcttttgctcaagtcaggagagagacatctcaaatggcttgattttcagcaatcctcctagttggttgagaccgcctgctccaagtaggaagaggtctcatccatgccaagagagaagcgtggttgtgtatgatggttatggtctttcaaaacaagataatcccaaaacggatgaagaggacaaggggagagggtcagtaaatggggttagcactccactactgccagcaaggcaacgattgaaagttgcagccatgaggccaatacctcatgttcgtaggccaaaaatggtacccttttcaggaacttcagtggcagatgggcatgatggaagccaagttaaggcaaatattccggttgctcctcccaccaagctcagcatagtaggattaactcctgcaactcagcgtaaatcgttggcaagctcatcacaggctaagcaaattatttccttgaatccattgcctttgaagaaacatggctgtggtagaagcccaatacatgcttgttcagaggttagttatgttctgctcagagctcaaattagtttctagtgtttaaaatatggccagcattatgcttgggtatgaacttctacaagtatgatttccattattttctataattatttgcttgtagtaggttatgaaaacacaaattttcagttattttactcaactctttttcttaatgtctattgtttgtattttgttaccttgtttctcctacataatcattcattcacatgcaggaggagtttttgaaggatgtgatgcagtttctaatgcttcgaggacatacccgacttatccctcaaagtggtattgccgagtttccggatgccatactcaatggaaagcgtcttgacctctacaatttgtacaaagaggtgagctcttgatcccgaattcaacttggttgattcaattaaagtgcaggaactcttgaactgaattttttgggtatggatgccctttcaggtggttaccagaggtggctttcatgttggtaatggcattaactggaaaggacagatcttctctaagatgcgcaattacaccatgaccaatagaatgactgtatgtatagaaatcttttaacatgataccactttcacatgcacagaagtccttaatatgatactactatagtcatcttatgacaataagaatggccaaagaaatgtgaccatagcctgggaagaggtgatattgagattataatatatgcattagcgaaattacgctaacatttataatgtgggcactgggcaagaatgcaaagataattcaattgtaaaaaaaattgaatctggacaatgaatcttctctaactaccaccattataatggcagggtgtcggaaatacgctaaaaaggcattatgaaacttacttactcgaatatgaattggctcatgatgatgtggatggggagtgctgcttactttgtcacaggttcatatttttatggatttatcttatatattaatatttctttgtgctgaaaatgtagtggatattatttacaactaaacacctaaagtctactaataatggtatttttttgggcttctgttctacagtagtgctgcaggggactgggtaaactgtggtatgtgtggtgagtgggcgcactttggctgcgacagaagacagggtcttggagcctttaaggtaagtatatttcattccaaaacaatctctcaactggagggtgggttgtgttggtacactcatgtaaataatttcttccttatcatattttgttataaactttttcaggattatgccaaaacagatgggcttgaatacatctgtccacactgcagtgtcagtaacttcaagaagaagtcacacaaggtttcaaatggattcggtcaaggactaacagcatcatcacggcagctataattcaattttggttaagtttcattgtttggcactctaattacaaggtcgctttctcccctaatcctgcaaaattgttactttgttggtatgtgtactattcgttaaaggaaatggaaggtgatagggaaagagaagttagggggagaaagagaggactaaaaggtaggcaagtatagagtatatcagtatactaatgttaatttaggccaatatatttatcctaattagtagtaggaaaccttcatttttgtctccttatattgctctcttttcctccccttttgttatggggttttggggaatttgatggagaagaaatctacgttatataggaaagggtggttgtaatatatttgtatttccattttcccgaaattgacatctactaatatttttttccttattcaatgaaagctaatgataacatctacctcgactagtctttcttaatttgaaaactctttattttactttatttaaaaaagtgttttgttacttcatgaaaaattggatcacagacttttttcttataattattcaaattcaattataacggtaagcacaatcatttattgtttttaattttattgaaacttgaaagatttgccataccgctgcccctttagctgcctaaatttatttcatttatgtatttagcgaatgaaaatgttcatttccaagttaaactcatttatgtatgagcgaccattcaatttttcaagataaacaatccgaattattttttaatatgtagttctcaatccctgtatatgcatccatgtataaatatctatctaaaaccaaagaaagaataagattaaagaaaaaacacatcaaaaccaaaatagaataatggcaggatcatcgtctaccaatctcaatcctttggttgatgatttttacttctcagctctgtttgatgatgatgaattatttcccatctctgatgagaaatatgcacatgagttacagctccaggaggctctaatgtcagcagcattttcatcaaggaaacttttccccgttaaagaggagaaagatcataataatatgttcaaaactactgcagcggatcgtttgttgatgaaaaaggttaagttagaaaaagaagaaggtgagtcttcttcttcttcttcacttgtagtagctgccgccggcttctgtccaatctgcactgaacccaaaacgacaagagagatgttccgaaacgacaactgttcccactcgtattgctccgactgtattggtagatatgtcgttctaaagattcaggacaacatatctatggtcaagtgtcctcaccccaactgtggaggcgttttggagccgcagctctgtcgttccattgtccctgagcaagtgtttggacgctgggaaaatgctctttgtgagtcgttgattcttggagccaagaagatatactgtccttttaaggattgtttggctatgatggttgttgatgatggggaggtgtctgtgacggtatctgaatgccccggttgccatagactcttctgtgctcagtgtaatgtttcatggcatgaagggactgagtgtggagagtttcagagagtgtctgggaaaagtggttcaacaaagatgtcgtcttcggagaaggaagataagatggtgctagagcttgccaagaaaaagcaatggagaagatgtccctcttgttgtttttttgttgagaaaacagaagggtgtcttcacatttcatgcaggtcaattttcatatttgattaatgatatcttatacatgttagttttttccaaaaaaataaaaaataaaaaaattgcaggtgtggaaatgaattctgctatggatgcggatccaaatggtcttcaagccatgattgttcttctaattaagagtaaggaaaggactgcaaaacaatggaccagggaagaagatgcagaagaagaacaatatatgctattttaacattgttttctgaaaattaattgcttggattataaatatgcttttctaagacttgatttttctgccatgtatgctgatttttgactgtcaagttgtcgtttcttttcaagccactgatctttttcacgactaatttcagaattcaccaatccgaaacaaataacacgactaagccaatttttggattaagtatttaaatgaaggttgcatctttcggcttgtatgtcattcaatgagaaattagacattgacaaaatttgtcattttagcattgttgtctaaagataatttacacaacataattatattttttcttctgatcatgcatccacatattaaatcgttttgcaagtctgaagtataaaaatctgtagtaaattagcacatatagttcattatttttttttttgattcactggctgaatttgggagaatgagtcgaagataaaagataaaatcctacggtgaatttgatacatttagatttttatatttatcctatttgattatatcattatttattttctgaagtctaaagaatttaatcgaaacataaaaatattctacgagcaatttggcaaaatattaacacatttgcattttctctttcaattgtgcatccacatgttagttgtagtgactcgaagaataggggtaaattaatttctttttatacctctttgagtatatctctttttcagatttacgtgagctaaaaaggtgagtggagataattttgttattaattgttttcttttatcatgaccgatttttataacggttaacacaccccttattaagaattccaccgcatttttttggttaagaattctcgatctaagcatgtatggattaggatatgaaagaggtcaaaggttaggaaatgaagttattttccattataagcatttgtaattattatttcccttattagttagtgtttatggtagtttgttgattttattcttattacttgtatcataaatatattctctacagtacgtcaaaaaaaaaaattctttacataaatatgtaaaatcacagagagtaagattaagggggggataaaaacagagaaatggcaggatcatcatctggcagtctcaatcattttatcgatgatttctacttctcagcactatttgatgatgaaactgcactccaatctctgatgagaaatatgcacacgagttacaactccaagaggctctaatatcagcattttcatcatcaaaaaaacgttctttccccattaaagaggagaaagacgaagagtttttaaataaaaaggtcaagttggaaaacaatgaagggcaaggctcttggttttgtccaatctgtacgcaccaaaaagcataagcagagatgttaaaaaacgacaattgctctcactcgttttgctcttgactgcgttgggagacatgtcgtttcaaagattcagaaaaacatatatccatatccaaggtgaagtgtctactccccaattgtggaggccttttagagccgtggctctgtcgttccattgttccggagcaagtgttttaacgatgggaaaatgctctgtttgaatgtgttatccttggagccaagaaattttactgccctttttaggattagtgactaaatctgagtaccccaattgttatagactcttttgtgcgcagtgtaacgtttcgtgcgtggcatgatgagactgagtgtggagcgtttgaaagagtaaccaaaactggtggaacgacgtcgtctttggtgaaggaagaacaagcagcaaacggagagtatgtcccgtttgtaattattgatttatttatttttatgttgagggtaactgaagtcaagctgtgatattacatttgatttgatgcaggtcattttttattacttttattttcacggttaatttataacattctataatttttttcatcattaactttaaaattttggaggttaattaacgactgagccaggaatagaggggggacaattttttttttctttagattatatatattttcagagtaggttaacatacatttttacatttattataatttcttttttctaataaatagaagtaatagaaaaacatggccacctgccccatatatagctctttatatattataaataaagtctatttgttattccaaataataatttacaggtacggatattaattctgctatggatgcggacgcaaaacaaaactgactttttttttttttggaaaagcccaaaactggacttcaaggcaatattgtgttctcatctcatcgaatagctgaaggaaaagagaaataaggtatgtagtagggctgtacataaattttcgtaaaccgtccaatccgaataatccgactaaaccaaaccgacaaaaccgaaaaaaaatacaaaccga

SEQ ID NO: 15297 - DNA, 6890 bp, Cannabis sativa
  modified_base (6726)..(6734): a, c, t, g, unknown or other
tgcgtgttggatttatcacatcaaccttccacactggggtagacctacatgactccaatttccttcccccttcatcataatggattctaacctgtaactgaaactttgtggagaggagagatgtggcgattgctgagtctttaattttattttatttttatcttaaactcatctaatagatgcatgtaaactgttagggtttggatattaaataaagagggtaattgggtaactgtagtaagaggtaggttgtatggttattgaatataggagtcgggaaaatgtatggggattgagcttaggctctaaggagagttgaggtctctcaaatacctcaagttctattgttctttttatcactcatattcatctaataccaatatttcaatgttccatgggatattaaataaagagggcaattgggtaattgtactaagaggtaggttgtatggtttgggtagtatatataggagatagaattgaatacatgagtggggaaaatgtatggggattgagcttcgacccttgagagagttgaggtctctcgtatacctcaagatctattttctcactatcactcatattcatctaataccaatatttcaacgttccttctaattgttaccggtttgctattatttgaggctctatttcttgctatatattagttaggcagcagtaagttcctatcaagtggtatcagagcatcgatcttaagactccgctatggtgccagtgttaccactattcaacgaagaggatctgtatggctgggttcattgtatggagcaatattcccatgctcattggatcccaaagaggcagaaggtggcagttgctcaaggactagagggtgttgcttggcaatggtttcaagaggtagaggagcaagatccgatcaagaactagttggaatttcgaataacgttattcaattgttattgtaaaatcgaagacgatccattcgattaattgatggctctcagttataaaagctcgatgatggaattctagactcaattcaatcacattgcaacacaaatgcttggtattccaaaaaccttccctcgtggtatattttttgggaatctaccgatgaagatggtgagtaaggtgcgtgaccatagacctaagaccctctctaatgttccggcgaagatgaaattgcaataccagatttgcagaatagcaaagatctacagattgatctctaaaagcattcaaaccaagaagaaaaaataatacactactgaaagtttttattaattgtaattttagattatagagtatacgtatatattgaataacttaagagaataaagtaacaaattcctattttctaggaataaaatattctaactaaagcttacttatttttttattttaaataattcaacactcaccctcaagtcgggtggtaatatattgtacaatccaagcttgtctatcaatttgtcaaacaaaggcatatgcaatgcttttgtaaaaatgtcagagacatgttgagtagtacgaatataggagactttaaggaccccttcatcgatcttctctttaatgaaaatgtcgatcaacttcaaaatgttttgtacgatcatgatgtactggattgtgagagatggagatagcaattttattgtcgcacctgacagtcattggactttgcataggatccattagttcattcagtagtcgtttcagccatagtgcttcgcaaacaccaaccggcagtagagcataattcaacttcaacactactcgagacaattccttgatgttcaatgaagaaaacccagatggttagatatatcgcaccgcgtgatacttcttaatcacaaagatgatggaatcgatgaggctagacacgaacatcatgggtctcaacagagatgctctttcttggtttcagtgggaaaactagagacaacccattatgtcgtgggtgatacttaaacacatagttctcctctgctttcgttcctggccgattgactctctttcagaggagctcttatcagtggtacagtttggcaccattaaggaatattgagtccgatgggaagtactcgcatctcttgtcccctacgtgcctgaacatatcttggaaggtagtttcactaacaggttaaaggatgagattaaggccacaatacactttctacaacctaaagggctggcccaaataatggaaacgacccagagaattgaggaaggccatcacttaatgggccctgttacaaagcccacctcaactaaacctaaactcagccccatttcacctaccctatccaactatcaggccttctcctctcgttctcttcatcttgtgagtcagtctagatcttcaagcttctcctcgaattccatggtgtccacagcgtcgaaagttggtagtagccgtccaaccatcacaaatgcctacaaaatatcttactcgtgtttattgtggaaaatatcttatagaatatttctactctaagattatattatcaaaacgctaaagagcacctatggtgcctaacatccttataaggtgtcgtatcattattagtacaattgtatgaagttctgaacttgtgacctccttgaactttaagaatattttaccgctacatcaaacaatattatttaataatattggtaaactagtatttgtataaaggcccaaaaatttttatttaagcataaaccccaagtaacttagaaccgattggaatttcaagtgaggtgactgccctacttgggctctaagtgccttcacccatgatcaccataaagttaaatatattattgaatatatatcaagaagttttgaaagatacaacaatcctttcaatgattgagtggtattgtttgatggtagatgaagtgcaacggctcaaaaatagtggagcacaactatctacaaccattctggaatttagcaccaagaataattcgttggcaattggtactctattacacaacagtgtggacaagttgtggggccaacttcatttccttgagaaagacaagttcaagagtttggtttcacaaaagttatgtactctattacttaattggtttgttgacaaaggacgagagcgacaagagcaattagagctcatcaactctattttgacattggagtgacccgactttgagtaattcgtgctcaccctttttattgttcaggtttggtaaggcagctcagagtcactcattggttgtgcatacaccggcattcccttttacaaacttctgtccttgctgccacattgcaacaatcacttgttcgtcccacctcaagagaaaagatgactttgctcaactagttttccgagcaaggtcgacttgctgaatggtggtgtatctttcacagcttgaacaataggcatttgctggcttaggctcttgggacctcaagttctattgttctcactatcactctatattcatctaataccaatatttcactgttccatctatttgttactggtttgctattatttgggctttatttcttgtaatatatcacttaagcagcagtaagttcctatcataaacctcgaaccatcttttacatctgcaatcatctccgcaggaaaaggaaccttaacatcccaaaattcatgagcagactcaattaactcttttcagaagagagttacataagagagctacatatgtacttagcaacacaagatgtaaaagagtgttaccttagttagagttgctatgccactcatcctctgcataaaattcagagctaccctttcagctacaacaatgctgtatgccgttcctgcatacgaaattgaaaaactaacttctaataaaagtttcaaaatgctactaattatatttgtttcctcgtttaccatagactcttccaatctttaggcctttatgaacataatcaccatctttttgagaccattctacctgtttaaaaaaagaaaaaagggaaaaaggaaatttaaatgtcaacaaaaaagttcaaacaccataagtaatccacgaaaacaaatagcaggccttacaaccttcaaagaaggatcaacttcctgaaacaccatctctgcaagtgcgattccagcaatgacaccatcctccttcgctaagaaatgggcttcaacttccacatctgacgggacagtggccagtgtcgtcacatcacctacaatggaagcacgaaaatttgctcagtaatatttgaaatcatgaaaagtgttaacaattagtcactacatataaagaacttactattcaagcctgcaacatgttaatagcatttccaaaacttagacattaaagacaattcgaacctaggtcaccagcatcttcagcaagggctaacttgataacaccattcaaatcataggtaggatgtgaaggaggctttattaccatggattgaacagagactccaggatttgcagttgcatacatcctatcacttcgcctaaaaattcaaaattttaagaatttatacataaatatatgcgtatacagtatatattttcattgctcttagttctttatggcttccaataatctgaataataaataaataaaatctagatggcttgaacaagaaagaacgatctgcctcgtgagagagcataaacgccaacgttatttcccgagaaaacaaaattctcaacattttaggcttaatgctgaagaaaacttggtgaggatgtaaaaagctgccattgtttggtttccgagaaaatcaaagaaacctaattatactaattaattgtgtagaaaaagcaaaagaatgaagaacacaagaaactcacctctgaactgatacagcagtgagcaaacgaataggtcggcggcaggcgcgcgttagcttctgagaatattgaggcagctgtggctgtagaggttggcagtggagaatcatgggcgattggataaacaaaataaccatctcacaggattgaaattggcaaaataatctttcattttatttttatttttttaatacatttaatttattaaaaatagatgagaacgtgacactcaattaattttaaaaagccacctagcaacaaaaacaaaaaagacaagctcactctcttttttatttctcttactgctaagaccaaaaaaatcagcccctcttttccttcttcatgaactttcgcaggtgacagccatagacaaagaaatttctagtaataattccgatagaaaccccaaataactcctctgctccttctttttcttcttcaatctcattgtaaacattgttttttctttaatcttcttcatttctcttgtttgtaaccattaatgtttttcatcatcaatctttcaaaattataatggaatctaccaatcaaacatcaaccaaaatttccacacctctcaataaaacataggtaaagagcgtatgtgagttagggattatttttgtaaagggataatgagtaaattttcaatttattttggcataagttacggtttaaaagtgaattcattgatgtagaaatgaaagaaaataaaaatagtatgctgcagaaaataaaaagaacaaaaattattattgaatggaaaatttgagttgagtcgtgtttgtttgaatctgattcatatttgattcatttagactatttgtattttactttttcgaccttcatttttgctcttaatgttgaatgaatcagatctttattagtctttaaaataattgaagcttttctctctcgaccttccagaaggtatgcgaaccatcgttttcccttgtgagatcttggtccttctcgtccacccttatcagtttagtggtggtttgtcttatttctttctaacttttttcttcctttttctttacattgaatttattgctctgagatttattattgccctctttcccatcgcataaattttagccagagcattaaatactcgatcctccattttctcctgcctttcgattttcttcatcattccttttggtctcctccccatttactacaaatcccccaaatcttagcctaaatatatgctcttggagattgtaaaatggaggcggatgactgggttcccgaaaccattcagctctcctccatcattgtagctaccatgtatgagactagggatgcgaatagggaggtttcgagacgagttcttagtgggttttgattcttcctttatataacaaagcttaggcattgttctcctcacttgttccttttgttttttactctcttttctattcttttaagtgtttctatatctacacctatggatgagtttttgaataatgtctgcaagctttagttcttcctcctgacgaaaacactgtatttacttatgttactaattcttctagttcttcccctgctaccatcaaccttctccttaaacttcacaccattcgaccttataatcgtccatcccttatgaacacccactctggtaactagtcatcgcagtgtcgtttccctgtgtctgtatctgaacatgctgatggcttgtttttggttacttttggttgtgagggagataagggtaaagtcttagaaggtcaaccttggcattttgcttagagtgtcagtatctttgttgcccctgacagttcttttccaatcacttttgataatcttggctatgtccgttttgaattcaagtgtgggaattatagataatcttattgaggttgataaggataccattaagaagggtattggccccgttgtgaaaaattgtatacgcaagtgtacgcannnnnnnnnaagtaataaagtgataaatcgagtatcgtctccacaggattgaaaattggaaactaatttataaaattaattactcacaaaattggtttcaacaataataaaataaagtgatgagaatatgtaaaaaaaattaacaaatacaaactatgaagaaaa

SEQ ID NO: 15298 - DNA, 5853 bp, Cannabis sativa
  modified_base (93)..(110): a, c, t, g, unknown or other
tttatttttattttattatatatatataatattttattattttattaaatataaataaaaagtcacccatgattttctcataaaccaagaatnnnnnnnnnnnnnnnnnntttatatagaatagatattcatttatatttataataagctaataaagccgatcatatacaatatttgattgagttagctggcttgtaaattggattaaaaaatttcatttgattaaatcttcaagcaacctttggttctttttttctctttgatcctattcaacgagtcgacatgtatatgaaatcattaatcaacccaagaatatatataaccaataatttaatgacgtgacattattgtttgattggaaacactaaagaaaacaaaagttaaagaattattgagagtgtcacggtaaaaccggagatctacattaattttagcaataactatattgatataattatatgtatagttcaccgttttcatatttacgctaccatttataattttcacaagctcaatattaaataaataaataaataaataggaacgaccctaaaggcaaaagcatatacatatagaaatccacttgcgactaacctaaatatctagttatctgccacaaaagtataaccgaaaaaaaaaaaatatggcctttgcatttaagttcacttctccttatttactatcttcttcagttttcttttgtctccttctactcatttatttttctccctttaatcaacgaacccgttttagtacactaaacaatccttcttcttcttcttctaactcagtagtatcagagaaaaacgacaccgttttggatgccacagcgccagttttaggagaacttaacaggcaaggatatgatgatgatcatgagtttccaatttccccagctttggctcctgaaaatatcaatattatccaagtaagagcttattaattaatcctatatacataggtacttaacaatttattatatatcacttgagttttcttaatacgttgtttgaattgatgaatagaggaagagaaattatagcagtgtacataaaattgaagatgagttggccagagcaagagccgctatacgcaaggcaattctcaccaataattgtacatctgataagcacgagaattatatccccactggcgatatttacagaaactcctatgcctttcatcagttgagtccttcttttgtatatatattaatcaaactattttttttttttttgtacatttgtttaagaattgcatatgtataccccaaaacctttcactaaggctctttaatttctttttattgaaaaggttgataaagaatttaatttaggatgttccctttataaaatatactctactctcaagccagtccttgtttcttttggtgaaagcaatcctttttcagctacattgtcccactaatattctcattacattacattgctcttgctagaattataacatagaattatgagctttatgagtcattattattattatttttgaatgcaggcattattattatcaagttttcctcaattagggttaattaagtatttagggttactcataaatacttaattaaatttatctaaaaatattgcttaattatatagcatatgagttattcgtgtatttatacttaaagttaaacctttagctagctttcatgggagtagtgtaagctttaacacaactgcaaggttcataaaattcagagacatatattatgctccgccaaaatatggagcattattctttgacaccctttccttactggtattttcattgtttctatacacgtttacattgcttaaacatgactccaaacttctgacttgatttttcccaaaaatattatattacatttctttaatgttttattataaaatgcgtgcttcttttatataggagccacatagagatggtgaagagattcaagatatgggcctataaggaaggagatatacccttgtttcatatggggcccatggttaacatctactcaattgagggccagttcatggatgagatggatgctagtgggctgagcccattcttggcccgtaatcctgatgaggcacatgcattttatgtacctataagtgtgaagagtatggctgattttctatatgaacggcctagaccttatctcttccatgggcgaatggtccgagttttcactgattatatcaacgttgtggcccaaagataccctcattggaatcgtagccatggtgctgaccactttatggtttcttgtcatgattgggtatgtcatgctattatacttgatgatttactattttattaacactaaaggcttatatagtgctgtaatgttcaacatcatacacaaaaggaatatacagcttaagaaaatctgtaagctgtatattctatgctacttcgttcttcactatataaactaacatagaatatacagcttacaaaagtacttgtttctaggctttcttcttctagtagacctgtgttttgttttcacacataataactcattcatagacttgacatgattcatatatgaaaactacgatgcatgatgctctcagcttaattatctagttaagataacattgttatttgttttataggctccagaaatcatacgtgacgatccaaagtacttcaacaattttataagagtcctatgcaatgctaacgtatcagaaggttttcagcctatgagagacgtttcattacctgaatacaacttgccaatgaatcacaaacttggaccacctccactaggccaatctccgacaaaccgcaaaatccttgcctttttcgctggcggtgcccatggagacattagaaagtacttgttcgagcattggaaggataaagatgatgaaattcaagttcatgagtaccttcccaaaggacaaaactataatgaaataatgggaaggaccaagttctgcttgtgcccaagtgggtctgaagttgctagtcctagagttgtggaggccatgtatgaaggttgtgttcctgttctcatctcttataattattcgttgccttttggtgaggttcttgattggaccaaattctccattcaaatctcacccaagagaatacctgagcttaagaagatcttgaaagccattcctcattccaagttcttgaagttacaaaaaaaggtgttacaagtgaaaaggcactttgagctcaacagaccagctaagccgtatgatgcatttcacatggtgcttcactcgctctggctaagaagacttaacattaggctaccacattgatttaccaggctttgtacacattatcttctaattgatttaactatgaccccattgagtatatgattctattccagaaataatagagatgctttagattcaataagtcagacaagaaaataaagcaaattttggtaaatggccttcaaaatcactagaaaacatcctttagaaactctcttgtgcaactctacaaagactgatcataatcaaccatacacatacaccctacaaaattgctaagagaaatttaatgcatcacctcctaagtacattgctctccgtatctgtgtaagtgagtatctttaagtgtagaagcaaaacactaaagatgttcaacctacattaccattttttcaccagctcttgcctccacaggaaaacttgtttggaagacaatctcatcatttcacatttctagaatttataatgtttaaccatgtggaaattgaaaggcattaaaaagtatttacatgtgattacctgcaatcatgtagattttctccaaatcactgacccttctcttcacttctatcttgttcaagcaattcatggtaaaagtataaaatgaggaaacataaacaaatgaatctgtaatgacataatttattttgaaaatgtgaattgtaacaaataaagatatacaagctggctgagtatctcaatcaaataaactattatgaatcatagttccattttcttttatgcatgaaaagaaatatgcagagcaatctaatttgctcattccagcttatcaccaatatgtgatagcatatcaacacgctatcatcttcggtctatgttaaataattgtgtggttaaaaagaaaaaatgggtccaccatcgtcgaagacttggcaattaagggtacaaaattaccctactcagtgcttgtctcagcactttctttcctgaaagcatgcaacctttccttcagtttcttactctgttcaaagttttttttcctctttagagctttctgtgaacaattccaaactccttaaaatcaacataccattaaaacttgaacaataaatagacactagctgaataaaaactcacttcctgtcgaaagcaacgatcaagctttatcttgagatctgtacattcaccaaagaatttaccaataggatgatccaaatgacactgctggaacagctcaattatctgcacaaagcagaaaataaatattgaagcgtcaatctatctttctatctttcgctgttgtttcataagaattttaatgcgttttggcctaaacaagttcccaaccaagtaattcagcaaaaacaaaaaagttcccaaccatgtaatttagcaaaacaaatgactcattaataagaaatcaaaaaaattacagctaggtgcattcatcaattatgtttcaaggaaatgacagtaagcaaacatgtcttggaaatagtttaaagcccgtttcgtaattgtaacagtgtgacgtagagcaagaaacatagtgctatttactcaaaattttgaaaaattctgattaataatttggagtgccatggtgcataaacaaggatcatcaatgacaatacgaatcaaaagatattatttgttgtttcgtctacctaatgtgattttatttattaccaaaaatgtacaagaagttgaggatcccaggcgcacctttgatacatcaacaatttcagaggaccttaaatgttattggacaaccacatttgcaccatattcacggactagaaaagacattgccattatgagtataggatttaagatggtgcattttgggctgtttgaagctttaattggagaactagccagagaaccccctattggtggttacaagaaaataatcagtgctattatagttatgaaagctgtggaatggttgggctgtatgaggaaaaaattcttagaaaatttaacatcttttagaaagaaatctggcaaaatgttaaatcctgggcagcactttagttgaagagtttaagaattttgcttgtcctgggtcattaagaatttgggagattgttctagtttaataatttatgtttttattttcccctaggaattctttgtttcccttgctcttttcagcaatatttcttatcaatataaatataaaaatagatcatattcacatacatatatctagtatgaagtaatatgtaaagatctggtgctatatattcgaaggactatattaaacaacaaatacataaaaccccaaaattgaagggaaagagaagacagtgaaaaatggactcacttcggcacacatcggatgcttgtgaagcgttaatggaggatgcattattactccttcctctatccaattgaacaaaatcaagcaagcttgagattttgtcaagtgagaggggtttagagattagaagcagaggaagacggtgattggttgcttctagaatctagatagtagagagtgggtcgggtcgaagtttaggaatttttttcatctattttgttataggattcgggttcggatacaacccgaatctagcggccttttcgtacccaaaccaagtactaataaaaaaaatttaaagtagtaaaaataaaataa

SEQ ID NO: 15299 - DNA, 5048 bp, Cannabis sativa
tatatatttctttttttgattgtttcagtaaacatattcataccttttattcgtccttgatctatatttctctttaatttgattggtatcacattggtatttacagtttctttgcttttgtagggatattcgcctagtaaattgggattgtaccttgcgaacagcaatatctgatcttgaggtattcattgttgtgtgggatatttatatttgcaacatattttgcatttaaagaaaatctttctttattaggttgaatatgaggatattaaagaaaggacactgcgaaaggttccgggatatgagaagcctgttgagtttggtgttttgacttcatttgcttatcctctggaagaagaccttggtgagattgttgtggccaccactagagtggaaactatgcttggtgatacagccattgctgtgcatcctgatgatgaaaggtaccgtcatcttcatggaaaatttgctatccatcctttcaatggaagacgtatccctatcgtatgcgatggtattcttgttgatccgaaatttggaacaggtgctgtgaaggtacactattttatgccgaacatacttgcacggaatttgtttacaatttactcttcaaacctggcaaggaatatgacttttttcttattgcatctgcagattacaccagctcatgatcctaatgattttgaggttgggaaacgccataatcttgagtttatcaatatttttactgatgatgggaaaataaatggcaatggtggtgcggaatttgttgggatgccacgtttcaaggctcgggaggcaataactgaagcattgaaaatgaaggtattgatttgttatacatacttcatttcttagtcaagttagatgttagtggaccttagaaaatttcaattttacctagttcgttcatatatgttatctgtaaaagatgcttgttattattaactgttatggctggggctgcttattcaataatactgctactatcattgtcaaaacctttgtcttagtcttaccttgtattatgaaacttgactagtacttaatcaaagtactcttgttgtcttgcttataaaatttttctctgattcgcggcttctactgatacctctcccatatagcggaggtcctaagttcgaattcccctccaaaatgtcaaaaataaaaaccacgtgcactttcaattgacctagcttaggttgtgagtccaagatcagttttttggtccttgcagatatagtattatatttgtatagtttatgtcatgtttgaaaaaggttatactgactgtaattcttcttacatttagggtctgtacaaagaagctaagatgaatgaaatgcgcctaggcagttgttctaggagcaatgatgttgtagaacctctgataaagccccaatggtatgttaattgtgggggtatggcaaaggaatctcttgatgctgctgtggatgatgaaaacaggaagcttgagttcttcccaaagcaatatattgcagaatggaagaggttggttgttttggtctttttcttttctcgctatttcagtaagttggtttgtttgcgatgaaaaatagtacatctgtcttattggcaaagaaaatgaatttctttcattttttttaagtgtaagaacattggttcaggttttgagtctgggtcgtccttaccagcatttgtgcttatattatggtcttacaactttctggagacctgtgtttttggtaaagtcactacaacccccgacccccacatatgtaatgaaaaggccttgtgttaaatggtgtcatattgaaaatcaatgcaatctacatccagttgtctggttagcagaaactgaagacatttttttttcttttgagattgttgattttaatgtggcatgctgcatgatatgttagtgctaatcttattcctcatatttttacttgaacattgtttaccttttttgatcatgactacatagttgtgttgtattatgcttaagatttgatttcaaatatcacagatggcttgagaatattcgtgattggtgtatctcaaggcaactgtggtggggtcatcggatacctgcatggtatgttattctggaggatgatgatctaaaagaagttggcgcatacaatgacagtaaccactgggtgattgcaagaaatgaggaagaggctcaagaacaggctagtagtcgttacaatggaaagaaatttcaattatttcaagatccagatgtgcttgacacttggttttcttctggcctcttcccactgtctgtgttgggctggcctgagaatacaggtgatctgaagacattttatccaacttcagttcttgaaactgggcatgacattctctttttctgggttgctcgtatggtgatgctcggtatcaaattgggtggcagtgtaccatttagcaaggtgggtcaaccttgagccaggttctagatagcattagtacatgtacatgctgcacacattcttttacacagtttttaatagattaactgcaagcaattggtgtctatattttctaattgcttttgacgtgcatttcatctatatgctaatatggtgattcctttccaaatattacatgcctatgcttgaagagatacatactagcttattgttttaagcatgtaacatcggtatcctatttttaccttcataatctcagttcaaagtttttgggcaggccatcatgtattttaatattaagggtctggagttaaacttcttagaagtatacattatggactttctttgaaccaaataagaggtggggaccctctgttgaatacctggccctctaaaggaatatcaattgttggagtattatttggttttgaattgtttgtacatgatagcatggttgagtagcatgtttaacaactgaaagatattttaccccaaacctttctgcaagcagtcttgcatcacaaggttgagctgtcaacatttgcaaaggggattttataactcaagaacctaagtttcttacacaatgttgtatcctttgagttcattcattcatttttttttgccgcttgatgcgtgtattgatcgagatgactgtgatgatttatctgcaggtatatttacatccaatgattcgtgatgcacatgggcgcaagatgtcaaagtcattgggaaatgtcattgatccccttgaagttataaatggtgtatctctactagatcttcataaaaggctagaagagggtaatttggatccaaatgaactagtggtagccaaagaaggacaggtgaaggacttccctaatggtatcactgaatgtggtgcagatgctcttcgctttgctcttgtcacttacacagctcaggtctggcatatagctctacaaatctacatatttcagataaattatcttgttgttgaactaatttaggctctttaatttgtcttttcagtctgataaaataaacctagatatccaaagggttgtgggttatcgacagtggtgtaataaattgtggaatgcagtacgatttgctatgagcaaacttggagataattacacgccaccctcaaatgtaaaatcaaatgtcttgccatttagttgccagtggatattgtctgcattaaacaaagccattttaaagactgtatcatcactggaattgtacgagttttcagatgcagccactgcagtttatgcttggtggcagtaccagttgtgtgatgtttttattgaattaattaagccttattttgctggaaatgatccgaagtttgcgtctgaaaggagttttgcacaagctacactgtggttatgtcttgataatggtttgcggttgcttcatccatttatgccattcgttacggaagaactatggcagcgtcttccttctccaaaggatcatgagagggcagcatcaatcatgatctctgagtacccatcagttgtagaggttagcttgctcatatacatgtaagatcgtaaaacctaagaggggtagcttaaatgatctagatttgagtatcttctgggcacctacatattttgtttgcatataatataggattctgctctcgctcaagttttgaacatggtcctgctaagtgagtgacaggaatgccctgtcaaaattagctcaaaagcaggaaagaagaacagtaagaatttggatgcaaatggcagaaatgccttgtattgatacccaggaatttgagagcctggttctctcccaaatggttacaatgataaactaaatttcttcacacctcttttcccttttctattcgctcttatatatactaccaatgccccatgacaattaccattatacccctttatttatcctaaggcctatcagtgagtttgtagtgattgtaaaacaagagtctgacaaacctaattctgttcactgtttatgtccctttgatgtgtaagacttcttatgtccatatggcttgatcccacaaggtctgaggttcgagtctcttctggtgttcccaaatattgtagggttaggtgggtaggtgggggtccttctttttttttttttttttaataaaaaagacttcttctgtccatatttatttaggtttcttcaaagtatgcattttattttcttattaaaaaaaattaagattgcatcctaaatttttaaatttgagttttttgtaagataatcctattcattaaactaaatgatccagtcaaataaaatggttgacttgtctttgttttttgggcatggttcaaagtgatctatgaatatgcttaatgtattaattatttgcgtaaaaaaattatatgaggaagacaattgaattgagtgttttttgtgtaattacttcttctttttctctaggactggacaaatgaaagggtggagtatgagatggatgtcattgagaattctgtaaaatctctacggtcacttgctaaagaaagccgtgaaaggtaatgtcattttctttttgagcacttctcaaccatattatctttcatcttcgactgtttttgcctaaaatgatcttgttctaattacttgttttttcctcatgtgctctttttt

SEQ ID NO: 15300 - DNA, 4692 bp, Cannabis sativa
gtttttcttttaacaacttgtattgtactctgctcaaataaatagaaaggtacttagttaaccagatttggttaacctttttggcattctttctctttctctctctcgttctttgccttcttgcactttctggtttgtaccaactggtgtgtaccagttctgtgtgccattgttaagctctacaactagtcaaagttaataaaatcattcaaaacatgtgaatccaatcaatcaaaattaaaatcatgtgaaaccaatcattaaaaatcggcataatgcaggttgttggtcttttggatgtattattcttgaccatcttagtttcacatctgccattgttcttagttaagactaaataaagtacctattgatttgacaatacagatgtcaaaataaagtaataactactccaccttttaatatatgtacttttgtcaacatttgtttcatgaagattatgctaagtaccattatccaaaaattcattaaataattagatcaaaaggaagaaaaaatatatatgttttgtggtcctagatagactttaatgcacatgctttcgttctaatcactaaagatatcaactctggctgataatgcaacacagctggtttccccttacttaagtatcttcttccactcactgaaaacatatagaaaaatcattatttattcgtgtatgtaatatgggatggaatacagagtaaagcaaagcaaagaaagttctaatctgaactaaaatgaaagatgtgaacaacttcaatgatgaaatggcagagacgtttttgagctacgtgatcagaaagcttgatgatttgctcactgaaaaagtcagtttattaagaggagttcatagagaagtgaacagcttgaaagatgagcttgaaatcattcaatctttcctcgtcgatgcagagaaaaagctagccataggagaagtgagtgacgttactaaagtatggcttaagcagatgaggaaggtggccgagcacattgaagatgttataggcgaatacctttaccatcttgccaaacctgttgataataatcatcacaatggactccttacttggtttcagaaagtgggtaatggtgttagatctctcaaacctcgttatgacttggcttctgagattcgtgacattaacgagtctttgaagaaaatcaaggaaagaggtataagttatgggttgagaccctttgagcagcaaggaggatctagcagttgtagtatggcaagaactgaagttgaccctcgattgggttctctgtttgttgaggaagacgagcttgtggggattgattcaacttccaaagagctcataacgtatttggttaatggctcttccatgcgctcggtgatttcactcgtgggtcaaggtgggattggtaagaccactcttgctagaaaagtttacggtaatgaagccttgagacaacacttcgagtgctttgcttggattagtgtgtctcaatcttacaacttggagaaggtcttgaccatcatgaggaatcagatatgcccaacgaaagatgagccactggggacacttgaagagttgatggagcttttgaggctgcaattgcagataaagaggtatgtgattgtatttgatgatgtatgggacatagagttttgggggaggattaaacatgttgtgcctagtaataataagggcagtaggataattattacaactcgcaacactggtattgctaatgatgctaaagatactccatttgatcatgttcaagagctgaaaacttggtctctagacttggcttgggaattgtttcgcaaaaaagcatttcggtttgagattgagggatgttgctcacgagagttagagcaattgtcgtatgaaattttaagaaaatgccatggtttgcctcttgttattgcaactgtagcaagtttgttttcgaagaaggaaaagaccaagctagaatggagaagagtgcttgataatctcaataatgagtttgaaaaaaatcctcattttacaagtgtttctaagattctatcttttagttatgatgatctaccataccaccttaaatcttgcttcttgtactttggcctctttccacaagattactcagtttccgaacataaattgtgtaatctttggatagctgaagattttattaaagcagggagagacaagagtaaagaacaagttgctggagaatacttgaatgagctcatccatagaaacttggtttcatttgagattaaagatggagttgacagagcttgtagagttcatgatttgatacatgatgtcattttaacaagaggggaagaattgtgtttcttccaaataatcaatgaggggaagctaaggttcgaaggaaagagtcgtcgtctggcaatcaacaacacaacaaaagatgttctaactcttcttggagataattctaagattcgttctgtttttctttttgacattgatgaacttgtcgattcttttgtagttagcttgtttaaaaagtttaaatttttgaaggtgttggattttgaggatgctcctctttgtaagcttcctaaagaagtagggaacttgttcaacttgaagtacataaatttgagaggaacaaaagtgaagatcgttccgaagtctattgggaatttacgaaatctagagactttgaatctctataaatctttagttgaagagctaccaattgagattaagaagcttcaaaatctacaacatcttgcagccaaaccaatttttaatgttgagactgattatagattggatttggaccttggtgtaaggatacaagaagggattggaagtttagagcagttacaaacacttgtatctctgagagcatatcctagcacagttgatttagtgaaagagttggaaaagttaaggaaattgaaaattttgtgcattaggcaattaactgcagagattggtaaaacacttggagcatcgattgagaatatgaacaaccttgtacaattatacttacatggcatcaatgaggatgaaattatagatttgagttttgtttcatctcctcctccattcttatgttatcttgtgttggcttgtcgactacaacagttaccggattggatttcaaagcttcaaaatttacaaggattgaatttaaagtattcgagattaactaaggagcccttaaattgcctcaaacagttgcccaacttagcatttctggagatgtgtgaggcctacaatggagaggaattgtgttttgaggaaaaaggttttaagaaactcaagcatcttgtattgagaaagttagaagggttaaaggtggtgaagatagagagaggagcattgcctctgcttgagaagttagagtttgggccattcccacttatgattgagatgccttgtgatattcaattcctaacaaacctgaaatctcttgaaatcatggacatgtcaagtgaatttgtggatggactgcaaccagaagaaggctctcattattggaaagttcaacatgtaccatatgtgaccttttggtacaaaagtaaaagagatctttatgacatttacaagttgggtgaatcagatttgttgaagctacttctgcaagagaaagctagttcagccatagtgcagcagttcactaattttatcaatgtaaatgatagctaacattgctacactttattaattatatcaacaaatattgtctgcttcatctttctcctattttttaattttttatttactcatgcttggctccaaattagataaaagaaacaacatatcagtattagtttgtcccaaactacatgaccttgttaagtgaagcgccaagtgcatttcatgttaccaccttgagatggtggaattcttatcaatgcaatatttctttatataattaatagtgtagcaatgttagctatcatatacattggaaattctaggccattagtcaaaccaaatacttcaacgtatcttttagccagttcactctagaactacaggcaatggggtctagcagccaagggtatgggtttcatgtgcttctctatcttttaggattgccttttacctacaatagacatacttcatcttaccttgtcaagtttctactggttggtagaagggttattagcatatctcagttttataaactaatatgactctatcatagtcttagttttatacttttttattatataaaaactctttattcaagtcaaacctttaacccttctaccaaatttaaaaaacaaaaattatactttcataaatatatataaatatttatgatttaaagatttaaaaaaataaaagtattcctaaaggccacctaatctattaattcaagctccaaaactatagcttacttgctaaagagtttattgacactatatgacacaaatcaagagtttattgatacataattaagtatctaatgacaaattttaaaatgtatacattgtgttcttaaaattaatttatttatagttagtatcaataaactcaatttcggctaacttaaatttattaaataaattaatgaattgtaattatatagaaaattatttaaaaaaaaaaaaattggaataacattgtgtcatggttgcaactaaaactcttatttattttttagttaaataaaaaattcattaccatctattatctgtgttttcggataagagacacatggcatcctcaaggtttgattagt

SEQ ID NO: 15301 - DNA, 2625 bp, Cannabis sativa
ttgctacttgctactacggttaaaccatccatctatgcccacactattatcatttataactgagttttctaatggcacaaattactaagtggtcacacacatatttgaacgccaattttatgcacaaaaaatgtgacaagaataaatgtcagtggactggtgactgagtatatattattattaagagaataaagaaaaccctaatcttagccaccaacctcttttaaacagttcataaaattttcattatcactccttaaatattccttttactctctctctctccctaaattgtaaagagccaacaaggcaagccaactatgagtatctaccattgtagtaatcatctttttcttctttggttttctctctctgtactacccatctctctctcctccacctcatcttcatcatcatcatcgctgccgtccgacatacacgatcttctccggtcaaaaggattaccggcgggtctcttccctaaggaggtaaagtcgtacaccctctccgacgaagggcaactagaagtgatcctccacggaccatgcttgaccaagtttgagaacagagtgttctacgacgccgttttgaaggccaacctcagttatggaagtctcatgggagttgagggtttgactcaagaagagctctttctatggttaccagtcaaagacatcatcgttaaagacccaaaatcaggtcttatattctttgacattgttgttgctcacaaacaactctccttgtcactcttcgaagatcctcctaattgtaatccccaaccccaaagtgaaggtatctataaataatcaattattatataaatatatgtttcttcttcctctattttcccccttaaatcttatttgttttaaattatataactactgggtttaagttctgctttaatttgaaacttgggtttagattaattatttgtatttatagtatttatacgaaattaaatttttgattaagttaattatacagtcatatatcaattttttttaaaatatataattgtgagtggaattacagttgccaaaggcatcctttgagaattctgggttcaagtattagagttgatttattcttgatatcttcttaatttttattctaaaataatttgatgtgatttttgcaggtgttttgaagaataatttgttgaaaggaaaaggaattgaagctctgagatataaagaatataaataaaaaaaaatgccgacttgtttcaactttaattgtcttttcctttgtactgtgtatttttgaaattatataatatagtctaattacagttatctaatcactaggtggcattggttattccaagattagatagagagattaggctgagtgcttaggagaatatggtaaaagctatatgtgttggaatcaatgagtactgattaattaaaactagaggtacctctaccttctaacttttcgttcctcgtatatatttagataagttagaagccatagcaaagaatcaaattaagtagtttctttccttattatctaaagctacctatttttatttcacagcaaaattgttttcaaagaccttgtcatgatcctcttttctattctttctgaaaattattagaacatacacaaagtcatgtacatatttacaaatataagcagatgttatttttctgttctttttttttttttttttttttcattaaaagagagagaaaaagagtcacaaaataattcatgaagtataactgataaaataaaaaataatgcttataaaatgaattggtttcgacatgcataaattattgttaacaaagaattaggagcaaagtcataaacatgaaattaaaatataagttatgtacatgctttaagtaaaatttataaaacattactcaactaaaaaattgaaatttggtgtaatatatcatgtgatcattgaattaagaaaagaatatagcatagcacatggatataattgacattgtgaaattttcccaattaggtattgttaatagaactgagaattcaaaagggcctagtttttttttcttttttgccactaagtttagattaattaggattctaatcaaaattggaaagaagaaaggaaaaaaacaaagcctaccttgacgggagaatatagatattttatggatacacacatgctttcatgcatgcaattgttatattaatagtacatccatttttgttcccaaataaataaataaatagtatattcatttgattctattatcttgaaatttactactctaaattatgctttatttaaattaaaaaaaaattaacatttatttatttattattttacgcggtaactaataactatgggcccaattgaaggtggggtcgtaattagagcggggccacacacacacgatatgctggggtacaccctataattgcactttatgtccactctttcggcctttactcctttggcttttggcactgcccttttgaattttatttgcagaggaatgagagagagagaaggtatgattacgttttcaaagttatgatgccaacaaattattctaattaaaatttcgtaatctgataacaatagggaaattacaaaaataactgaaatttaaattaacttttacaaaaata

SEQ ID NO: 15302 - DNA, 9734 bp, Cannabis sativa
tccacctatgcatgacttttcagatttaagttgttgctgcataaacagagtaggacgattttttttctcattctgaattgaagtcaagaactggagttaatttttttttgaacaaaggaactggagttaattaagaagcttaagtttgtgacattatctcaagtaactgtttagtttagctgcttcttgaggagtttttctttccattttttggcttggaagttaatcatcatagtaaaatgactgaatacaggtgctagctgatatgggtatctgtgctattgacgagtttgataagatggatgaatcagatcgtacagctattcatgaagttatggagcaacaaactgtcagcattgccaaggctgggattactacatccctaaatgcaagaactgctgttcttgctgctgccaatccagcatggtatatttatcattttgttcctgctcatcttttctagccatctccactccgttgcttttctacttttttaatcttaaccttgtgggttcttttctgtcatagatgactcatgactttgttataccaagtttccaatatagcattgtaagcttacactcttgaccctctgctcttccaggggaagatatgacctgcggaggagtcctgctgaaaatatcaatcttcccccagcccttttgtcaagatttgatctgctgtggttgattcttgatagagctgatatggatggtgatcttgagttggctaggcatgttgtttatgtccaccagaacagagaatctccatcccttggtttcactccacttgactcatctgtgcttcggtaaatgttacataagcaatattttttaatttgcttatttaccactcacttgagaccatgccttttgtcataaatttttgtgttgattttcgtttaagttctgcgatctttgcacatgagcatatttgtgggcttgtttttgtaatattttattttattttgtgtttcagtgcatatatttcttctgcaagaagattgtctccttctgttccaaaggagcttgaggagtacattgctagtgcctacactgctattaggcaagaagaagctaaatcagataccccaaattcttacacaactgtgagaacactgctcagcatcctccgtatatcagctgtaagtcttattttacattttttttttcgaagtctacttctcaattgccacggcaatgtttattttaaatatagtttgtcataggataattgaggttggagttataaaattgaaatggtggagcaaagtacaataaacttataaattttgtatttgtttcattgttatccacaaggtgcattgaccattcaaaaataaaaaatcattgcaatagaataagtttgctgaaagctataaaacctttacaggcactagctagactccgattctctgaaacagtggctcaaagtgatgtggacgaggcacttaggctaatgcagatgtcgaaattctctttatactcagaagatcgccagaagtctggtcttgatgctatctctgatatctattcaattcttcgagatgaagctgccaggagtcacaaaatggatgttagctatgctcatgcactcaattggatttctagaaaggttagtttcattcctcatattcattaattacatgtcttttgacctgaatattatacttggttttactttgaatataatatgaacaggaattgaatataataactattccatcaaaatggcagaaaacccaatgaaaatggacaaccaaatttgatcttagattctgttcattctctctctctctctctctctctcccccaaggtaataattttggttttggtttggttttgttctgagcagggttacagtgaagcccagctgaaagaatgtttggaggaatatgcagccttgaatgtgtggcagattcatcctcatacttttgacattcgatttattgatgcataatctctctcattttataacatatgaattatggaagtgcacattttttttcttctagtttgtaacagatgtattttaattatctagtttagttttgtcaatttgtatttgcagcaaatgattagattgcattttaatttaatattaactaaccaacaatatcccattacagaaaaaaaaaaaaaacaatatcctatttcatttattctatttctttcactttttattcaatagtgacgcgtagattggacgctaggagatcagaatatattttagcgccaaaaataaattcaggttttttttttcagtaaattagctcatttatttcattggaaaaataaaataaaatttccactattttcaccaaattataggtaaaaatgcagttagttgttatccatgggatcacttgactttgcgctgttcaagttcactgttttaattttactatcttattaaacacgtgtccagtttctatttgtcttcgttatgaaaccgaaaactaaagcaccgtacagagtaggggtattatggtcatttgagagtttgtgcactgatcataaatttttttccatttcgatatactggaaatatattctttaattatttttctttgaatccatattaattctaattttattttcttcccacaatatattttacggacactattttgcagctttccctgttcttatgttaactgaaaaaaccaaagtataaaaactcaagaattcgagcaaagctcctgaaaatggtttttttttttttttttctaaataatttaattattgttaatttattttattattaatttatattaaatgaagttggtcgttcagaccagctctccttcaacctaggaatggaaacccccaaaacccccatattgccctcttccttttttgttcgaatgagtttgaacccatctctcatcgaagacgacaccttttaaggtaaacgtttcatattttatttataacatttgttagatctaatctccttttcgctattgctctttggtctttgcattgtggattaagattggtggcgcaagcaatttttccattttcaaatcctaaaatgtctttaatcttacaaacaaagcaaaaaaattatcaactttctattctagattcctattttctttgttaggtctatctgtaattttgaagtgcatttaagttgaacgatcgtctattgggcttatgtattctagtattgtcatatgggtagaactcattttcattatctactaggttgcacttaactgaactttttccaaacctgccataactgtaaactgcatttcattactagaagccagagattgtcatgctggtaataatttgatttttgtgtattttatttattttttagaaaaggtcatgtataaggtcaattttagcaacccatagattcatttggaacatcttgttttattattttttagacataactaagggtcaaaaacacatgttctgatgttttaggttgctggtaaaaaaacatggatccttggaattgcacatcttctgttggtgtgccttctttcgagaaggcacctcgtaaattttctaatcaggtgcctgagaagactcaactggagattgtagagagagctagttgccatgctgctgctgagactaaagtagatgtggaccttggagaagtttactttttgattttgcactttctatcttttgggccatgcaagaggacttttacacaattcttgggtgagcttatggagaatcagctcttgcctagaagatatcacgcttggttttcaaggggtggtatatctagtggggatgcaagtgatgatggtgtatccttccctttgacttatgataaactcatggagaggtatgcatgtagtctaatataaccatggtgtttttttcagttatgcttctctactcttaaattgtattcgttattgtgtattgtgatttcacatttcagtgttgtttactcggtttatattagagtatgccagattcaaagttttctttcatttttgtagtttcttaaaatgatcaattactaaagcttctcggagattcaaacttgcaacttcctgaagagggggtgtttggtaacattatgctataatgtctatgaccacaatttctaaacttcttttaggaagatatatttggaaatgtcttacaactctatcacaacagttcggcatccttaagtgccatattattagaaggacatcctctcaagattgagaagtcacaaaaatcacgtcaaaatgcattttctttttaagatctttatttttgaatgacaagtcatttattctatttgtaggtatcctcatgtagagaaggaccacttgctgaagcttttgaaacaattgatggcaattgaatgctctccgttgcatggcaaggttatgcctaatgcagctgatgtccctacgttactgggaacgggttctttttcgcttgtagattgtatgtgatgtcttactgatatttccccttaatcttattggttctttcattgctgttgttgtcctcattggtttctattttgaatatctatttatacttttggccgtttattcttgcatgattaaagattttagaaataggtcaaatatctttattaattacttgtagttgcttttgatttgtcaggatatgtcttcatcaaaactttagtttgtgtatccacattcaaatttcattaagctagagggttcagaagtagacaaacattccatagattatagtagtaatttgtttgataattagggaggatggctccattaagctaagcacaatgggtttttcctttctttctctttcaattctatgctcccactaatgtctttaaacttatttgaaatttattgtacattttgaattctattatatagtatcaggtgtccttggttttcttctggtttgaataaagtaaagattagatcgactgatagtatccattttagagttgtctcattatttacatatagtgacaacttgggtttaattttgtacatcactataacatggaatacaagataaaaactttccttatgctttatgacatgagtactacaagctttacaactgctctatgttccctataaaattgcataggcttacataataattgttcagtttttctacacaatcaccttgtcataacttaaattttctttttggctttccagactcattcattgtcatgcagttcccacagttttacaccaatatgatgttttgtttgttgaatcacttttagggatgaaatgaaagtgtctgaagatagtctattcatgtgtttagtttgggagaagaaattagggatagccctggttttttcttatggagttgctatttataaaagatgtgcatgctgtggaatatgggagttggtggagtttgtaatctcatttctataaaatgttgtattacttagttaccgttttgcctaactattattatatatctgatgtcaatgatgtattgaagataacgtttttgcaatccaaaattctcaaagaaaataaaaaacatgtagatttacaacagttaatcaaacatattccatacacttattccacagttcaactgaacattgaaattcttttatattcctatcttaacccatacttccaactaacaccactgtactattgacttttctgtaaaccttcttattcctgtttatgcaggtgataagaatgtgacaaataagcatggtaagcctctgccagcttatttacattggcctcacatgcaagctgggcaagtgcgtgggcttggtttgagggaaattggaggaggttttacaaagcatcatcgtgccccatctattcgttctgcatgttatgccattgctaaaccatcgactatgctgcaaaagatgcaaaacataaagaaactaagagggcatcgtactgctgtttattgtggtactggttttatcaaccaaactattcatcaacattttataattctgaggacccatttgtatttgagctttgttcaatatcattcctaaattgcttgttaggatgagggttacattattttgaacatgccaatggtgttatcttgtctgaaaaattccattcctttaatacctgcactagttaatgtattcttagggtttttgaaaatcatttggacaatagattgttcctactcctatggtttttcttagcaatgttcggtatttacttgagcacttgtttcattacataatgtaactctaggagtttgtattagttatttgaagaaagatgatatataatttagctgtaccaaaggaatttgcttgtgtcatgcagccatatttgaccgatcaggaagatatgttataactggttcagatgatcgtcttgtcaagatttggtcaatggaaactgcactttgcttggccagctgtcgtggacatgaagtaataattgtccacatcacctagaaaacttttttatttcttataatttgaatgtagccttcatcattttcttgaaatataaccatatatcttcttttttttttttttgctcctttaaatttcaaaagggtgatatcacagacttggctgtgagttcaaacaatgttttggtggcatctggctcaaatgattttgtcattcgagtggtatgtatcttgcctttgcataaccatctctgtttcatattggatcatcactaaaaatgtctctaaatgtctctcttcctacagtggcgcttgccagatgggatgccagtatcaattttacgggggcacactggagctgtaactgcaattgcatttagtcccaggccgagtgctgtgtatcagcttttatcgtaagccacatcatgaatctttttaatatatgctgttgcttctgtttagttctttcactgctatacgtgaagatatttgtgtgtgattttttaaagtgaatgttctgaaacagtattgttagtcccagagttttcaggtttttgtcaaaatattgctctgtcttatgacttaacaatattcttttgatgcatttcgtgtttttgaatatcacattatcgccttcgcagaaacagagtgatgttaccatacttgaagaagcatcattaatacctattcttctttttatgacctttgtagttcttcagatgatggaacttgtcgaatctgggatgctaggttttcacattgtaaaccacgaatataccaaccaaaacctgcagatgctttagccggtcagttcatcaattctatagtgttttgtaatgataactgttagattgttccctttcgtcaaactaggatgtttactcattactgcaggaaagagtattgtttcattgaattctggaccctcttcggttagtggttcacaaaaccatcaaatactttgctgtgcttacaatgccgacggaactgtttttgtaactggtagctctgacacctttgcaagggtatgtttagtaataatatgttccgcagttacttaatatggttcttgttggtaccatgggctttgcttacattaatctgtattataatgtttagttggacgcacatatttaagtacagttgactaactgtaggtttggagtgctttgaaatctcatacagatgacccagaacagccaatgcatgaaatggatgtattggctggccacgaaaatgatgtcaattacgtacaattcaggttagtctgtttgctgtgaaaaacatattcagttacataatctcgtgacaattctattactttcttgtgcagtggctgcattgtggcttcaaaaccttccactttcgaccctttaaaggaggagactattccaaaatttaagaattcctggtgtgtgaatgccttcctcatttagtcattatcatagtgacctgcttttgtctctgccatcaagcacaatacaatttttttaaggtttctcaacagagctatgtatcattctttcctgaatttgttgacaggttttgtcatgataatatagttacttgttctcgtgatggtagtgctataatttgggttccaagaactcgcagatcccatgtgagtacaataatacaaaaatataatttaatcgcacatggacataatatgttttgtagatgatgtaaaaatttattgtagttccaaaataccagctagcatgttaaatttattttgctatattggcgtatgattttcaggggaaagttggacgttggacacgtgcatatcatcttaaggttccacctccaccgctgccacctcaaccttctagagggggtccccgtcagcgatttcttccaacccctcgtggtgttaacatgattatgtggagcctggataatcgctttgtgcttgcagctatcatgggtaaagtatttattataattacatgtagccaaattgcttcatagcctagtttgatcctcatcatccatttgaagtagttcttttcggtttcctcatcctcttgaattggcataagattccctattgtacctccattgaatacactatctctaatggaatatacaccatctccagtattctgttttcagtggatttatactggttttattcatccttaattgtctatttagttatgactaccatcgtcttgtaattttgaacttaataagtggtgcttaattttgtagattgtagaatctgtgtttggaatgcagttgatggtagcttagtacattcattgactgggcacagcgcatctgtaagtggtttgtaattataagcttttgtcattatttgatgagtattttttgataatgtcaatggagggcgttacacaacttacctatttaatgaatttcatttgatgactgttaatgtatacatgttggttgttataccgtttaacaagttttaggaaagatgcttcatctacggaattattacattgttgttcctattaaggaatttctttaggaagagaatactcttgaatatctgaataggtctatttatatatattttaagccctgactaattctgtagtttgtttgatcctacactttctgtgtggtttttttttggtgtgtttgtttgttagaatatattgcttaactggcttagtactttgctgttgaattctacagtcttatgttttggatgttcatcctttcaatcctcggatagcaatgagcgctgggtatgatgggcgaacaatagtgtgggatgtgagttcttactttttctgcacttcatataaataattgtattttgcttattttctaaggagctaatttgttttcagatatgggagggcacacctattcggatatatcagatgggggactttaagttagttgatggaaaattttcagcgtaagtactaaatttcttccttttttcttcttctccttgtatgttgatcgttcaaatatattttcacagggatgggacgtcgattgtgctttcggatgacgttggccaaatatatttgataaacacaggtcagggtgagtctcagaaggatgctaaatatgatcaggtactataattgttttatatctgccttgtgtttctcaactctgctgtttttcaactcttaacaattatataaatgatcctcaatcagttctttctgggggattatcgtccagtcatcttggaggcatctggcactgttgttgatcaggttgagagtggctattcattttcgctcattattgcatagttctgtggtaactttatcttcaaatatgcatttagtttcaagttatttagaaaatcactacaaactccattttcccattactctcatttcaagaatggtcttagttaaacttta

SEQ ID NO: 15303 - DNA, 3358 bp, Cannabis sativa
aatgtaaaaaaaatattctttgaatataaaaatgtaaatattttacaaaaaatggtgccttatgtaattattcctttattttaagcatataatagtaaatttccctactaaaaataactcacaatcaagaaataaaatgaaaaattgcccaaacattatttttttaaaaaaagttacaaaatgtatacatttaataatatataaaaacgttataaaggaatacctcaattccctctctttttcttttcaactttgataaaggaaaggaaaaaacgttagcttcaatcttttctgatctaagtaatttgagtaattttaaacctccttataaggatccttgagaagcacttatctaatgtaaccttcttccttttcatcagtggtcatcactattaaaagctcatcttaattttctggttttaaaaatgagaattttatgaataaggggaagttaaaaatggcagggcatgcaagtcccatcatttcaggaaggtaagacagggaatttgtaaaatcataaaggagttgtggttggacttagagtagtggtcctagtagatttaatgctccaactaacacatttcccaccctcgtttggttccaattatcatttcttattgattttgtctaggaaagtgaccacacaacaacaacaacgactaatctctatgatcatatattctccacaacattaaaaatattgatcattgtaaaaaaaacaaaacccatctcctaaaacttagcaaaccatcactaattggccccttcataaagcaatcacccctaaaaggaggagaacaaaaaaaaaaaatcgtcacatgtaatgcatatataatgtatataaaggttattagaacaaatgggttaaatttagacaagtggagagtgttgaaataagatgtcaattcagatatatatattatatatacatatttgggacaggacttactaagacacatggtgtaataaaaatggttgagatttgagagagtcaccaatactcaatgtgcatattacattactacatataattataaagaatagaattgcagcgctaacatgggatcatagaatcttctaagagctttgtttgaagtggcatcatttcactcttctacattttgctatttaatggcatcttattatataagtcattgaatgacaatcgtccaaattcactatctactttccatatacaattaatttcaaacttcaatactactcattaaaaattatttaaagcaaactttacaggtgtatatgaatgagtatatatattgtcaaaaaaaaaatgctcggcatgtatatatatcaaacggcttaattatattgtgcccaccagatcagatcgttggtcttggactcttaataatgaatattcaagcatatgttatttatcggtgatgatgcaataatacagaggtgcagtatttaacatgcaaatatgttatttttactatgtcaattttgttaaggttactttgcaaaaaaaaaaaaaaactaggtaaaaggcttctattttatgcaatactccaaagctcgtgccaaaaaaaaaaaaaaaaaaatcaatttcgccaaatttttgaaaatgtgtcattttacaaatttacattgccgatggcctaaaattcatattaggatttgttttagaatgcatcatattataaataaatgataaaagtggggttctatatatatcattattatatataaagatatagattaatgtcgtcctgtttctatgaactcttggttggaggttatgggaactctattcaaataaattgaggaatttcttgtactttgttagaggatttggtatcatcgtaatatatttgtgtatgataacaattttaattcgctgattcatgtgagtccaccaatggtaatgggtcctaagttgagcttgagtagtaatattatgcatcactaatgccaaattttattttatttaaattagtatttatttattttgaaaaggaaattagtatttatttaaaaatatcatgcttttatagaggtcctagagccgattctatctaataaagtatgcataacttttttactttttttttaaaggaagtatgcataacttttattcaaaaaaaaaaaaaaatcatgcttttcgtgctcaagcttcaaaatgcaaaatgacaattatggaaacaaattactcgagatgtgatttacaaaatgcctaactttgttatatgaaaaaaaaaaataggactaatatacaaactaggttgtactattagaaataaacggcattagtttaagagaagatggcatcttggacggtgagactactcgaaataactacaaaattggtaataatataaaatatataaacaaaaatgtaaattgacctattggaagagaaataagaaaaatcaattgagactactttttgaaaagttggaacatgataaaactgcatgggaatgaagcagatcagatgccaataagataaataaaattttcaaacctaaattatccaatttccattccacttttcatttgaatgctactcaaaactcatacactattatttgagagtgacattacaacatccccacccaacaacttgaatcaaaatatcattataaccttttctttccaactcaaactatagtatctaatgcatcactcaaattatatttatttttttaaaaataaaaacaatgagtaatatatatcactaatcgataaattagccaggacaaaattatatctagttggagaaaagttggcattaaaaaccatattatatatgacagactacgttatacaaatactaaatatatagatattatatattatccaccaaatccatctgagtcagcttcgcctcctcaaacatcaacattataattatgatcttacataataccaaactatgtaatattcaaaagaaagaaaaaacagcaccattaatttcattttctcctctcttttacgtttttagtttacctttctaacaatcctcaagtataatatatctctttcttttttttttctctttaatataatataatgtgtgtaatttccacgtcatcaacatctccaatccagcctgacctcattgggtcccacaaaatgctgactaggcttcctaaaggagacgatgtggctattgaccataaacgccgtcacacgttcggagactctcacgtcttccatcttcaattcctgtaaccgtcgcacgtactccggcacgtgcaccaggtcccacaccaccccgaccccacctggcttcagaactctcaccagctcacccaccgccctcattctctcggcggaggccgccaccgtcttggggccgtgctccttacctaccgtgtggacgaacacaccg

SEQ ID NO: 15304 - DNA, 4643 bp, Cannabis sativa
agccaatgtttgatttgattttagaaataggtctgatttgggatttttgtaccttatctagttattaatgtggttattatgaattgagtagaagcaaacaaaattttggggaaattggtgatgtaggttttttcgtggtgctgtctttattaaggccattcactgatcattcctatgtgtttgactcttttcaatcgtgtaaataggttaggactgtagttaggggattttgtttccctatgagtaaactaactacaaatggtaattgaagctttggattctgtttacaagttttcacctcttctaggttgtatgtgtgcctgcactaatatctttgaatctatatctcgaattcacatataccttacactttaactggtgctgagctattttaatggcagatacctgggcttgtaaatgtggattttgctgatgtgcgggctataatggctagtgctggctcttcactgatgggaataggaactgcaacaggtaactttgtgctacacgtaactaaaatgttacaattctaatattatgacgagtttacttgattttataattttcttttctagaaccaaatttattaaaacaaaaattatcttgagttctcattatagcaacttcattgtacactttctcttgggtagtatttagaaatgaatagaacttctcgaaagttatatagttgaaatatcatgtatgagtggacactggacaggatgaaaactaaattggttacacaattccataatgtatgccaaatgtcacttggaccctggacctttgtttacagaaatataagaataagttgtgtaatgtctttgcttaccttatttaagtttttcaaaatgctcatatgaagagatattaatcctgtggtgcttatttttgagtagggaagactagggcaagagatgctgcattaaatgccattcaatctcctttactagacattgggattgagagggcaactggaattgtgtggaacataaccggaggaagcgatttgaccctatttgaggtgctaacacctgccccccaccttcccacccctctttatctctctctctctctctaatatttttggacttggtattctggtaggtgaatgctgcagcagaggttatatacgaccttgtggatccaactgcaaatttgatattcggagctgtaatagatccatcactcagtggtcaagtaagttcaccctcattcttaagttgacaaataaagaaattaacataagcagtatggttgatgatgttgctatcacatgtttctattcaggttagcataactcttattgcaactggattcaaacgccaagaagaaaccgaaggaaggccagtccaggtatgagtgagccctgcctctcctctcctttcccatcttctcataatttatgcacaatctcttattttccaaaatcatactgaatgcaggcacaaggagacatcagccttggaatcaatcggcggccatcctcttacaccgatggtagtgcagtcgaaattcccgatttcttgaagaagaaagggcgctcacgttttccaagagcctgacgtgtgttggatatctcccaataaaacttcatgcttgatctaatccaaattcgttctttgagtttagcatcccttcttaggattttaatatactccttgctaggtatttagatacgtgtcgtgccctttgttagttgtttttccctgatatatagcacatataccagtatcaagtagagggtaataatatgttctaaggtgtttgtttgtgtgcctaagaaccatgctcaagtgctcggagcttgttcttttctttttcttatcaaatttgaatagatattggcttgtacagaattttccattgagagttatgtagagccaccaatggttcaaaaaaattggtttgcattgattaccaaccaatttctgaggctctcatattgccttacatcactttctgattttaagctatctaaattatcttccgagtcattgaaaattgaaagttgaaaagactaggctgaaaacactgaatgtgaattttttagctaccaaagaaacaataatataatggttcgtccttatgttctatttttataagatatcattaattcttggcaaaaactgtacagattctataaactatatctttggccattgaatctcagaccctgtaaaatctaaaccgttaccagtaatctccacaggagcaccaaccatctgcaaaatggtgaaatctgctactatccctaacaataatctttctcccagtcaccttagagatgaacttgatcgcagaatggcaatccaaacacacccttaaatttttcttaactataattggtttcccaaatggcatatttagtaaagcaaatgcaatagctattctctcactgtgatggtgaagaaactgcagcttttcattgtcatttatgtcaagtgggactgaagcagtgcaaggaacatatccagcttcctttatctgatcaagaagacagtcaagcttttcatagatttccttcctctgaggatgagaccaatcttcggatccaaagatatgagttttttctctaatatcaacccaactataacccggcaacttcttgatgtttccttctttcatcattgttctcaaagctctcacttcttcccattttccctccttcgcataaagattcgaaagcagaacaagagctccactgttttcgggttcaagcttgatcagcctttcagctgcaagtttgcccctctcggcatcaccgtggaccctgcaagctccaagaaaagaacaccatccgaaagcatttgcctcaaatggcatactgtttataaagtcttcagcctctttaagcctccctgccctgccaagtaaattgataacacagttgtaatgttcttctctaggtactactccatatttcttctccatgaaatggaaataacttagcccttcttccactaaaccagcatggctgcacccagataaaagactggtgaatgtcattgcatttggttttacttcaagaaccattttgtcaaatgttcccatcatttcttttcctaaaccatgctgtgaaaacacattaagtaaggcatcccatgcaatctcagttgggtttcttatctcattgaatacttgaaatgaatgatcaaccagcccacatttcccatacatattaacaagactggctgaaatgtagggttctgaatcaaaattaagcttaatcacttgggcctgaagctgagctccttgttctagtgcagcttggttggcacaagcctttatcaagcttgagaaagtgtactcattgggttcaattccctgcctcctcaactcaacaaacatgtctaaagcatcgtcaattctatccatttcgccatacccatcaatcaaggatgtgaaagacacaatatttttgtgttctgaaacaatcacaaacacattagaagcactttccatgtctcctactttagagtacacatctacgagagcattacccacaacaacctttgactcaaatcctaactttacaacactggaatgaagacacattccaaacttataagctttattagcggcacaagcacttaatgtcgcactaagaatatgaggatccataagaatcccatccttaatcatcctcttaaaagctaccaaagctttttcagactcaccattctttgcatatccatcaaccattgcagtccacaacacagcatctttacatggaataacctcaaagaacttgcaggcatcaatcatcattccacacttggagtacatatcagccaaattactccccacatagagattcgaatcaagcccggattttaaagcaagacaatgcatttgcttcccgagtgtaatcgacctgagagacacgcaaactttgatgatacttgcaaatgcaaactgggttgggttcataccagaaattctcatttgggaaaaggcttttaatgcttctggtaaccacaagttttgggaaaacccagtgatcatagctgtccaggaaacaatgtttctttgagacattttatcgaacaggttgtgagcatagcgaataactccacattttgagtacatggtaattagatggttggtgagaaatgtacacataggataccatgtaagaagaagctgagcatgaagctctttgcctttgattagctgcttcgtttcggcgcatgtttgaataatctgcgccaagcttgtggtgtccaaactgcacaacaaagcgtggcttctcattacaataatgggttcttcttcttcttctataagaaaagtttcaggaaaattagtaatggcatataaccaaggaagaagaccaagtccaacagattaacaattcaattgatattgattgtgtttgtgtttgtgtatgtgccacaaaaatttcttcttgcaatgttgattaaacatttgaaaaacttgaggaagaaaaaacaatatatacactcaaaatcctccaatgcaaacgtatctgaatatctttttcttttttgtcagttcagtgataaagttacaataaaattagactaattaagaaatgctttggctgtgtttttagtttttagtattgtgtttttaaaagtaagaacaaaaaatagtttcttataattttaaaaatttaa

SEQ ID NO: 15305 - DNA, 5001 bp, Cannabis sativa
tgtataaaaaattattaaattttttctcatcatgtattggaataatttttccttccatttcaaaatggaattgtcattctactaaaatagtgaaaaggttattctaacattttaatatgaatccaaccaaacaaaggaatgaaatgaaaaattatttcgtttcttttttattccatttcattacctccaaccaaacgccacctaaatactttaaaaaagaaaaggatgaaatctgtaaaattatttagttaaatttttgcttttataaatagattacctccgtgcaaactgcaaacatcttgattcaaaattttcacttattagcttgatcgaaattttgttgtttttccacttatcgaagaggaaattacaaatatgtccctatcagccaatggagagttactcaaagaacaatgtctctctcagataacagggtataccaagttaccaaccaagtatgtttaaagttctaaaaatattaaatcatcaaatactatttaatcattcaaaataaataaataaataaataatatttaaaaagtagaagtatcatataatttttttaaaaaaaaataaacccaaacaaacacaaaaaataaaataataaaggagacagaccatgtagcttgagcagctttcttttatttattatattgatatagatatatagatatagaatggagtgttgtatttacacgatttttcttgtatcattgtgttatatattatattataaaacataacatggaactttacatttacggctaaatagaagaaggtgggtctattctgttttcgagatacatcatcggaaaacagcgtttttccgggataatctcactgggatttatctttttcccgagaaaatcccatgtaggaggtgtatctctctcgctctgagagtgtgctctgtttctactccaaccactctctctcattctttctgtgcatgctttttttttcttcttgtttttgattataaaatagtacaaaatgtattgttacattaggattagagtcaatcaaagtttgtgttactattattgtttttgcttcaaaacctcaaatcagagctttcatcttaattaatgtcatagttttttttgtagctagattttcccaaataagttttgtgctgaatttcaaaatagaagaagagtcttagagctcaaattcaataacacaaaacaattagctgaagattgaacctaaataaaagaagaaaaataaaataaaatttatgtgtatggaggtgaagtgaagaggtaagtaacgtttgttgttcgtgtcatgttgttccatttaaagttttctttttctggtttgactgaatattcaaaaaaggtttaagactcgtaacgcttcctttaaacatttttgcatgtcattgatttgagccgttcatctgtcattccatagtttatcttttttgttctcatctatgtaattttcgttataaaatctgaccttctctgcttcatttcttcacctctcaacactgttttctcatctaaaacaaactgtttcctttctctctccctctctgtttttttatttttattttttctcgagagaaatggctaaaattccaagctttttctcactgaagcacttgctagtgctgtcacttgctttgaatgtgagtttgatcatgagggtcgtgtttgaagatgaaagacaaggccctctttttggcttttctctgataaagccaagagggtcttcaatggcggacactgaagctagccagaggacactattggctacatcatcatcatcatcaatttcttcttcggccaaaactagtattgcagaagttgaagatagcggggaaaaactagtcaaccttgatcagtaagtttgacttactcactcttaaatatatattttttgtcgttttattatttttaatttgaataaataaatatatacttcgttgaagttgctctggaagtatcaaatgacctcacatgagctcgttcggtgttatcatcgtcagaacagagcacaggtttttctttttttttttttgggttacagtttactctaaaaccaggggtattttggtattttcaaactggcttttgaaaatgaaaactcaagcatgctctctcttgagttgaagtaaaaaaaaaataaaagaaataaaaaaaattgataagggagtgtcctaaaaagttatagagcaatctccatcttggtgtcaatatgaaattttagttgaaaatgtgtatgtaaagtcaccatttatttattgttgttattaaagtgttcgctttgccgactctatttggtctggtatttactgaatctcctaacgtgcgcaatggggttacgttcactcagttctaggctctgttgcatttatagtagtaataatgatagggtaattccactatacacttcttaaaatgtcatttcactacagttatggtaatttctctaattctacaatacactttccctaaacagttttacaataatatgttaattttttaaaaaattgacaacaatttcaagtaatatattagttgcacgcacaattatttttattatataagaagtaaataattatttaaatttatttttgacaaagtaaatttttgaaaacttccatgtggtgttaaaatatttgactaaaaatctatattgaaacaatattttgcagagtgtgtactataaatttttcatgataataattgtattattaaatgttaataattataagggtatagattagatagagagaggacaggtccttggtccttggggttgtataatggcttaaaactcgaaattcggaaaagcccaattctatgttttattgtttttttcttttgtcatttctctgtttccaagttcagagtgtgttacaatggtgattttttttttttttttaattttaaaaaatctccaaactttgccactatggaaagtgctcattgacgtattattggaccaacacaagaatcattgtgttgttgagtcaaaactcagcttcaaagacaatggtggagaagacagtttcaagcccaatagttggagatccctctaagtggctatggtgcatgttagcacaaggcactatagtaaagaaaccttaggaaaaaaattttttaaaaaaattctgctgcttttgtcaagagaatagaaacccattgtttttttttttttggttcttttaacaaaaaagaagaagctttttagaaagatgtaagagactaatgaagtgctcttatgggttgtccaacaaaaaaaaataaaaacttttggccgcccctccacaataagttgtaaaaactaaaatactagaatcttttcattcttttttaatctctaatttatggttgtgtattaaataaaaaagaaaagtaagttggggtggtctggatctaccacttgagtgggtcctaaaaagatatgaatgaacaaaaggtctttaggtctctttaccacttactaataacacatgttgagaacctttcctttcctcttgtgtaagattttttcatttcaatctaatcattgatgattgatcccttataggggaaaaagagtatatgatttggacccatcctcctttcccatcccatacctacttccatctccatgcaatttaatcaaagataaataaccccatatgccttgtgtcagattttcttttatatattcctttcgtttctttcttttggtttttctctttaattgctatatgtgttatagggtgggacatttgtttgcattgtatatactatataatatatgtgagcgagcgagtcgtttggaaacttttcaatgtcgtttttgtttttcctttgttacagtggtgaccccacaatgtatgaaaactattgggagaaaattggtgagaagaccacaattgtgatcaggggatgggattccatgagctatttctcagatttgaagagcatttgttggtttttagagcctgagtttgccaaacaagttgtacggcttcacaaaattgtgggaaatgctgagactgaaggtcgccatgttgtggttggtacaggctcttctcagctatacttagcagctttgtttgctctttctcctaaagaatcaactcaacccatccatgtcgtttctgctgctccgtactattctgtaagtgttttttttttaatatattacatataaaatattatgtagtgctttgaatgagattaaaaaactttgcataatacttgctaccaaatccaagctaagtcaaatcccattattaattagtactaattaactaaccatatggtttgtttaattaacaatgaacatgctatgcctttaacaaagttgtcaactttttctttctttcgttttgtctttgttatataataatattaattaatgtgatattatgtggcgtcattcttttcactaattgacttctcatgtatacatacagttttttttcttttagtggcggttttgtgctttggattttaatatttggaaccacttttactaagtatataattagtgctttaaagatgatgttaactagcataaactctattataggcctatcacttgatttttttagaccgtattattagtttatgttctttattgtaaacttattctaataacttccaaaaacttgactttggcatcttactactatgcttgtttgtttatgtattaattccaactttaaattttcactaaaatcgtttgactcctttgtcttttaatatcaccgtcattcattcatgtccactcaaaccatattatatttcatttgaattctcttttacttttttcaatccataaaatatgcacttaaaagagtaggaagtcaacataagaatatgatttcttttcttcctttttcattccaatattttgtaaaatatattacatttacattacatgtactctaattgactttgaatcgtagtatcttacatacgcaacaataacatacacataccattttaatatgtgtccacagtgaccattacatatctttttaatatg

SEQ ID NO: 15306 - DNA, 5748 bp, Cannabis sativa
ttcatagtgtagttgaccctgattagtaaacctcatcattattttgtgcagaaaagaaaagggtatgataagtgcaccactttattatttatttattttttattattctgtagaacaccattatctttttgatacatttcatctctaagataggaaagaaaaggggtatagtacccttgtagtgactgctatctcttggaaaggtgcctctagactaaaatgaatagctggttgaaatacataacaagtgggtagagcagttgaaaatgttcatcttagcggaattgttgttccttggatcttttatttgctgcttacaaacacagaaaatagaacttattgtttatgttgtgcaggtggaacatttgctctttattccttgctatgtcgacatgcaaaagttaaaattattcctaaccaacaccggactgatgaagagctaaccacatatagtcgttctacttttcatgaacagtcttatgctgcgaaaaccaagagatggctggaagagtatgcatacaggaagactgcccttcttcttcttgttcttgttggcacttgtatggtgattggtgatgggattctcactccagctatatctggtacattaaagtctttgatcataaaaatattggattttgaataccgtcacacacttcccatacatcctatctttaaatttttcatctaaaaaattgtaactcaaggtacataaaagagaaaatttaatagtagcctggaaatacttatgacatttaggacaagactaagcacttaaaaacttcacagatttgtatctttatataactggaaattaaggcaatgtgatcggatatataataagtatgagatagataggagctttgtaatatgggcagtttcctctcataggcaggctagtcttcgcgattgatttctgcttaagtggttgtaagtttgtaacagttgatatgagagcctgcaccatgggcaacttgcgaaaggggtgactttggaaaaagtgtagaatgggctgcagtgaatgttgactttaaagggggtgcattgttagaggaccgttgtgaacgtcgactttaatggggttctgtgaacgatgtctttgatgcgggtgcattggctggtgttttaaaccagttgggcaccctcttctcttctcagctagtctttttgagtgagttctacccaaggggttgtaacaatatccaaccaaataacaaggaaaccttaataatttattatgaacaaaacacacactatcatgagttaagacccagatgaattgatacatcacaattcatgttggtcagtgatatgtctattgatgccgttttgataacacagaagtaaagaaaacaaaagttagagagataacaatcaggagaaagccaataaactatatggaaaagcaaaaaacagagctattttttcaccctttttgatacattctggactggattctaccagacgcatgacatattttatctaggagaagagcctaaaccatttaagttagtgtctcgcaatattaaccagtaagatttatcataaacaccaatcagcgatcaaggactatggctgtcatgtttctcagggatgtttagatagcctcttgtagatgtggccctgagggaccttctacccttaagcatagatggggttaacctttacttccctgagtacctgtaaactggtctagcttctttaaacccgggaattttttcgccactcaattttgttagaaacaacatcatttcaattcttaacacccctgtcattttttgttacagtagtaaataacgatggctttcctttgcagtcttatcagctgttggtgggatcaaagtaagaggccccactatgaattctggtaagatcactgcttgaactgaaaatatttatgttcgcttgtttcttctgctccaccatccactgtttttttatgttctaaaaatatttaattgtttccgccttgttgtggaacagatgttgttatacttgttgcggctgtagtattagtaggactgtttagtatgcagcactatggcacagacaaggttggttggctctttgcaccgattgttctgctatggtttctcatgattggaggtataggcatatacaacatttggaaatatgacagtagtgttctcaaagctttctcgcctgtgtatatataccggtattttagaaggaatggaaaagatggatggacctcccttggtggtataatgcttagcataacaggtaaattttccacatataattttaacttttggctatcttaattctttaaaagctattatatctggtcttttttgttctgacaacatattgggaattatctcttgcaggaacagaggcactctttgcggaccttgcccattttccagttctagctgttcagattgctttcgttctaattgtctttccttgccttcttttagcttattccggacaagctgcataccttatgcaaaaccatgatcatgcaagcgatgcattttatcgttctattccaggtttgttttgaccttttctttacactgaaggcattttattgcactataaacccatgtaattctgttcacaattgcaaatactatctggtagaagtgaaatacataaataaataaaatttgtcacttgccaattgatcaaaggaaaactaataacatttctctggaacagccaaaattatttaaactttaattttcttatgctaatttgtgttagtgaatctcctaaaagataccaatgacatgagaatcaataatccaatgagaatctcctaaatttgggttctgtttttttgcttcactctcattcttactggaggaagattaggatagaggggaattagtacacatatcttgaatttactattatgatttgtcttatcaatgcttatttcttcttactcgccagtaagcatatattggcctgtattccttgttgcaactgcagcagctattgttgcaagtcaggctaccatatctgctacattttcaatcattaagcaggcacttgctcatggatgttttccaagagtcaaagttgtgcatacatcgaagaactttctcggccaaatatatgtgccagatatcaattggatcctcatgattctttgtattgctgtgacagctggatttaaaaatcaaaaccaaattggaaatgcttatggtacgcttttcatcagctaaatctttttgtctgtaatttatcaattttttaaatatgtgaaatgcgtgtgctttcgtttttttttttattttttctgttccttgacctgtccatatagctatatgtgtctccacagagaatatgttaataactgttagcattatctctttctgtaaagttgtgattgatttgcacaagaagatgataaaacttgcttaaccaaaacagaaaaatatagaggaaaataattgcagtgcaccagagataaaaactgaagtgttgaaacacttcaagctgagaatggttattgctgaattgatcaggattacatgaaattcttccagagggcccggtctctccccttttccacataatcctttcctaccaaaactcagctcacacaactctatttatcttctccccaaacccccagacggttaggcaaaagcaaaagtaaagaaatcagaaatataaaatagaactaatcatttctgtatatttaattcaagctaagcactgcctatctatttcttcattctcacatatgtgcagttaaccaatggcttatcagaagaggtctggatgaagaaaccaaaacattaaaaaaaatataaatagattcaaggtggagagttctcacattgaacaagctgtggtaattccagatccacctccctgttcaataataggaccaggaactttatttctgaatttacagtctgtcttttggaatagtttaggtgtagggtttggtatggttacctttcgaaatagtacacagtttgtttgggttgcaattgttaccttttcgaattgtgaatacactagagtggagagaaattttaatattgattaggttggagaatacatgtctacagcttacaatagtagatacaagactcttgatacctttctaagttaaaaataacttgtttgctgtaagaattgtgttttttttttcattcttctaatatgagaaattctgtctgaagtgatatttaatggcatgataatttttttttttggaaaaaaaaaaaaaaaacagggactgctgttgtgatagtcatgttggtcactacactgctaatgactctaatcatgatcttagtttggcgctgccattggattatcgttgtgatcttcactggtttatcactgcttgtggagtgcacttacttttctgctgtacttttcaaagtggatcaaggtggatgggtaccgcttgtgatcgctgctgcttttcttctcataatgtttgtttggcattatggaactgtgaaacgctatgaatttgaaatgcatagtaaggtttcgatggcatggattcttggacttggtccaagtttaggacttgttcgggttcctggtattggacttgtgtacaccgaacttgcaagtggtgttcctcacatattctctcacttcatcacaaatttaccagccatccattcagttgttgtatttgtttgtgtgaagtatctcccagtatacacagtgccagaggaagaaagattcctggtaaagcgaatcggaccaaagaacttccacatgttccgctgtgttgcaagatatggctataaagaccttcacaagaaagatgatgatttcgagagaaagcttttcgagaaccttttcatgtttgtacggctagaagccatgatggaaggttgttctgactctgatgattacagcatttacggccagcaaactcagcagtcgagagagggcctattgaacaacggtggtaacacaactcgctccagtgtcgatcttactgtctcttcggtggattcaattgtacctgctaagtctccaacgcatttaaactataatacggtcgggtcttcaggtcaggtaagcagtcacaccgagattgatgagctagaatttttgaatagttgtagagatgctggagtggtgcacataatggggaatactgtagtcagagcaaggagggaatcaaggttctataagaaaatagctgttgattatatatatgcatttcttaggaagatatgcagggagaatagtgtgatattcaatgttccccatgagagtctattaaatgttggtcaagttttctttgtctaacttctatttttgcactatcatccttcaataatatattttacatctcatccttgtactacacacaaatgtaaatgtctatttcattgtcttggccacccatattgaacttcacaaattttgaaaaattccttttattagtaaactagttcaaattgtatataatattactctcgagacgagtgaaatgcgtgctttaaaggtagtgattttattgtactatgggaacgtaacaatatactgaaacaataaaaaagtttatgaaataagaatgatttttactcttgcttattgagacaacgttggatttttattttaattgaaattattttttatttttttcttaattttttcttaaagaaattgcttagataatataatattaagcaagaaagtttataaatcatttacttatgatgtcactctatttttttctataaaaatgagtgacacagatgactatactatagatattatatc

SEQ ID NO: 15307 - DNA, 5760 bp, Cannabis sativa
ccatgattcattatttattactttgatggcttaattccagttgttgaaaatgtgcatcgaatactagtatgaatttcaaatgaaatgtgggatatacactagtgaggaacttatcttcaattttatatatacgactatagctttttaagcttcttttggctttatattttgatatttacatggatatatgaccatataccacttctgagttcttattggactgtttgctttgtgtatgcaagttgtctctatgacagttgattattgttttactagaggagaaagtggagctttgagctggctagatatggaatttcttaggacttgtgctctctatgtgtatctaggctattttctaagatgagaacttacactcgttctcagaagtatacactgtagtgatattatctagtctgttgtttataacttgtattaaaatatttacatgggatattatttgtttaaattttgaattattgtggcaatgatatggttataaaagctatttaattatttctcttactttttagtttatgtttttaacttttgaaatattattgcaatggccagctgaaactgttatatacagaatattttactacataaatagatgcgggaccggtcatcttaccctcagggagctgaaacgtgggaacctgattgatgccatgcaacatgcagatgaagaagaggacatcaacaaagtgttgaggtaaatattctggataaggacttgtcgtagctgtgcgtggttattatattactggtatagaatagaaaccatatcactagttttcacttctcacatgattatatgataagatttcattgcatgagtatgcttccttgtaacatgatatcaggtttctaaacatactaacatctttttgtcccgtgttattctttgacagatacttctcttatgagcatttttatgtcatatattgcaagttctgggagctggatacggaccatgattttttgatcgataaagaaaatcttatcagatatggtaaccatgcacttacctaccgtattgttgatagaatatttacccaggtttgtgttgctgcaatgttttgtttttataattaccattacatacaaaggatttttttttttggtattcaataagaaagatatattttctgtcttccctctagtgctggtcagatttattattaagttttagaattatttatcacctttcttttggctggcagatccccagaaagtttaccagtaaagttgaaggaaaaatgggctatgaagattttgtttacttcattctgtcagaggaggataaatcatctgagcctagccttgagtattggtatgtctgcacccaaattttgtctgtttttttttgttatgttgcttttggctggatcactctaattttaatattctttcatcttttcgtttcttggtcttcttataaatatgctacttttctgaggtagcctttccagcttacaagaaaaaaaattatgctagaacagttgcctaagttcagagtaatatgctattcctatttttcactcatcatcattatggatgtgacatgtctctttacttttatattaaattaacttagaggagggacatatacaagcaacatatgatctgattttataaatctgcaagcaacatatgttctgattttagtttggtaaaggactgttgatcagcttagcttagcagtactaatgaatgctttgctttctctatttatggtacttgctatgcccttcagcttgcgtagttctgacattaattttcttgtaggttcaagtgcatagatttggatggaaatggaattttaacaagaaatgaactgcaattcttttacgaggagcaattgcatcggatggaatgtatggcacaagaacctgtcctttttgaggatatactatgccagataattgacatgataggacccgaggttttacgttttctatattagtcactttttttttataataaaaaaaatgtcttaatttgatggtttcagtggattaaactccctttcctgcattcaccattttcccctatccacttatttataatttctatccatttcttaagtggtgaatcaatgttgctagtacatatttctagctaactaagtttcattgaatttttatttcgtcaagcgaattatgtgaatttttaaattcaggctaaggagagagtctgcaacttagtattctattaatgtttgaattaatctgttatccaccacatctgtagacagtatgcaaataaaccaatgagtattggcttggtacggtatatagtcgtgtatgttgagaatgctaaagaaagttatagccgtaatttgtctagtagaatgttttatgagaatttcagttggtcatgtctagctatttcacccaacacatttttttttcttttctaaatcaattgtgttgagagagtttcatttgaggttgacattgagttcctttctcttgcagaatgagagctatattaccctccgtgacttaaaaggttgtaaactttccggaagtgttttcaatatcctcttcaaccttaataagtttatggcatttgaaactcgtgatccgttcctcatccgtcaggtacatgatacacatcaactaattggaacaaattttttgtagaagtgatatcatttccattgttagttttgggtttgatggtgctgtgatatgaacaggaacgtgaaaatccaaccttgacagagtgggatcgctttgcacatagagaatacattaggctttcaatggaagaagatgttgaagatgcttccaatggaagtgcagaagtttgggacgaatcactcgaggctcccttctgagttcattaagtaagctaagctaattaagttgttttctgagtcaccatgtaaattgtctggccaaagtttggttgctcttattaattatgcaagtaaagaatgacccctttactcaggcacatacagatacttgagagtccttcaaaatgatatcattcatcacatttcccatacatgtgataaatttaggatggttaaatggtttcgactgtggctttttattctattttttagctcttgggcgtcaataatttgataagagcactgtgcacatgataaacatcagataaatataaataatctcagaacagctagattttcattttctctcatctgcactaaagaaaatcaagttttggtgcatgtattcacaacctctatatgcaaatatgtttttagtttttcattctggcatgctggtatgctgttgctaaatgcattacctatgaactcaaatgcgccatagatggatcacattcacatgttaatcttcacgagaaacaagttatttccttgtgttcattctctttatgactatagcaaatgattatatatatatatccatgggaactccctttatttgtttttgttttgttgcaggccctgacaagaaattttttcttaattcaatctttaaactggccatccatccaagtccatagggatcagttactgaatgggcacacagtgtagagagagacctgaatctatcaaaaggggaaatctgggttgcgcagtgtgggaaaggcattgcgtgccacagcaataatattaataatttccagatattcgagtgcagttattgacacagcattgattgattacaatcaacagcccatttgcctgcctctcatacaaattagaagttgcacgaggagtagctgtctgctgatagttgatcgatcaaacacagccagatttaaagtatttaagaacattcaattccttccccctctcacctttttcttttactttctcccaaaatttaaccttcagttgtaagttatcagctatgttagtctctcttttcctcacccccttctatttttccccagaaaaaaaaaattatttctttcaagttagtggttggctctttagatacatgctgggtggtttcagattttatttctcatctaggaattttggatcggtcttttgtcattataaattggttttcagtgttgattttttttattttcggttcccgattggtcaattttcagttctcggccccatcattcccacaatttttcgttggctccctatattgattgggtggggtcgagtgaaacagcggtgattaactactaatggcttaagagatgataattgaaaaaagaagcttggtattgtagtctactactctacaactattgtcaagttttgcggctcctatgatgaaatagttcattttgttatgtgtttgcttggtgggtattcattttgatagtctatactatataccaagtttatgcttaaagatgcaacggttgcataaagtatatatttcatttaatgatatcatttagaataatcatagaatctagcatatcatatgtgaaggaaagtaattctgagatggaacttcaatggacagattcaaattgagttgagataagactcgctttcagctaaacagaaaaagcacatccagacaactgaataacttaaattgatgtagtatttttttatgcaccttgtttctataacaaactaaataaataaaaacaagtactattatcctttcagaaaagtaaagaagtaagcattattgtaaaccttggtttggagaagaagagtgctgatttgttaatgtttcaatcttatataatttaaatttcctcaaaagaagaataaataaagtaatattttcatatattaaaatttgagagttgcgaaagagggaagagcatataagtaattgacttaatttttttaatatgaacaaataaaataaataatagggtaaatatatataagatatacttttgccatcaatttagtgttataataaaaacgaagttaattttatggttaaacaacagagtttggtcaggtctctccctgactcgtgtatgtaaacaaacgcaacctatcaaggaagaaggtaaacccataaatttggatcagggtttggactttggaggttcaccacctggcttcggatttgagcgagtgtgaggaagacagcagcagtagcaacagcatcacttgtcagaagagccagaaatcagaactcagaagtgatgaaggtggttgctttagtaagcggtggcaaggatagctgctacgccatgatgaaatgcatccaatatggtcaccaggtccttccactttcaaatcccctgttatatttcagctactatactctttctttttctttcaaattcattttaacaatcattaccatcaccatcttcttaaactcgactgcccactggaatttgatttctaatatatcttcttctccacctattcatgttgtcatcggttaggttgtggcattggcgaacttgatgccagttgatgattcagttgacgagctcgatagttacatgtatcaaactgtaagcttttatttattttaaagaagaaaattaatgaatgccccagaactttatttaatgaagaaatatgccagactattgttgacatttgaggctagattggataggtttggttgggtgagtgtgtgtgtttgtgactctgagcttcaattacccgcaaatgtataattaattagctgtttggattggactattgattgcttttatcaggttgggcaccaaataatcgttagctatgctgaatgcatgggacttcccctattcagaaggagaatacaaggatccacaaggcaagcctttatgcagaaacttttggtaaaacctgtatcttatatttcggaaggttcc

SEQ ID NO: 15308 - DNA, 11797 bp, Cannabis sativa
ttttaatttttttttttcatatttgcttcgaataatttctaacaataaataaaaaaaaattaatttgggattgactccttctcataaccatatgaattgagttaattaatcatagggaatatttcatttttgtaggaaaatttggaaacgaagagagggaaaatatgaaggaaaagtctttctcaaataaataaataaaaaaagaaaaatatgaagttaaagaagaaagtatatgtgacctagtaatgccggtaagacagccgttaagatttaaaatttataagcggacaatctatggactctctttcgtattccaacaaatctcaaccgttgatctaaatccaacttgctcgacatttaatctaggggctgttttggtttgttgttgtacgcactctcttccatttttcaaattttcttcctactgctattctcccaccatttctattccttctcttcgacacgcaaaggtagagaaattcatcaattaaagtattcgaattgggtttcactctctccacttacccttgcgctgtgagtaacattttccattttcttttgagtttaatcgcatttcgtttttggattctccgtcatttatgtgaagtttttggttgagttttttcttcttaagatgagttgattcactatttattttgattttgttggaatctggatgatcagattagttgggtttttaagatggtttgtaatatctgttctgtgattttgttgtcaattcagattttcaagaactctgaatttgtgggtattattgcaaatttggagaggcgttgggattggggtatgatgctattggagagttgttttggattgaattggtgtcaacaagtgttaaccttggaaatcaccttgaaacgtttgttaaggaacaatgactaggctgaggagaactagtgtacagagacctgggcttctagatgctccttcccctgatgaagttcagaaaataaagcctttgagagggtaaactatcctttttattattattatttttacaactttgtagaaatgattttttcgtttgcttggcttaattttctggtcatttttttctgtattttctctggttaatattattcggtgattgtcttgtagaaggaccagtggccctacaagaagatcaacaacgggaaaatggacagctgaagaggtgattgtttattgactaaacttgatttcatatgtattcttttataaaaattagtacttggatatttggttgaatttactacaaaacttttacgaagttcctacagctacattcagtgttaaattagtgatttctacattttcttgttgtaaaatgtttttacttttctttttcatgtttcttttgtatctgttgctaatgattgccctttataaacaggatgagatattgaggagggcagttcatcattataaaggaaaaaactggaaaaagataggtaaccaggggaaacttaaattactttaattgtattgcttatcaatttgaattccctttgggttgtttaacagatatactttgtgggatataatgtgctgacttcttactcttttttcttcttaacatttgaaattatgtaatatgcagcggaatgctttaaagaccgaacagatgttcagtgtctacataggtggcaaaaggttttaaatcctgaactcatcaagggtccatggtcgaaagaggtaaattgtttcttaagcattggtacaaatacttatttatgtagttatgatatatgcatgtatgcccaatatcttgtttctctttttgtggttttatatttaatctcaagattttcactggtcattaatttataatacaagcaggaggatgaagtaattgttgagttagttaacaaatatggagcaaagaagtggtcaatgattgcagaagctttacctggtcgtattggaaaacaatgtcgagagaggtatctctctctctctctctctctctctctgaaatgtgttagtctgtatctgtttgcatattttcaattttgcttattccatttctacaggtggcataatcatcttaatcctgcaataaacaaggagccatggacacaagaagaggagctgactctaattcgtgcacatcaagtcttcgggaacaagtgggctgagttaactaaatttttgcccggaaggtgggtttgttttagtagtttaagttttacagttcaccagcagtgtttttttttaaaagcttataagaggtttcatcttagattctttgacgtctgaactgaaacattgctgtgccttttttgcatcagggcagacaatgcaattaaaaatcactggaacagttccgtgaagaagaagttagaaacttatctggcatcaggtttacttgatcaatttcaaggtctgcctaatgtaggaaacctgaatttggcatcttctttggtggttcaaccaaatgtaaatagggttgaagaagaggacacttcagaatgtagtcaaagttcaaatggtgtcaactgtactcaatttgagcctataacagagactggagcttcaagtggaagggaatattataagactcaagagtccagttgcagcatggagcatgatttggagcaatatgcaatgtgtggaaatgcccctcaccaatttaataatatttactttggttcccacaaattgtctagaatggctcatttgagtgtaccagaggaatcatcagaacagcttggaacatcaggactctgcataactacaaatgaaaatcatgcaggatctatatgcaactctgtgggatttaattcagctgatacagtggacgatttgcttatagattctgttaagttggagcgcctactgatatctgagaatgattgttctaatactttattctctgagtcaagtgcacctggatgttttcctcaagatattgaagagaacaaatcaagtatcattggtgaagatggtgctagaagttcatcacattgttgtgttgatattgacaactcttttcctgcacagtcttcaccactgaagtcatgtgctcaggggaagggtgtctctgaaccgacgatggaattagatgccattccaatttcaagagatgacttcatttgtgttgactctccgactggtgaaacaggtaaatcagacaagtatccgaagttagacaaaggaaaaaatgctccaaaactgatcgctgtggatatatttagcaaaggaaattctgattcttcagagacttctctctctatgcatgagaagaaactgccttctaaagcaaattcttcacaaactgttccctcaatagatgatactactacacaaacagaacatcaagatttggcaaccctgtcatatgacagaccccattttccaagcatagatattccttttttcaattgtgatcttactgaatccaatggagaattgcagcataactatagtccttttggaatgcgccaactcctacttccctcagcaagcctttcatcacctcgctgcttattattagattcaccaattcgagacagtactccacgtgccacattaaaacgtgctaagagcttcaattcttctacatccatgacgagaaagcggttttatgaaatgttgtcaccgattaaagaaagaaaaagtgaaattaaatttgacagggactcaaatatgaggtcatctagtttctcgtgcaccttttcttccctagaatctatctttgatgaaaatggcgcttgcagaatgtcgatatcctctattgaggattctatgctagatgaaaccagtgtggattatgcttttgaagagggaacaaaaagggtcgataaattagacactagaatttcagagaaaattgaaagcatcactaattcttcagacaagcttgcggagaacactaaagttgatgcagaagccaaggtagataacaatgacactacttttaaggtgggttatagctagagaattagtttacgtaaatgcaattagtagaccatgatactgttactgttgttttgtcaaaggatttatttctttatttccttgtaatgatttttatttgctacttttctgttttgattggtaactgcagcagcaacatgcagacgtacttattgagcatttggataaccaccttatcatctctcccagatatggacaagcaaatagaaggctggctgttgcagttttgagtcccagaagtcgatatactagaaaattggaccgattggatcaaggtagctcttttgactcggtagatggcaaagatgaaaagggcaaagttcctgttacatctgtagaatgtccatcaaaggctccagaagaaattacttctggaactgctggaaatgatgctgatattcaaagcatttacatgtaagttgcagatgagtagtcaaagcacaagatatattttttgtccttgcagtttgagatatgcttatgctgctttgtcttttgggttaggattggtgaaagtccaggaacacaaagggatctggaatctccatcagcatggaagttgttgcgttcctttctacatggacccggagttgatgcagacatcccagtcatggtagtttaaaatggacattaaaatgaactgttctgcattgattatcactacatttttttaatcagccacatgagttctcatttgcatttaaaaaaacaattttgcaggatcttgaatacatcatgtctcctgggatgagaagctatgaagcttgtggattgatgagacaaatgaatcctggggaagttttagcgtctgatcaaaatcatcctgaaatttcttccaagacaatggctgcctttgaacctattttgtttggtaagggcgactattttcttcatgatgagaaagagaatttgcctccgaatgtacacttggtaagtgaatttcatcatgaagctttcacccttcaaactattttttcatgaccaacttcatatacactcttgaatcacatacattattaaactgaaaaaaatgaaactgcagattgatggacgtgttcttgattttgatggatgcgatgggacgcctgggaaggaaatggagaacaaaaagaagtttgctgctggcacatccagttcaagttcctcctcatctcatctgctgaagagttgcagatagtgattttacataatatgtgtgtctatatgtatatgttcatagtatttttcagtgcttaaaattctcatggctgttgatttcaatttataattcagtatatattgagaaaccgtattatacaggaatttaagagaataaagattccatatcttatgcaaatttttgttttgtgctaaaaaacgtaacaaatatgatttaacagttaagattttggacaactattgtgtatttgctaacaattgttaaatttatccttaaaccattattccttttcttcaatattagaccttttaatttatcatatgaagttgagatcaagctgtgttgttgacttataaggggttttaatgtttttcatacaaaataaaatacatagaattttttttttttttttgagatgagaagacagagacatatggtgtcaaccaaagtctatttattaaggaagacactattgactactagtgtgttactcacgtttgtttaaattgttccttttttttttttttgacaaacacgtttgtttaaatggttaacatcttagtttcctagttagcccaatgaagcttactccaccgccaaacactactatgtggagaacacgtcctacttatttactcatgtttagtttaatgatcctatagataaaataaaaagaataaaagtaaaaatatttgaatattttcgctattcattttttctcatcataatagaagtaacgtttggcatacctagcaactacagttccaaatttttgtataaattcaactgtttaattagcttgattaaacagttgtatataaagattaatgttagagaatagagacacccgaaaattgtacaatgatatgtatttaatttttactataaatatttctcaaaaaaaaaaattactataaataattatacatgggaattatataatttttaattatgtaagtgagaattgagattaattaataatatagataatgtatagcaataattactcttaataaatatacaagacaaaaattaaaagtgtaggagtagcatatgattgcatttacctataattaacataaataaaagaacatataattacaacatcgccaaaaaaaaaaaagagagagataattacattctttcacaattttttattttctcgaattttcaacgaagaattctaaaaaaaacaaagaaatgtcctaaatttacaagaaaaataccttttaaaatatttatatataataaaaagaaaataggagatcattttgtatttctttatttatttttggaaaaataggagatcaatttagtcatataatctgaaaatagagagatatcagttaaaaatttatgatttcccgggtcttttgccaaagagctgacctcccaaccactcattgagaaaaacaaacaaactcatcaaaattagcagtgatttcttttctcttttcttgtttatacttgaggccaaacatttcattctctcaaccacgtttctatgcaaaaacagaaaatctttgccaacttctaaagcaatctcacttttttttttcttttttttgcatttctctatctcattcttcaaagaccaaagcctctctcattttggtttgagagggaaccaattgtttttccaatatccaatatttgtttgcttaaactctaaagcaactccattttttccttttcctttctatattttcttttgttgttgctgttgttgatgttattgtttttgccaatgaaaaccatcttgttgaagatataacaaccaaaccaacttggatagctcgaattcacaatggttcgggcattctctaggcaagaaagtgtacaaaaatcatcctcatttaagctaaagaaaatgtttgaaagcaacagttcagggagacatgttcagagcttcacgatggagagtggacgtgaaggacaggaggattgtagtggtaggcaagcaaggagccagggctcaaggattggaggagaccgaccggtgcaccatatgaacataggctcagcactcaaagatgctactttcaagggtccaatttcatgtttggataatattaagggcaggacagctagtcatcttggtaatttattgtcttcttcatattttgaatgtaatgagtctatgttatggaacaaagggaatgaatctttttggtttggtttcagatatggagaatatgaaggagaggttttctaagctgcttttgggtgaagatatgtcagggggaggaaagggggtttcatcagctttggctttgtccaatgccataaccaacttagcaggtactttaaaacttccttttggtttttggttcataaataaaagttatcattattgttgttccttattattatgcctttgtttccttgttgtgcattgcagcatctgcctttggagaacaaaggaaactagagcctatgcctgcagaaaggaaaacaaggtggagaaaagaaatggattggcttttgtctgtaaccgatcatatcgttgaattcgtcccttcccaacagaaatctaaggatggaatcaacatggaggtgataaatctctccatctctctctctctttcaatatgcattaagatgtgaatgtaaaccctcttggctttggtttgacagataatggtgactaggcaaagaaatgatctgcacatgaacataccagctctaaggaagctagatgctatgctccttgtatgtatatattttctctaataatatctagtttataagtatttggcctagatttatagaactaatgaggttattataataataaacaggggtatttggataactttggctctcaaaatgaattctggtatgtatccaaagatgctgatgactctgagaaaggtaatttccagagaaatgatgataaatggtggttaccaactgtaaaagtttcaccagatggactatccaatgtatgccggaaatggctgctctttcagaaggaatctgtaaaccaagtactgaaagcagccatggcaataaatgctcaagtactatcagaaatggagattcctgaaaactacattgaagcccttcccaaggtatatatatatatatatatacaaatatatgactttacatctaaaagaagataactaaattttggatccattgtgtttgatttaatatagtctttttatttggtgtatgcagaatggtagatattgccttggagattcgaactataaaagtataacagatgactactttgatcctgagcaattcctctcaacatcagacttatcaactgagcacaaagttcttgaccttaagaacaggattgaggcatctgtaatcatctggaagagaaagatgcaccataaagatcatggaaagtctagttggagttcaggtgtgagccttgaaaaaagagaaatatttgaagagagagcagaaaccatcttactcatactcaagcaaaggtttcctggaatctcacaatctacacttgacataagcaaaatccaatacaataaggtaagaacaatatctgccgcaactgatgtatctgccataccacaggaccatgaaaactcattttcttctttaacttgtacacaggatgttggatacgctatcctcgagagctattcgagggtaatagaaagtttagcttcaacagtgatgtccaggattgaagatgttctctatgctgattctgttgctcaaaatccatcatcagcaaattctaatggcaggctttcgatgtcttcttcaccgatttcactaactcaaatgtcccaaacctctgaggatgaggcagagaagttaagctcatcagatacaccaacttcaatgacactatcagatttcatgggctggagtttatctcaaggagaagctgatggtggtaagaagaatgattcaaagggaaataaggacaccttattgaaacaagcaaacgatcataagctagtgaacaaacctgctaatatcaacacaaagaagctgtcttacttagagaagcttgaaaactttagtttgagaagtccaacggctcgccattaaactacagttgaaaatgaaatggaacaaagaagataatgaaacagagaaagagaggaacatatagacgatagaaaattatagagagatagcttggaagcttgtcttttgtaaatatcgagattcctgtaggatagcttccttcctaccaataaggggaaccttggctcttttgaagtgtttactttgacacttgaaagagatgtattttgaattgtgtacgagaagacatacatacatacatacattatgttcctcaagtcagatacttaaagtctgttcttgattaatctttgtactcttttataagttttttgcttagaatcgcactcacttgatttcgaaattttcttactcatttctcttccaattaagaaaaacaagtaaaaaacggctgattcagttggcaatccaattcccataatgtggatctgaattacagcaaatgtttctttccaaatcataatttacaaaacacacttcctaccatcttaaaggttatttacacacaaaccacaaatgcataatcattctcaaccgctagaaaaccacaaccagaaactacctatacaagtagatttgattccttaaaattttcatgcagttcttttggcccgtcgaatgagtgaccagatgtcacttccatgtagagatcttttgataatgcgtgaattcttccttgtctcctgcaacacaggtaagcatgaagaaagtgaaatgggatacaaagagaaagaataatgaattaaaagctgaaaacatgaaaacttgccaatgatcttagaggtttaaaaagtactaaaaatacacagtaacgctttgaatatgcctacctggaaatgaaaagcaggatttggaactttagaaagaatggagaagccatcacgaacaggaaacactgtaaaccatgaatgaaaatggagtacgtgttataccaagaattgcctaaaattaaaagttagcttttaagtaacatatagttgaggagaaaataagttacataaagctgagttggttttcccgttagagagagatggttttcgagaatgtgtaaatgcgaaaatgggagtgtttttctctctttcaaccattcttttttcagtgacatttgtggagactgaatttctgcacacaatttattattatgttattagtctaacatatgtataataaacactttttcaaagccatgtaaagatgaaaaatattaccttaaatcttcatctgatttcacagcttcttcatttgctataaaagaaaagcatatcataagcataatttattaattatgaacaagccaataaagtataagtataaatatttgtatggaagaaaatattacgtgaagataagtaacgcaattgatgtcttggtataatttctcgcaattgaagagtggagagagcgaggctgtgaacaaattgttgagaaagtagaaatctctgcttgagagagttgattcgaatctcagcttctgagaattcattggttttggaaatgaggccatttatattttcagagacacatccaaaatgatcaactaacgtaaccacagccctgcatacgtattcctttgtgttctccaaaactctgttcaaaaccaccacttttaaaaccacaaaaaaaaaaaaaaaatcatcttaaaactgtattttacaaaaattacccattaaattttctatttaaatttataattttttaaaatgatacaacatagtactctaactctatttattatcaaaataatagttatgtgactttacatttttatcatctattctgaataataaactattcttgcttaaaaactgaattcagtttggttatgttaaaaaaaattgataaaattgaactcaaggtactattttatactaatttaaaaactacaaattcaatttgttagaaagtctgtaatttttgcaaaacataaaatctaaaataatatttacctaaaaaaaactactcacctctaaaacgacaatatcctttaaaatggaaaagaaacccagacacgacaatacatttattaaagaattgcaagttgcactgttttaaacgacaatgccctaaaaagttcatgaacgcacgacatcttaaaaccaccgtgaaagcaaaactacagtaaagtttaataataaaaacgacgactgatttagaataccaaaatctactgactaaaactgaaatgaaaactggaacagcactaaataataaaatacaaacttttgtaacaattaatgagatgacaacacgtataaagtactatacgaatcaaaacgaatgaaagaatgtaacaaactattttaaattcatatacatccaaaatacatttatatcatagaaagagaaaaaaaattgcatctaccttaatccaaatatagataaaagaaaattcttcttctcctccaactccattttatatttgaaatcagttttacaatgatactagtaaatattaacgaatatctactctttaaaataaaataaaagttcattgactactgtaggggaaggctacaaagttgaaaaacgaacctatatgaactgatatttggttagatataaacaaaagatgggaataataataacaggaaaatataaaggttaacagctttttgtttttatgtaaaatactacttttctttttcttttcaaaaaaaa

SEQ ID NO: 15309 - DNA, 2649 bp, Cannabis sativa
caaattttagcagctgaaggccactccatatatgtgcggaatttgccctacgatgcaacagttgaacagctggaggaggagtttaaaaaatttggtcctattaaacgtgaaggggtccaagttaggagtagcaaggtttgccccaaagaatatgatgcaatttcaaatttaatttcttgatgtaaaatgtactttattgatgtagcactcaatcatattatttttattggtttcttgcagcaaggtttttgtttcggatttgtggaattcgaaaatttgacttcaatgcaaactgcccttgaggtaatcttacaaaacttagtgttaatgttaatctgcatacttactattcgtttcaggcttatgtaaataaatattttcactgggtcatatagggtcataaagtttttaattaaggtggatcctcattgtaagcaggctctgcttgaatttggctgaacttcttacagaagtagatcttgaagtgattaaattgttaaaagtaaatagtttgccttaaatgctatacactataaataattagtaattctgttggctgacatgatgatttatctactgttgcaatatgttatgggaggatgtgtaaaatgtttggcagtaaaatgattctttttcccctatatcccatgtgtctggtaaaactagactacagcatcattattatctggctttagcacacgttatttctcattttattttattgaaaattacatttggagcttccatcttgtatcatattactctcctttctctttttagtttaccttatttctgtatatgatagaagatgtcattttaaaactgcaggcttcacccattacaattggtgatcgccaagctgttatcgaagagaaaagaaccaccactcggggtaaatatataagagcatctgtttttttttgttaggttgatgtagctttcaggttttagccatgctaataagttatttgtttcagttagtggcagtgcgagaggaaagtattcttctggaagacctgggtttaggtctgacagttttaggggtcgtgggaacttcagcggcggacgtaattatggaagaaacgaattcagaaaccagggtgagttctcagggcgagggcgagggtcagccgggcgaaatggagacggttatcagcgccagaatggaagaggtgggcgccaaggtgggggaaaccgcactgcagttgctactactacttgaaatgaaacattggtggaagaaagagattggtaggcatttttttaatacaaatgagggtcattttttttttcctttcttaaatcttttttttttccttcccccctctgtttggataaatgaggggtagattaagattaagattttgtttcctactgcaactgccaactatttatgtcaagattactgagattattatgttattttttttcccctggcttattttataaacggcctacatggcttggagaaaatgagattatggaatgtattctttcataagatatttgccacattgtcctctctatatataaaatatattatatatatagatgtatatatataaatatacttagtattagtagcatttgtttagagtgctttattaatttagagaataataataaaactaaatttaatacaatttaattataattttttagatatataaaatttaatttataaaaatatatttaattaattttattaaacaataaaatattttgttaatacttttaaattaaatttatatatttaaaattgatttttttaaaagataattaattaatttttttttaatggtgttagttgttttagcgaaaaaataataaaaaattattatactaacaatttgtgttagatatagccaactttaatataaaattaggttaatattatatctaatgtatgtatatttaattattttctcagtttttattttggttatatgtatatatattgttagttgtgtaattaattttttttcaatgttattcaataaataatgttattttttatcaaaaaaatatttaatttaagtgctatttatataaagaaaacataattatatttaaaatttaattttaattataattttagtttaattgtaatctttttaattttagttataatttattttagaattatcattcactcactttttctattttaataatagaaaaatatttttttaaatatgtgaattaagtaaaaaaaaattaataataatttaatttttaaatatatgcaatgaatataaatttgaattacaatattaaaaaaaaaacactttattaaaatatgcgtagtgagcttaaatttaattgtaatattttttaagaaagaaaaacactttttattatgtaactacatttaatatgacatagatatgagggtactccttggggcataattttgttcttacaagtgataacacatgtgattaattcattttgacacctcatttgttattgaactctaaatttcattcaactagaccaactcgacctcaaaaatattagcaacatcaaaagggagattatactctgaaaaaatataatcaatatataaacaagatactctagccataaaatgagcagtctgattagcagaccgtttgacaaaatgtaaagaaacatccctaaaagaag

SEQ ID NO: 15310 - DNA, 5542 bp, Cannabis sativa
ctattgaggccattgaggagcggttagctggaattcctgtctatgctcttagcaattcggctgatgagtttgtgttggtttcggggacttcttctgggaagtctcttgggttgttttgtttcaagaaagaggatgctgaggctcttcttgggcagattgagagtttggatcctggaatgaggaatgggtccaaagttgtgcctgttgctttgaataaggtatcatatgttatattgtgtatatataacatcaggtaacataagggtgatattccattatatatattgtacaatttaatggattggtcagaattgagaaagaataatagagaagttttaatttaacttttttcttactatattattttagagaaatttggacaacataacgatttaaaattcataaaacaagaatatttaatcataaaacttatttcactaccgatgaatatttaagatattaaaactcttggataataaaatattatcactctttgtctagtaactttgagttgtttggttagagggaaaaggtttgtgaagaatgtttttgattgtgtgtgtggttttggcaggtttttcagctcaaagttgatggtgtttcgtttaggttgattcctgagacttctcaagttaagaatgcacttatggtgaggccttttattgggatgataagctatttcattgtttgttctttaatctttacatggtttgaatttgttgaaatgtactatagaagtgtgaagtttaagagtggcaatactggtcatgacacgataacacagcttgaaaatgacataatgtattaatctaacttaacatgacctgcatatgacatgttttgatatcgtgttaattgtgtcacgggtttacctataataacagtatcgtgtttgcgcttgcattttatgacacgttatttaatcatattgtgttcgtgttaagtataattgtattgtgttgatccaaaacacgacacaaatacacaaattgctagccttagtgaagttgttttcataagtaaggatgtaaactgagcttttgttttgccttctcttcaccaagatatagaaaaagggacagatattttcaactaataaggctataaaagattttgaatcgttatctcaaatatcttttcagttttcgtgttgttgttttacatctgacccaattgtaggcttatatgacagaagacttatattggtagaatcattcaatcactaggatttgtttagttaaactcagtttgatttatcaccgagagaccttaactccatctccgttaactataatgagacataaggatttggtgtgtgatatctacatcctatgtggtcatcatcgatgatatgattcattggatcaacgtcgttaactccatctccgtttcattagtttttggattttttcaatttgagtacaattcaagtcttttaactacccttacattctttttgtttactattcatgcatgattgccatttagaacccttcaaaagacaaatcaacctttttcaatcttaaattggtagttaattgccattgatgtatacattatgcctaataatcaatgtttcttattttttcaggagagagaaaaggctggcatttctgatgatggcttccctggggttccagttttccaggttcttgtctttcttctctatctacagtacactcggttttgttttctcgatgcaaattaccacacatttagatcatagctcacaatgaatcatagagattaaactttggaaaacagggtattctgttatgatgaactataagatactgcatcggtctttccttgaagatgtttaggcggtaatgattgaaaaagccttcaggttaaagtatgatgatagtactaatattgctgtgtggtgatgactatcatctgaataagatttcttttatgacaagaagctggaaatgtcatgtatgtgggaaacacagtttttgtgtcgagagtttaaggatttacagttttctttaactaaaaaaaaaagcttcgggttttaaatgtttagctcgatggttatgctttcattttcatatttttgttattgagggataggggctatcctcttcccatttgtacatttacttttaaggttctatgtggacaaatcttgtaggcagttaagcctgatcgtcggtgttgttttggttcacttaagcctgattgtcttgttgtatgttgtgattcgattcccagacattccgcttcatccattgcatcttatttctttcatgaatttcgtaaactaatgttttgaactctcgaaacatttgaacagtcgaggagcttaattctacgaagccaaaataagagctatcaccctgcatttttcagaaaggttagtttagtatctcaccttcttacatatgcatccaattacttttcccgcgtcatcacagttgtggggtttttcttttttctttgtaggaggatttggaaaaatcgatgataagagcttctcgcgagcagggtaagttaaatcccgggttcaaaccaggagcagttgaggtatgtaatattctagttgttctcatttacagttccaaagcatgattttttttcgttttttttttcatgcttttttcttttggtctctgttacaggttgctgttcttgaagatgtaataaagggaatgaaggtattttagttctttcgagtttcaaattttctatctatttgatcttcttcaaaataaaacttagtataattccatacctcaggacagaatatttttttcttcaactcaaaatagtaatttgcacttgaatattcgccatataattatcgtttacgatacaatgttgagagggaacacgagcttgttccgcccgtgtatactatcttcttcgtaaagtaacagtttcgagtgaaaaaaacttcattgcaggagagctctacatcacagtgggatgatattgttttcataccgcctggattcgacgtctctaccaatcctaccgaagaagacaacacgaaatgagtatttattacaagtaagttagtaggcaatgacatctctttcacaagctcatgatgatcaagtttgtacaaaaagaaaacaaacaaaacttaaaagttatgtgtttctttctatatgttgttattgttgagttagttgatatgcttacacaaaggaaaggaatatcactaagttagggaattagatttaatgtgtatctacccaatttgcactcacactatttcaagtaatatgtatgaatctcttcttcttataattattattgtcttcctcctccctcttgtttttagagcattgctattgggcaccttacggattggttagcgatattgtttaaaaactattttctttagttatataggacccaatatgtaattacattaatagtggtttgacaccgagaaatgtgctagacactagtagtactttttagcaattctccctgttttatgcactttttttttttcctccgtcgggtgctacataacagtcggtttcgaagaatgatatcttaggaagatacgttcggtttggtttggaggaataaaaaagtaagaatagaaatagtaattatatataatatatagttaagaaaatcatattgtattgaaatagtacttttattggaatgatattttgatactttaaaatgaaactgccgaaggatgtggggtatgcctttaaaatgaaaatataggaataggattgagaatgagaataaaaataggaatggaataaaattaaatttaaaatgtataaacaaaattgataaaaaaaaaaaagttaattaattttcttgatctagtattgaatggttgttccttcaatttcaaatagaatagtcattctactaaaatgatagaaaattcattaacatttcagttctttaaaatacaaaggaatataacaaaaattattttcttttcattctattcaattaccttcaactaaataccatcttagtatcttgatgccactagggcgaaaaagattaaatcaacgtaactcctgtttggttagcttaggttcacacccgacctttgaggttctcccaaggcttggggttcacgtacatccgaatggtatctcccctctctcccccttttgtaaaaaaaataatttaaaatataaccagataaagaaatggaataaaaattgattattttcatttcactttattaccctaaccaaacacacccttagttatgatttctcccttttcctctcatgttgggagttaaacaagacatttttgatccctttacaaattagtgaagtacgccatcatgtgttgccttattgttagggttggccttacaaattttgtatttgttagtctaattatgtattacaagcaaatgtttaatttaggctccattagttaaatgtaaaataaaaccaaccacataatttgttgtgtaatctatttatatgaaaaaattaatgtgtcaaatatgttatctattaatattaatataaaaaatattattttggactttgtgattcgtaaaagttattgattaaactttctgtttagttaaatgataaaatagacattgtatttttcaaaatagtacaaataagattaaattgattttttttgtcaaaataaaatttaataataatctgatctagtaatgttatgataaaattagttatatttttgtatctgttcatgttaggaattgtttccatttggttatattaaaacatattaacgaaaatcgagctcagatttttatttttacgattttaaaaaatacaaaatttattttgtcatttaacaaaacaaaagattcaaccaataacttttacataacataatgtctaaaataatatttacccatattaatatttgtcatttaacatatttagggcatattttaaaatcgtctaatgatcatttgataaacgaatttaaaagttttaagctgtgttattatgtctcacctattttgacgcggatgagttattatcactatgtagtgcatacttctttttttctatagaataacaaacaatgataatgaatggtggctcttgtgcatgaatttaattttcttgggaaaatactcagaatattatgggttgagtcatgggttatgacttattatgacaaagaagagaagaaaagaaaagaggtaatctttgttttttttgttttggctttgttaaatggcatttgttatatgttatggggtcatttctttgccagaaagaaatatcactttctacactcataacaatatttactcatttattaattaattcatcataaaacaatctattattatttttattatttgtaagggaaatactataacccttttaaagggtaaaagtaaataaatttctgtttttttttttttaaacaatttactaatgtggtaatttataattttattaaaacttttatgttataacttgtttcagtttaaagtctgttccaattaaattgttaccttatttggtagttaaagtttgtggttaataaagttaattattccattaaaaaaaattaataaaaggttcaattt

SEQ ID NO: 15311 - DNA, 7293 bp, Cannabis sativa
ttaacaaaacagaggatccaatcgataacttttgcaaaatacagggtccaaaatgatatttacccttattttcctaattatctatataaatatatataattaacattttaactcttaaaaaaaagagagaaaagatgaatgtacaaattggcaaaaacatttaaacccatgatgattattgggttaaatgaatataatacctttcatgaattggtgacatactaacaaagaacaatttggtgttgtttggattaacatgaagttccaaccaatctgaccatgtcttcaaagccatctcataaactcttaacatattaacatctttataaacaccatatgatgatctctcaaaagatccccacctaattcaatcaatcattaatttcaaattaattaagtcaaatttggtagttagtaattaggtagtattatgtaattagattccaaataagtttaatataaaaatatacttacaaaactttcattttgggtcttctccaccaaagatatgaattaaaaataagaatgtctgcattggtccaaaatttggcatgattttctattgcttggactcttactattctatcttcaactcggtgactcactgggtcatccgagttggattccaccaacaatggtgcccaataaaactctattgttgcattgtattccttcattaacattcaccaaataataaaaaaaaaaaattcaaccattagtcctccatatataaatttattcatttattgaagttattaatgtgtcaaatttgtaattttcatttttatggttttttttggcaaagtccacaaaaatggttttttttgttggaaaaattattttgtgggaaacataaaataaacaagttaaaaaatatagaaaaaatagttagggtagctagatggataacaagttatctacagagataactagttaccttatactattattctcaaattattttaactgtctttttgaatttttttccacaaaataattttttagaaaaaaaaaaatcatatatatttgtataaaaatccataaatatgtgtataaacaaattacacacttgatagacatttgtatggccagtcaactaatcatatttatgtaggataaatcttactaagtaacttgtcacattatgttaaattttatgtaatttatgtgtatagatcattatcatatatatataaaactaattattgtaaataatagttatgtatataaaaacatgaatggtcaaaatctgtctattatatatatatatttttatttgttggtaaaatagccttcaagaatcaaatattttaactatgatattatctcaaatgtcattttacaaaagattattactttgcaaaatgaggataaaaaaattaaaagaaatttaacttagatggattgtttttttttaaaacactaggaagatagatagatagaatatattttcaaggaggctaaaatagagaaaaggaatctatagaaatgtttttgagacataatgataatttatattagaaaaaaaaaaagacacttcatatgtcatataataggtgagataattattaaaaaccaataaaaacaaattagaagatctccattctccagttgagtaatattaagattctagtcaataatttatttttttaacaatcttattttgacctaaagatttttagtgagcactttaatttttaaatattaaataaaagaaaatgtggttagaacttagaggtcaaaaatagtgtttggcaagttgctttttctaaaattgttgatgtaataaaaataatagaaaagaatgttttagtttgtttatatgtttatttgattgattgaaaccactattttttttttaaacaaaaactaaataaactaaataatcaatatacatagttttgaacatgcttcaaatcaaaatcacttttgctttgaaaaaaaaaaataataaattcacaatcactttattattattagaacactcttatccacttctctattctatctttaatacattacaaaaattttaatttttattttatctcaacctctaacattacaacttacatctatctcattctctactttttatctttatattatgtaaataatatatattttaatatataataggctcagctttgggcataggtagattaagtttttggttaagacccacctaatccagagcccagaaaccaaaaaaaaaattgtctttaaaaataatatattttttttattaattttaaaaaatatcatattttcttttaaataaaggcttttttttttttttttttgttatgacctattatatttcaagatcggtcctaacacatattattaaagtttgaaaaaattacttttttatatattattgaagttgaaagaataaaatattatttatatatgttactaaaatatgtttagagaatgaagagaatcaatataccattttttttttttataataaagctaattttttcttattctttactctaaaatgaagaaaaggtaagtaaacatcttgctgtcaaaattttagttttggtactattattagtgtcttacttttttttttcttaaaaataaaattgaaaaaacaaagaaaaaaagaaaaagaaaatgtttttaattcattattatgtggccagcccaaaggacttgcctttttggacatgcccaagcccaactagacaagaaacgtttaaggaaagcccatatccaaaaaatctaagaagagcaattcaacttcaaaaaattccaattaattttcctaattactgaatcttatcttaccaccataatttatttatttatttttttaaaaaatagaaaattgaaaaactgatattcttgtcaataatttttaaaaagccataaacccaaatagggtaagaaaaagagaagaaactaaatttgtaccatataaaaggagaattttcaatttttatggtttttttaggcaaattttacaaaaatgtgatttttttgaaaatattattttgtctaataaaataaaaaaaggttaaaaaatagggatttttacaccacataatttccaacctttttactgcgggacatttttttttttttaaaaaaatattatgtaagttttatacagtgtactgtgttaaattttcacggttgttctacggttgttttttagttgttccattgtttgtttaattgttctattttgttattttacggttgtttttaaaaagacagtatttttgtaaaaaattctgccccacaataaaattataaattttttctcaaaatctaatatttttgtaaaaacccctaaaaaatataagaaaaataatttagggtaaccagttaaccttatggtaagcagaggggtaattagttaccttatactatctccctatatttttttttttgaaagaattatatttttaaaagcccataaaatttgtaatttttaccatatataattattaataaaagataaatggaagaaaaagaagagtactcacagtggccttaaaaatgtttaaggagccatttgcatgaatggttttgaaagatggaagaatagctgagtcaatcaagcaaaccatggaaacccacatccctctatttagtgagtctcccacaaatacaagtctcttatttcttaatctttcaagtagtattgtggcattgaacctaccttatattaacatacaaagaaaaacaaaaatcccaaaaaaacttctttaaaaatactcaaataatataaactttattctattattaaccaccattactccaaaccctagttacaaatatatatagcatagagtaattgatgaatatgactttataaaaatatagctccaaaatttgatttaattattttattttttttgtaaaattgcatccaaacaagatcattgagaattttcgatagatcattatcgattgtatctgaaatatcatgttgcaaaatattattagaaagacggtcttttgtaatagttagggtaatttcttttttcgtatcgccatgacatgatcttagtctagacacgtaaaatatttataatttttttttataacgatatttattatagttataacaagctttatgtattttattatagaaaaataaaataatttatatgtgtgcctaatttcagcatattattcagttttttttaaaaaaatttaacactgttatattaaaaagataattataatctattttcatacccaaaataagttcacaaaaaaaagttcccataccataataaactcataaaatatacaaatgaaagaacaaaaataaaattaaaaaagttaaagaatatatatatatatataactgaccttggaatgtcacaatggtgaggttgccatctccaattctgaaagctcaaatcttttctaccaaatttctcacaagccaattgatcagacataaaagaacactttttctcattgtaaagagggtaagactcattgtccctaacccacttaccagagaacaaatcacaactcgaattcgactcggttgactcggttgatgactcggttgatccaagggatgacaacaacaatgagggtttaattgtatgtaatttggagttatttttgttactagttttggcacattcttccaagacttggtcaccattttgggtaaggtaaacaattgaaataactaagattgttattagaatagcaaggagagaatgaaagctatttcttattatgcctaatgttggagaaagagatttagaaggtgatgacactatttggctttggtttttaataataatattcttagtattagtacccattaatgatcatataataatatgaatatctctctctatatatttgggttttctagttttagactagtactttggctaggtttgtgtaaacccaataagtttatatatgatgggatttttgtgttattattaatttttttttgtttggaaaaagaaaaaagtaataatgataaggaaaaggaaaagaaaaaggggttgttttgtttgtccatgtttgaagctttgtgattggttggatgagtgtctttttctatggttggtttggctggattatttagaagttattgattttgatatttatattgatggagtagtggtttactgaaagcaacaaatataagattgtgacatggctttggaggttggactctatgtacactgcagtggttgtaataagagatcatttgggcaaggtgaattggatttatatttctagattagagtttgctgattcattatgtggagaagcggcggcttgttgtaatgcgttggaagtagcgaagaattatggttttaattttattatagttaagagtgatttgagggtagttatcaatgctcttaacaggactgtccaggtgtgagcttgagaactatgtctcattttgtattaagttgtctccttcctttattagttagtattttttttaatataagtagaaactgtaattttgttgccgataatgtgactaagtgagcatttatttacccaccagagatttgaatatattcttatttcctcaatacctgaacactttctttgtaatgaccctcaggtgtaactatcttttatctaatatatgatttttttttaaaaaaaaagacatagctttggaggtttaggttcttccttattaatcatatgatatataatatatatatagtaggaacactatttttgtcccaccttgtaaaatttatgctttcggtatttcaagaatttaatatttttttatataatgatctacattattgttataataaatatcgcatctgtttttaaaaagttctaaataattacgatgttgaaaaagagtttaaagattcgtgtttatttctttcatgtgcaactaagtgtttaaacattatttttaacactataaattattttattttttaaaaaacaggtaaaatatttattattactataatgtatacagttatataatttttttttaactataatttctctaaatgctaaaaatggaaacattgctattggtaggaacaaaagtaatattttagaataattaaaataattttaaaaattcatttttaatatatttttttaaatttttcatttttttttacattattatgtgttagtttccatatttattttaattttatttttcttttctaataattttcatataattctttatttaatttttttgtcataatatttaaaatataaagtatttttatttgatagatatattttttaagaatataaaaagaaagaaaaaaataaaaaattattataaatctaagatatatattttaaataaaataaaattattaaataggtgtcttaagtgcaaataaaactccacttatatattttaagacaggaaaattttatttctaccctataaaatgataagtataccctaatttttaaaaatattaagctttaaagaatttttaaaaatcttaatatattttttactttttttcttatattattattttgtgttaattttaatacttattttaattttttaattcatgtataattttttttttctaataaaatttcacataattttttattttaatttttcttgttataatatttgaaatataatttatttttatttaataggtatatttttaatataattaaagatgtatatatagatgtaaaataaaaataattaaaataaagtgtatttataaatttttaagtggaaataaaagtgatgaactatatattacagtttgtgaattaatgactatatcatcctttcatgtgggacctctataacggctcttcttgaattgtttttccagcaaagtgtgttaattaagataattaccaatattattaggtaaatattattggatgatgtatatatatatatatttatatatatataatgcctcttccaattattattaatttttttttttttaaaaaaaaatgttaaacatcattctttgtaaaattaagataatttattttgtgttgaccactaattaagactaatatataatttttataatattgcactatataatgtaataagctattatagctatagctatagtttcacacatttatacaaattagctgtatagcattttccttcttctagaattaataataatatatgttctaaatttaataattaaataataatatgttaataatgctgattaaattaattaacagttgagctaattttttttaactaatgctctctttatatctggcaaccatatttatagaattaaccactcaatatttaattgtaatata

SEQ ID NO: 15312 - DNA, 9980 bp, Cannabis sativa
  modified_base (9805)..(9815): a, c, t, g, unknown or other
caccacgtgtacaaatttctcagaataataatatatatatagtgtactcttgtgaatgtcttcagtggaaacattatagagtgagattaggtaattaagttattaatattagttagatagtttaattaagtgacatgaatctgattttagggacattttcactctctagcaatcccactcgtgggcacgacccctttttgatcccatttaattaattaattaatttattattaataagtatcttctaattttaagagtagtttagatcagtactatactcatacgatttttttcatttcttttagcccaaaattgaagattccgtacgtgtaatttttctatataaaataaagtattttagacatacacgacatgggtcaccccatgtttttaagatttttttagttgtatttataaaataaaaaaataaaaatattgtgctagaatacaacacttggagagtagaatgggacgtttttggggttctaataataataataattaataatattaattattagtttgcattcctaagcattaaatgttgtaattcattagtgactttaagaccttctgaatatctatctgcaggtgtatgaagtggccctttaattagtttttatatacgtattatatatatgtgggttgtatttaaaaaatacaataatatatgtacagagtattttattattattgtacacaatttttaataaaatttacatatatttatatattatgatcccacgacataatgaaaagattaaaaactcgaggtatgaaggggtgtgacttattcaaaagcatgttcacgttcgaaatattaagattattattgtatatatatatatagttaatttttttgccattattttttcaatagtgttttgaaaaaaaaaaaaatattggctcttcttttttggtttctatattttcctttttatctttcccacgaggagaaatttcatgaaaagaaacaaagaattccactacaaagtacaaatttttgtataattatatatgtaacattttcgtagaaagacataatatatattaaggaatgaaaaaaaaaatgttgctttttcttttgaagaaaagaaaagataatggtactttatacatgggtgttaatttaatttataaattgtcttgccaagtttattatggtcaagtttcaaggccactgatagtctcatctcatcctaaaaaaaagtcagaatttaattgtcgaaaaataataatattatagcaataatactaatccacaagataaaaaagatgataaaaatccaaagatgtttgcactattatttcttctatagtgaacgatctcaaaacttcatattctaattatctagtgaaatattaattcagcttataataaaggagcattttcatttgattttttagagaattgttaaaagacactattagtgtttagcaccctcctcggtgtcatactgttattggtgtaattaagtatcgagtctcatataacttaaaaaaataacttttaagaaatatcactaactaatcataaggtggcacctataaaaagtgttgggcactattaattcccaatagaaatgctcgaatttttattatcattactaagggtctggggattttcatttctagtcagcccgttgcacaagaggattgatgagcgaaggtctcttgtttaggaccttccttctgttgttatgagatctcggggtaggtttcaaagtaataaagcaatctggtgatgagtgtatgagagttgagcaaggttcgatgggtatcaatttgtatggtgttttttttttcaatttttaattttttattgttatgtttaattagtttagtttttattttgtttttttttttctaatggtggttctccaccaccctattagattaataggatttgtttttgtcttggtgaaaggtgtaagctctgtctccaattggtttatcggtgtctactcatcgatagatctaaatcgcttcaaggaagatatcttggtccctcactttggtctttagatcttagagaatctcaaatctttattggccctttgttatgtgctccaatatttatatttttagtgggctcgtcggcccatttcctagagaattggtgagcggaggtctctcgttgagggccttccttctgttgctatgagatctcggggtagtgttcagagtaataaagcagcctgatgatgagtgtatgagagttgagttgagttcgaaaggtactcatttgtgtggtgttttttttcaattttcaattttttattgttatgtttagtgtagtttttattttgtttttcctaatggtggttctctaccaccctatcagattaatggggtttgtttttgtcttggtgagagatgtaagttttgtctcctattagtttatcagtgtctactcatcgatggatctaaattgcttcaacgaagatatcttggtctctcactttggtcttcaaatcttagagaatctcaaatctttattgaccctttgttatgtactccaatatgattgagcatcacaaaagcattatcgtctcgataaagtgtggtcaaatgaccaaattaccctccaaagtcaaaatcaatataaaagaacattatgcgcacagaagtcatttcaatagccacaaatacattttacccaaaattggatcctcgaatccagtctaggtcaaaatgctcgtttatgactatactgtactatcttgtcaaaggtcacctgtaacacaataaatagatgttactcttaatgaaaaaaaaaaaaaaaaatatacccctactatctcagacttgaacaagtgcttctcactcaaggacttaggccaagttcactactttcttagagtggaaatatatagggatagcacatgaatgtacttatttcaaactaagtacattactgactttctgttgaaagttcatatagaggatgccaagtcatgttctaatccatctagtgccaatacaaaaccgtctctcaaaaagggtgaaccatttcatgatgttacactctacagaagcacaataagggcattacaatacttttctctcactcgtctagataaggcattcatagtcaataaactaagtcaattcttacaagccccaaggacagtacactgggaagcatgtaagagattgttttggtatctaaaaggcactatcaaagaggcatttatctaagacctactgctgcaacaactcttactgcttactctgatgtagactaggagagttgtgttgatgatatagacattcaacatgaggatgcttggtgttcctaggagacaatttgataagctagttagctaagaaacaatagtttgttgatcgttcgagcacagaaagcaagtttcgtgctttggcaaatgatgcagttgaactaatgtgggttcgatctctactaactgaactacaagtacctttagttcaaatgtctgttatttgggttgacaaccaaagtgaccaaagtgctacagcgttagcaacaaaccatgtgttccgttccaggtctaaacacatagaaatcgatttacagtttgtccgagatcaaattatggcaaaataagtcttagttcgatatgttcctgggctcaatcaagcagctgatatcttgactatattgttaatcaaatttttgtacctaaagtccaaactaaaaatggtgtctacaccatttagtttgagggaaaatgtaaatgatgttaaatagtaaaagtggttaagacagttaggctataaaactttctacaaactaattatttgttagttttttcgatttttatatcctttcttagtttatgtatagatgaggttttgatgaatcaagatcctatctttgattcttttcttcttcttccctgtttgttgttctctgttctatcacatgatccaattgtgaaaataaatggataaaaaacatgttgcaaataaaatgattctttattttaactattaaataaaaaatgtgaaacaccattagagatggtctgactaatttagggggcaactatttttttttttgaaccaactcaaatcatttttaaactgatcctctcaattcacgttgcaacaaataacatatcatcaatctaggttagttctgtttacgatttcgacttcttataacattcaaagatacacactcataaatattgtaaaatacttcttacgtctgtcatgcatatatttagctccacaagatttaaaattggttcaaatcaatttttttttttcttgaaattgttaaaccgttaatttgaaattcaacctactaccacgtgctaatcagaagaggtataaaaataaaaaaagaacacaaaacccaaaacccagaaagatgaataaattaagagatatttttgggtatgatttccattgggaagataaatattagggtaaaagacaaatccttaggcaactactcattcacgcatttagaattgaacatgtgtaatgttctttctttcttagtggagtggaccacttgtttagtccatttcaccaacattttcattcattcatacatataagctaacaaaccaaatttttactaaacatagaaaatggagcttttcctctatggacttacaaccatgtatgtttggttttaactttaccccatggcatatttctgggtccagctccttgcagttgtctcgtacttgctcctgtctgtcttgtacatgtgagcaatctccggcaccaacggatcatcggggttcgggtccgtcaacagcgaacagattgaaagcaatacctgttcattaataaattcaaacatgacccttgaacctttaactgattccaacataataattttatacgaaagtgactaaaatgtgttttgtatatattcacatgtggctaaaaatgaaatcacacataacagtgtaattgccagtgtaacttttttgtgactaacattacctcacaccatcagaaaactaacagagtgtaattgcttatggaaacatgaaccatttatgtgaaggcatccctaacaatggtttacagcgtattttcttatcagctttgtctttgtgtgtggtcactatacataacactggaaagaggccttggctgaatgaacaacatatctatgatttcattttaaaaacagagaacaatagcacctaattgcttgtgttaaacagcctctagagtctaaaattaaaagggtcatttttaattcatgattataaatgccttgacaaacctttgaaatggttaaagcagggctccactgttccttcaaaatgtcaaggcaaatgctgccattgctgtttatattaggatggaaaacctttgttctgaatgcaacctgcaaagcaaagcagcacatcattaagttcgagagaaagagacaaagctttaaagatcaatgtaaagtgataaaatagcaatgatcctcagacatttctttagcaaaaagagaaaatcataacaaaactctagtaaattagttatgtgagcagtaacaactttgttctggatcctatctacaatatctgaattctttatacaaaaattggctggtgtgattagtgattactgaaaacatggaatgcaggaggcgttcaaagattaaaaaaaagaaccaaaaaaatcatgaatatgaatacacatatatatactattatctcaaaatatatatatatatatatattaagttaatattaagtgtaatacacgttacgttacgtataattttagttgaataattaattttttcttatttgtatatgtcattcaataaaaaaaattactaaaaaatgtttaatttaaatcttatttataaaaataaaatataacaatattcaaaatttattattaattataattttaatttaattaccctaatatttttaattttataataaattcattgtttttaaaatatcatacattttttttaaatttttttaaatgataataatacaaaaatattttttataaaaaataataatagaagttataaaagataagagagatatgtgtagtgaatatttaaatttgaattgtaacattttaaaaaaagaacaacactgttgttacatatttaatagaacatatatatcatcagtacaaacacagaagaaccacagcatttcatcaaatttcaatactattgagacagaaatatctcattaataaaaataagaattagcaattcaaatccaaatccagattgcattaacatagagcatcagagaatgacagttctttcaacagaacaagtagaaagtaccttgggtggcttaaatgggtaatctggagggaaatggatggtaactagaaagacacccccggcatatggactgtctggaggacccataattgttgcttgccagtgaaacatgtcttcagccactggacctgtaaaaataatcaaagacaacagaaagaaaaataaataacttgttacattatttcttgaatgagaacaattactattattgttctgtttgacatagtttgaaacaataatcatctcaaacaaccatttcaagtttacctactttaaatataagctttgcatggtatggcattctatacttgagcacaataggaatgaagaaaatacaaacatacaaatcctctactacaaaactaagagttgtgccaatattaacacagtatattatatagcaaaatttggcacaataataaactaggttttttttttcaataaacactagatgaaattacttcttgaaaatctcagcaccgaagaaaagaccataaaatttttcttggcgggtacagtatattatatagccaagacaatctaacacgtaataaacttgtatttttcaataaatactcaatcaaattacttttttcaaattttcagcaccaacgaaagggccacaaaatttctctcggttggcaccaacaaaaagaataagaaatctatgttggcaacaaacaaacactaaaatatttctcttgacatcaagcaaaatatcaagacctttctcttggtaccaaactactcttggaaaaagaaacaaacaaaaagtctcttgttaccaaacaagagaaattttcttgatattttgctcaataccatgagaaatttattgttcttttcttcagagccaagagagattattagtcttcttttcgataccaaaagaaaatttggtattttcttaaagggtattgccaaggttaatttcttagtctttttgttttatatattgcttggtgcaaggaaaatttattgatctcttgttcaataacaagagatattttttggtttgaaataaggataagttgccgaccattattttaatgttctcagatcaagattttcgaggtggtcctcaagtgtaccatcccttccccacttaatactttctcactagctcaatttcacttcgaaaattcaggatggtagacctaaataggtcagcctattgtgttgttacaccgttggatagtggagtatcagtatcctttgtgaccaaaagatattttccaccctgtcttactaatgatttcgtcccttgaaatggctactttgccaaattgttgggtctaaatccaaaaattaaacatatatgaggcattagctgggtaattaaaccaaaatagatacctgaaatgcgaactaaatatcaaattttactattcaatatatttgacattccactcattagcttgtattgatagccaagaaatatgacatcctaatagaattggaaataacataaaataaaacacattaaaagaaataagcaactagcctaataattttcactatagtagaataattctactacatcaataatccttcacatcataaagggaaaaaaacaattcaaggacatccctaactccttcattctcccctccacatgatcagcccacaagtaaaactaggaatcctattaatccagagttagagagtatcttgatcccactgcttttcatcaatgatctaactgccatcacatctttcaggctttgtaagtattaaattttttataacaaggcataacaataataagttgatgtggaaaattttgaatgaatctatcagctcatcgaagctccctgcctcttcacttaggctacatcagcatattttttaaaagctcatcatcaagcctgagaccctaacacatccgtcataaaaccatactcctcaatcatcaaaacctaaagtattctggcacaacataagcctacgatctaagagaaacggtataaaagcaatagaataaggagctccaaacataccccaagtccactccaaccatatagacaaatcagtgatgtccatgaaggaacatccggttactccttactatgtaaaaaactccccgtacaagaggtttatagatgtattttacaataacaagtttgggcaaatttctttccaaacaagaggtttgtactttgtaaattcacaacatttaaacaaagctgaaagaacaccaccactagaggctctctcaacaatattcctaaatatcttcaacgatgtgtttgaacacaaatttttgataccaccatcaaaccggtgaagtttgatcatatccagcaatcactatgctccaataactacatttatttccagagtctcatcaagaaccatgtttgctcctgctaaatggccacatctcccatcatacacggcacagctagaccattgacatacaccaatgaacctctaatttgtagttaatgtaattttaaaacggacaaggaatttgcacagcgcaaactcgttgaaattaaattccacaattgttctatcacattagtttttcctttcaattaatcctaattaagcaaaagtgaatgggcaccggtttataacacaacccaaatccaatccttattctcaaatgattagcagcctaaaatcatagatgtccatacaaaaaataagaaaacaaaaaatcgaaaaacagctgatcaagacaaagcagaataaagatacagacatacatgaacatatatataaacatacatagacaaataaataaaggtaaagatgatataccagcactacaagaagtgggaggatccttctgcaaatccttgagttccttcaagatccttttggacgccatctgcagagccctaataaacaacaagatccaaccaaacaatcacagatcaacaacaaaaaaacattctatattatgtgtttctatataaagtaagcatacaacaacaatacatacccaagaaaaaggtaagagcagaaccggaaatggagatgcagatggcctcgtcgtttgagttgatgattatctgtgtttacaagacccgaagagaaagagagaatgagagattgaagattagggaaagagagagagagatggctttagagaatgaatttggtgtctgaataaatatataaataaataaagagaaaaaattggttagtgtaattaagtattatataatttagaaaaataatattagaaaaatttgttagccaccactaaaatttgtattggttagtatttaattctttttataagtggtattttactattaattagtaatattatataaaaaaaaaaattaataatattaaatacttaattacactaataataatataatactaaaaatattaaacactaataatattttttagcaattctaaaaaaaaaaaaaaaaaaatagagaagggaatggtgccgcccactagaaggaatcgtcttcctttttcctttccttattggctttgtgttattctaattccatttcgggtggcttagcgttttctatacgttattcattattattattattattnnnnnnnnnnnatttatttatttattttatttattctttggcgccgaaagtgcctaatctccccaataaattaagtacacccactttgattacatttttattttctaataacgtgttctctaaattctcatgctatatgtttttcttttttgatttttctaaatataaattcaaaa

SEQ ID NO: 15313 - DNA, 6971 bp, Cannabis sativa
gttgttcaataaaatctgcaatttgtttcacaactgtgtgtgttttatttatttatttttatttttttttagagtaattggcggtaaaattcttttatattttaatttttatacacttaactattttatggaagtctattattgttttttttttttttacaaatttgagatatcattgtttaatactaatgatgaatgatcactaattttgaagctaatataataatattctagttggtatttaacggtgatattcagctggtacttcaaatttgcaaaaaaaaaaagtaaatataaagagattttgacataaataaaattgataatagtaataagtataaaaaatcaaaagataaagaaatttttcagtaaatatgcttttttttaaccatatctttgaatatgatgtatgatagcatcaatctctagtgggtaatatgctaacaattcacgtgaatattgctattgatacaattaagtatttaattttatatgttttaaaatttcagcttattcgcattgtattcatatcatatttgatgtaatattaaatcattaaatatatattcttacataattttattattattaataattttttattttatcgagtcgtgttaactcattttcgacctgacatataatttttccaactctaacatctaaaattcatatcaattttgtattaccatgtcaaaattcattttaccaccccaacttcaatctctctctccctccattctcctcctcatagtgtgttaacaacaataattgattgaattttacaaagaatctcatattattccccccctaaattatacaatttaatcaacaattatgcatattaaaaaattaaaaaaaaaataaataaacaaaaaaccaaaaccaataaaatttaattcttctttttttcttttttttggcatatttaagggaactgaaaccctcctcctccggtggtagcttctggactactcccactgggtggagctatggcgacccaaagcaaagacagagtaatggcgatgagtccagaccatacaaacacaatcgtaggcgtctttcttcttcttcccatcaaccctttcgcaaatgggtataaatgagccaatacccaaaaactaaagaaggctcctccgatgaatttactccatttcggaacagtactgtaaattgttcttgaaaaagcaacaactattgcaataatgttaatcattgctatcacgatcggtggaatcatcaacgaagtccatttcactagatacaaatcggcgtagatgtcgtctatgtcttctcccgctgattttgaggttagtgtgaatgagatttcgattcctgcaattactttcagtaatccttgaaccactgctgctaagtgagcactcgtacctgagattaaccaaaattgttcgtttctccaccattcttctaatgctactcctgaccatttcacttctaggattgctagtccgattaggcatagtgtgatgatgagaaggtagactaagaaggcgacgtttagggtttggactatgaaatgtcctgataagagtgaaagtgctgggagaaagcagtaaacgatgaggaaaactgaggtgaatgggtatattcctacgtttaggtaagctaagcgttgaaggaatttgaggcgtttggttgctaagaaagcgttgtttctcgagaaaaagatttcgactgaacctgtggcccaacgcaacacttggtgaagtcggtccgtgaggttaatcggagctgaaccacggaaagcatcgcgcttggtgatgcagtatatcgagtgccaaccgcggttgtgcattcggtaaccggtgacaacatcttcggttactgaaccgtagatccaacccactcgatctccccattcagtcttgtcttcatacctgttcgataaaatgtctgagagagaatgttttcataacagtaaattgtgaaaaattcaaatggggaaggaaaacattaacgagtttttgatagttgagagagtttagcactaaaaaactcgaactttaacataccaacatgaaatgactgagactgcttcagcaacagtagtggcatcaagtgggtcacgaggaactctaagggcgcccggtggccgtccatacctgactgcagggtgatcggcaagagggcgcccttggaactcagctataggtatggattcagccaacaatgtggagtttccaaaacgtttaggtagtaggttcacatcaagttcgggatcaaagtcgctaggtgttaatggatgagtttctggggactcgagcttttggatcctatctacttgtggtgggtcgaagccatatagagcgaatcgcctgaacatacatccagtccctacataaactggtccctgtaaagtcatcaatggagatgattgttatgtttaagttttacaaatgagtttgatgggtgaaagactaatgttttagtacctgaactccatcaagggcgcgcatgtttccatcaaagaagactgtattgtgattggcataacgatcagaaggatcaatgccctcaaatctttgagggaactgaatatagcagaggttctcaccgcctcggtccatcatgaagcacattccttcacgaatggctttgcagttgaagatatagtgatcacaatcaaggtttagaatgaaagggccattagacaaaatcgctgaagctcgaaccaatgcattcatggcaccagctttcttgttgtgatcgtaacctggtcttttttcacgagatacatacacaaacattggcagccttatgtcaacatcagtgaaatctatgatcttatcatctgtgccacccattaatgagtcactactaggaggcttcaacattacctgtttagacaattggatatggttttggaagcataattaggatttgggattagtaaagatcaagtttttttagacaagtttattacctgaagaattcctgcatggtcacctttggcatgttcactagcagggacagcccaagttccaggccaatgagtgccatcagccatccatgttgccttggggacctttggtgcatccaaaggatcagcaccactctccttcatatgtttcaacattttcatatcttcccttgcattgaatgcatctgaccttcttctaattgaatctggaagcccatttatccttaccttaaactcatcatactctcttttgatcttcctcctatctttaacaaaatcgattcgacttttgttctttgtcgggtcgacttttaaagtgaaatagctctcaggatttcgaggttcgatgttatgctttcgacaaaatggaacccataaatcagcaaagcttgcagcctctgccattgcttcgaaagtaagaagagcaccgccatcatcagagacataacatgctagcttctccaccggataatcaaccgctagaatggaaaggatggtgttggcagttacaagaggtggttctttttcgggatcagctgttgaaacaaacagatcaacacctggtaaatcagagcggccggtgggatttgatggagaaggcatgtcgaatttatcatggagaacaacgagatcggttgaacggttaaccggacatagcttaggaatctgatcaaggagccaagagaaagcaaaccataactcacacaccactgacattagccacaaccatattgcctcttcatttggatgaactaatctccaatgtaagaaaaaacatagcaccactaatcgaataacaaccaacaacctagacaacaacaaaaataagattagaataacaaaagctgtggttgagttgatttaagtgacaaattatactaacctatatggactaatgattgctgcagggataggagtttttctgctcaaaggcttccaaggcttatcagtggattccatcattccaccacgaaatccatcatcttcatcaccaccatacatatcatcttggggccagtaagcatttccaacaccataggtaccttgagtctcaaacaaccacctgttatgatcaaattctccagtttggtttctcttcatcatagtcatgttatttcgttctcttttcgagtcatttggggcaggtaactgtagtgctccactgctataatcttgttggtcttcatcataatctcccactctgtatggctctttacaacctggacaaagaccagattctttctgggcatccaaataacaatctctgcatattgtgaacctaaacacaaaccacacaaacatataaactctatacataacaaattgtatctatatatgtaaatatatacctgcaagcacaaggggtaacatcaacccctctctcgtccttcatgacctttccatcacaagctggcattgaacaagcagagcctttggcaccagccatttgagggtgagttacgtcggaatcgatgactttgtccatgagatgagctcgtgtgacgctgttgaatcctcccgtgaaaagggaattcgaaacgtattgctcttcagccttgacagccacagaggagtccataggttgattgtccggagtgggaggaatgtggacagtgtagttcatgtaatcccccgagatttctccggacatgtcaaggtcttctcttgacaaactaacataccgaccgctcgatgttcgtctagcgaatttgacggtttggccgctagaactacggctggctgcagagttagagccaccaccgatcgagcttcgcatacccttttttgatggctggctagacaaggatgccattgttataaattaatgatgttgatcaatattaatatgacagtatacattaaagggtttcatgatgatattctagtccatattagagggagagttggtcatcaaaaagggaagagaagaagaaatgtgtgtgtaaatagaaagaaagaaagggtataattgaatgaaggttgtgtttgttaacttaatttaggagtgaaataattaagaaacaatgagaaaagaaagaagaaaaaaggattattattatttacggtgagagaccaagtcatatatatgggtgtttttagaattgagggcaatacgttttttaaggaggaaaaaattgaggaatatattagggaattttgtaagtactcaattaattaattctcatttctcaagctcaacccttgagtccaaagtacatgttctttctcaattaggttgctgagccacacccacacacaccaaaatctctatttttggaaggtaaaaacaaaccaaaaaaccaaataataataataataaagaaaattataacaaatttcgacgaatcatataaagaaatgatgtatggaaagactgagcacctccaagagcttatttaatctctattctttaattcagagtgctcttataaatgctacgtagtacgtacatcaaagtgggagtgcatatagaaaatatataaatatataatgagaagggagagataaaatttaaaagaaaatacatattttaatttgtatattttaatataaataatataaatacaattttaacacatgctaaactcaattgacaattaatttaattacatataaataatataatatgtacggatataatatataatagacataatatttgagacagaaatttatatgcatgaggtaggtactaatgtatattaatcggagattagaagtgataacatatgactaataatatgtattctaataagataaaactcattgttcttcaatatatatatatatatgtttaattattattaaattagatgcattcaaattcccttgagcattagtttctcccaaacaaatgcatgtttatctctctaatatttaaatagaaataaaatgaaatataatttaatatacataaaaatagattatgatgaatattgaaatcatttttcttctatttttaaaataaaatatatattttttcattatatttttcgggtcttatataatggaatttttgattgctcatattataattataataaacacgtttttgaaaaatcttaaataattaaaagtaagacaaatagaattcaaaaacattttgataaatgcaaaattgtatttttacacacaatttgaacaaaaatttcagtattataaaaaaatagcagaaatcaagtattagcatatatattataatcatgagacatgattgggacacctttttaaaacacttaaatattctcaactatacaattaaaaatgatatatgatttcacttaaaaatataaataaaaatattacactctgtaatcttaatatacacaattatattattaattaaatcttttttttaatagaaaatacatctttattaaccatcaaaattcgctattaaagaaagtagcaaattgaatggaacagactccatatcgaaagtacaactaggaaaatatagaaactctaacacagttatgaccatatttgatgatcgtttaataaataaattaaatagaaacaattttcaactccgacaaaagttttttacatttataaatgacttgaccgaataataatatcatgtcaatcgagcttcttattgcttgaaccatcgtaagacaatcaattttaagagtaacatatgctaccagttatggaaagagcaataaagaattaattgctctaagttttattatatcttcatgtttagtcttctatagagagaaagaacaataaggtcaaaatttgcaagttactactaatgcaaatatataatatgcatactcttttttatcttcttagaaattaataactttagagaacaccaccaaagaaaaagtatttaagagacctagagcccgaaattcagtggcgcttcacgattggttatcgatattgcttaaaaattattttcttaagttatatagcactcgatacttaattacaccaatagcagtgtgacattgatgagggtgctagacatcagtaatattttttagcaattctctttaagaaatcaggctaccaa

SEQ ID NO: 15314 - DNA, 9142 bp, Cannabis sativa
  modified_base (4139)..(4143): a, c, t, g, unknown or other
  modified_base (6992)..(6998): a, c, t, g, unknown or other
aatttaacaatctcaatagtttgaagggaatttttaacagcaaaaaaagttcagaaaacacaatttactacatatcaaagttcaggaagaaaaattattaacagacaaataggtcatagatatattattaatatattaataggttgatatgctaaacaaaatttatttataaacgataccggtcgcgtcaatccatttataaacaaattaagtttggattttattttttaaaataattattattttttttttttttttgagggaaatttttaaaataattattaaacaagtcggatttaagtaaaatatatatttataatacatgtgtgtggacactataagtgaaaaatccgctaacacaaaatgtcactcagaagtgctcctagaaataattcaaccacgtttaactcttatctctagaagcatcaaattctattgactagaaagaagtgacatgtcggtaaaattattctactcacagactacgattgattttaaagaccaacaaagtctcgacaacaccaaacacaccacttcaaaatgaacacaaccaataaatagattaatattttaaatcgaattaaatatgcagcagggcatttccagatctggtcacattgtatttcaattttttgtttgcgtgaatcccaaaatattttgctactcacacttgcaccaatgataaaagtgtgaagtttactacaatttactaccaacctcgaggacctgaaaaagactgaccaaattcccattcatactcttacatacatcaacattcatttattcctttaaagcatgactgatactggtgctgaatcagaaaaagaaacaagaaaagtaaaaaaaaaaagtacataatattgtaaaacattgtttcattcaatgcaaagatgttaaaagagtgtgtgtggtaatatgtagagatatggcatcagaattcaattcagacccttcaagtaaacacatttgagattgaagattttaacgagtttaaaagtgtatggttcttctactctataccaagaaccaaaagccaaaggaattcagttttcacctcctgtggctattttggtgatttagctatatatcagcatcaggaccagaaacacatgtggctctcatcacaagtcaaagccaaaaaaaaaaaaaaagaaacagaaatacattccacattccctataagttggtactgcaatattttgcataatttgatatgccgtggcacaaatctttgccgcccgccctaaaaaaacaaacttttaaaccttaacgaaatttcacaccggactttagccttacaactcaggaaactaaaaccttttccgagaatcaatcagaatcagaatcagaataggctgtctaggagccagagaagttgggaaagcaccttatcatgtacaaacaccatctagttagaaatataagtgtcactactgaagccgtcgtcttgtaaggacttcagaaagatcaatctatcgtgaaagcaggccgtaggaaggtaactcttcaagtcgtgctacgtcttcattcagaagttccttttcaagctgtcgacgcgtggctttcatcaccgtctgtcaaaaacaaaagaaaacagagtaaggtccgttcagtaaccaaatctattcaactaaagggatttacccccgactggcctctactgcatgtacaaagtcatccatctacaaagcacaagattactagtatatccctataagacaccaaatataaaaatccagctcaatctattgcacaaaagggcaccatctgatatgatgaatatactctaaaagcactatccccacaatcagtacataaactttgtgagaagtacagaagcgagaaccaaatcaaaattttcaataaattgggcacatacattgaaatccatatatgatgcgcgcatagaaagccattgatggtccattagcttgaatgtaatgcaatatagaaggtcaaaagccgaatcactatctgccatgggaaattaaaaaaaaagttttagttataatttacaaacaggtctatgaggtcaaagatagcaatggtggtatatctcagataaaagtacctgctagaaacttcaagaaagttgctccaaccagggtccttggttttactgcaaaattaaaagtcttcattaactaatgaacaactaagtggaaacaaaaccaactgcagatctaaacaatgcaagcattatacaaggcagtagtatgaacaaaactgacaaatgacagatattggacagacactgtcattacaacttccaacttattaacttacatttggacacaaaaattaccatcaccaacaataggaaactccattgcgatggaaaggagccaagacaaaaattattgtaaaattctgccttttgaaacaaatgaaaaattatacacgcataaattaaagaagaaaggaaataatacctgcttcaagatcaagcatctgtataagcatgaatgtgatgttcacaccagccacagcaaatgggtattcccaaactgatcgatcgccctcctgtttccgcagaagatcctggaaggatttctgcattcaatgatttcacattttaatgcaagatgacacagtacaacagtacaattagaaatcacacaccaactagtacatccaagatgttaaacaactctacaagttcccaaaaataatttagcaatcaaaaattatacagaggagggaatactacacacaataacagaataacataccggaaagttctgagcaaaatacaataaattctccaatgatataaaaccaccacccctgtcagagaaagaatatttgatagtaagtaaagtatgagcaagaaaaaagaaatccatagcacatgattaaatactagtaatgcccaaataaccatggaaatacagtacctacctaaaatctgttgatgggtccttcccttgccatcccatttccttccattgctcagatattaaaccacgaagctcttcctcaggataggcagatttccataaagcctttaaagcttcctgcatcaaagcagacgttcaaaacagaaaaatataattcacctttcataaatattgtataaattaagccacgcgagaaagatatatatagatcaaatatcatgtaaattgcacccatctccaattcaaacatgcttacctcaaaagttcaacttatatcatttaaacaaagtatgcaaaagagaaatacagctccagggtacctgatgctcaggaactgaactatcataggatacatctatacggttttgtagtctttgcaagcattcctcctatgtaagaaaataaaatattaaactgcacacataaataaaaccagatatatttcaacggatagcaatctctgaaatgaaaattacctgaacaggggttaagtcaaatgaaggacgtgcatcactttctctcctctgggcgcaaacacaagataaacctcgaccgagccatgcagcagatcctgccacaacctcagctgtaccaaatgaaccacccattaataaaatctctattgattgggcattattgcaggtcaatccccaaaacattgtgagatcaattcatgaatgtttatgttaagcaaaaaaagaattcaacattctcaaattcccatccaagagcaaattaaccatatgcaattaaattacttatttcaagctcaaaaaactgctataatcatgaaatttatacctaacacttttcaaacaatcaagaagagaaaggaaagaaagaaaccaatatataccagaagaaattattctaatcgtttaaatcggagaaaaaaaccccaaattagatattataacaacaataaaaaagacaacataggtgtataaagcaattcacccaccacaacacattaggatatcagaaaacatcatcataacgaaaacttccgagataatccaaagctactcatgcacgtaaatcatctgagttcgagatctaaaattaagctatcaaaaaagtactgtggaatataaggtaaaggatagagtcaatatacatataaatatacatttacatatatatgcaaaaaaaacataaatagaaaaggtgctttatagagtaaatagaaaacgaaggcaaaagaagaaaagaaaagaagagagcgagagagagagagannnnnagagagagagagagagaataataacaccaaaggaatcgagattaaagaactgaaaaaggaataaatgaattaaattaagataaaatgaaaaggtacgaaccagaagatgaatggcaggtgttgcctcgttccaaaccttgagaaattcttctcacagccacaaatgagccaccgccacctcctctctcatccataatgcttctcaaatattacactactaccctcccctctcccaaatcacaatcctaacaatttcatcctcgacaattcaataaagaaagcaaagaaaaagagaaagaaatttctcgaacgcgtttaaccaagaaccgaaggcggtgaaagatgcggcggccgcgaagaagattcgaaatggaacaagaagccttgtggctgttgatctttatgaattaaaaaaagaaaaaaaaaagcaataagcggttcttgaaagaaatgagagagaatccggtaagaaaatggttagggtttgtccaagatctgagcatcaaactccattagaaagtcagttacgaagctttttcggctttttttctttctctctctctctctctctctctatctatctctattctgtgccagtagtagtggcgttggcgtcgttttgtttgtttgggcaaagagaaaatagagagccaaatcggagattacgaaaaagaaaactctttttccttttttaataacaatactttttctgaacaattaattaattaatacggttaactttaccgtatctttttctatttttatttatttatttattacttaatttttaaacagtaacggaaaactaaacagtggggacggaaagcagcggccacttctgttttaactttttttttttttttaatcatttctaaagcgggaacgtgaataagttgagctcattatcttttatcaataaaaattataaaatgttagggtctcagcaaaaaaaaaaaaaaagagtgtaagggtattttagtcatttctgagtgagttattgattccggtcaatttgaagcacaaagtataaaaattagtgtacggttataattgactagatggcaggtttaatagagaaatacaataaaattaatgattaataattaaaattaatatttgtaatgagaaaatttgataattcatgtttaaaaattatctatggtctttaaatatgctacattaaaatatattggaatttaatactttaaaattatttaaatttcaaaataccttcctcttatcttctctctttctctgagtcctctctctccctctctttctaactctcaccaaatctaattaatacccacgaccatagaattagaccaagcccacgaccaccacaccacttccagcgaaacccattttgaaaatgaaacatagaacaaaattaaggaggatatcgcgaaaccataaaaaaaaaattgtacatctcagaaccaaaatctatgagctcaaccaccccaaaactcctgaaatccctacctatcgttgaagttctcaactcacttgttttctgcatttttgtctggtttttgatgatgtcgcgaaacatcgcgaagtcatgaaatatcactaaatgtcatgaaatatcactaaatgtctctaattcacaatatcgcaaaacacatcgttaaatgtcacgaaattatactcaaattttcatgattattagcaatatttagcgatgtgttgtacattttttagtctcatatcacaaatacattgctaatatcatcgtgaaacatcgctaaatacgcaaaacatcaccaaatgttgcaaatcatagctaaatttcaccctaacttcggatttgttctatcattgtaaatacatcgctaaatatcgcaaaaaaactggtaaactagaagaaagaaatgcaaaaaatgagagaggccgtgagagaagacgacagttaggccttgcggctggggttctaggtcgttcgacggttaggggttatgggtcggcgttaacaccggagagtgagagagttagagagagaattttttttgaaatgtaaaggtatttttaggagaaaaagatattaaaagtatatatatactatttctaattgggtggtatattaaaaaacatattttacatttaagcatattaagccaaattttcctttataatatgttatttattaaatttttttggaaattaaataatgatgattaatcttttttattttattagaaaatataatttcaaaatatttaaattccctaaattgtctttttaagttaaattataatatatggtaattattttgtaaaatatattttaaaggataaaattattattatatatttaatattaaataaaaataaaaaataataaaatttagggccttttttatttttacacttctaaactttttttttttttttttttgtatttttacggaaatctatataaaaactcctattccaactagcgctgcaacttaaattgtaacaaaaaaccgtatagaaattcctattgtaactagcgctgcaaccactttaaaaacttaaactgtaaatttaaaaaaataatatatgagataatttccctaaaatttattattcttaataatattctttaaaaaattagtaagtgaagtattcttttttttttttatcttttatttaagttctccatttattaattttaataatataaataaatataggtaagaaaatgactaatggctccatcgaaaaaaggtctctcaacttgcattttcttatttctcctccttataaataaaagaataataataataactcaccttaattttcttttactcaattatgtttactgtttataagcatagcctatatatatatttatatatatannnnnnnaaaaaaaaaaaaaaatcagttactaaccttaattttgatttattgtcatctataagttttaatttaaaccataatttatttttatttttctttttagtatgatccataattaaatgaaatgtcatggatgagaatttggtgtttcattttttttttaaaagaaagagcatttgttcatttattttaaatgaaatattaaaactaattttcatgaaaattgcagctaatgtgtacttattaattttttatataatatatagtggcgtttggtaatacttttttaatcagttttatgtttttaaaattgaaaaagtgaaaatatttttcaaaacatgttttacaaaattgctttttactttttaattttttgattgaaaatcaaaattttaaaaacaaaaaaaaaatcttaatcaatattttggacttcggccagacccagacccaaatctccccccacggccctggcaatgaactcgacctttgacccgaacctgaatctgaccctagacctagacctgacttaaataaaatcaaaggggttgctctaccaacatttggttatgataggtatcgaactaatttttcgaaggcaatacttggcctctgctaacacgattggcaagaaacactctcactagcaccattccttcccttccacttagaaaccagccacaaccaaggaaactactatatggagaggctacataccagcaacaaacacatcatgatgaatcaataacaatgtttgcaaaccaagttgttactaaatttcgaaatcacatagaaaatgagcatatggatagaagaggatctatatttttttgcgccagcaattttgaattcaaaaatcatgttgccaaatattagattcgcctctatggatacaactgctattggtgcttttggccatcataaacaccaattgggagactctatttgtggtactacatctgattttattacaaaattgaatccaacacatgatcatcataccatggaataggaatcaccaaacaatactgtgactttttccaacaaagtcacaaaacaaatttgttgcctcctcatcatcgtacactgtcatgacaccctcctcatctccaaatgaaactgatttgtctgaactatacatgccgagtgttggacatccaataggctatgttgtaacttatccaattgaaacaaaatcaatgaacacattcaatcctctctctttcagtttctctacagcctggttgtcctaaaatgtttgattctataatttgtatgactgatggtgctgagaaagacaaagaaaatcattctccaaattgtgtgtgtaagaggcaaccggaaaaaatgtcaatgcgaaagacactcaagcaatgtaggggacccaaacctaccctctcaactttaaatttgtcttctgatgatgagacaaaccagtatgcttctgaaactgttatagatacatctggttgcactgacaactatgtagaggctattttttacccccgtaatcaaccatgaaaattgttagctgaaatacgcatggtttgggaaatccaagcgcattctgcacctttatttgcttgtcaaagagcaaactccttatgtattatatattatggagactaaattagattgtaatatagttacttgttttcgtcaatctttatatttcaataatggacttgaagtctctagaataggtttaagtgggggttacttttattatggaaagacaatgtggatataactctactaaactttaatgcaaatctgtttgactgctacatagggtatgataatggacctacttggcatttctctgccttttatggtgcaccagaaattcaaaattgaatacacacctagaagctcttagaacaatgtaaggatgccacccccttgatgtcatggactattgttacctttacgaacaaccttttgaaggtgatccttacacttggagcaaaggatgtcataatgtgaatgcaatcaaggaagacttgattggtgcttcgttaatgatcaatggcaagggagctttcaattgataacaacacaccatctcgactatttctgtaatacccagaattaagaagaggattagcaaaaccctaattagataattgtgagttaattgaggaattatatta

SEQ ID NO: 15315 - DNA, 7890 bp, Cannabis sativa
tcacatggactctgtttcaaaccatagagattttcgaaaatgaccaacttgcctaagctgcccttaagcatcaaaagtaggaggttgctccatatacaccttttcataaagatcaccatacattcttgatatcaagttgatgcaaagaccaatgatgaaacaaacagttgaacaaatatctcattttgctacaaaatgtaattaggtgtatatagttggctaattagcttaattctaaggatctagttgtataatgggctattcgtagctttgtataaattagtgcatcattattcaataaattataggagatataattctttttatgacatagtattagagttttgggggtttcgaaatgagggctgcgttacaatattaggttatgttttgggtctcttacctattccatcagttccttgctattttgagttaattgactcctaattttcattaaatcagtgatgcgcagattatttttttcttgtccttaattagttatattctaatggtttggtgctatagtgcctaggccacacctctcatttgaagcacaattagttgctggaaagtctcatgagttggcggccatcagctgtcctgatcagcctgatcccccatcatcaacttctagtataagttatggtaaacaaaagcatgatgcagagttgagatatcctcaaaggatacgcaggctaaatatatttcctgcaagtaaaactgaggtactaatttaactcttcaggaagttatacatggtaattgtccctacaaacttatgttgctgttgatattcttttctagaaatcaattattcatttaagaattactgcatgagtaattgattttttttaatcttacaatttatgtgtctcatggttttgtttcttactaagtttcttttgtttttattgtttgaatgagaatgttttttctttctttcttttacttggagactatgtagatgtagattgctactgttttccaattttatgactagtcaagaagtaaaagttaatagccttttgattttgggctctcctcctagaaaataatatcaagaatattttatattttcctttgatgagaaatattaattattttttgtttactactacatactattattacagtcaatggattaactgaacctgaaagttgacctctttttgtgaattacaggatatacaacccatagatcgctttgtcatggaagagtatttgctggatgtgctgtttttcttcaatggctggtttgtacctttatgattttcattttccttttccaaaattagctattgtttcctctcttatgcatgataagaaaaattgaaaatgttcatatgttataactaataataatgggtgaaatatggtgaaaattttatatttttctttattttgttaaactctctgaaagacagccataattagtgtttcctgaatccttggccatttttgggtaataaaaactctccactgtaattcttcaaaagtatggtagagtggcaaaaagtcactataatattactgacagcggacaaataagaacaaggaagatgatggagaaagagagaggaggggaaggaaaattgaggtgagagagaaataggaagattatttagtatatttattaaacaccacacacttgtaagtttcacccatatgtctatgcaaaactttgtaactagttagctgggcagcatacctaagaggcttcctagttcctactggattcaaacaaaaactgcatagatatagtgtaccatggtatttctcgtccaatttatgtgttgtgttatttttttttgccatatatatttacattacattctttatgatgttcattatgttatttgaacttatcatttcttatcgatcttaatacattcgctcccttttgtttcttcattcatgcaaagctagtcgtaaagaatgtgcttcattcatggctggtttgcccgtgcccttcagatacgagtatattatggcagagactattttctctcaggtatagatttcatgaggcctcaattccttatataaggttaaatgtgataagaacataaacttgtattattaagaaaaatatacaccgcccaagagggatatctcaaacattccggcctatggttttgatctcagaaggtcttgaggttcgaggcagagagccgtagtttaaaacctgggtatgtaaagcgagtatgcaggatttttgggtaataaaaataaaatccaccctaaaatcacaaccataaataatactccaatacattaatagcttaatagtcatgcattgtaaatcaatttaaacaaagagtaatggtagacacactctcaatttacacacgtttcttttttgcactctatggtgtcattatttataaccacaacaattaaaatgtgattgcttggttaaaaataatggtacatcatagtgtgtactacctgtgacaatttaaatggtcccactatgctaggaattttagggacctttggtgttgtcttttttttcggttactagagcaagttcttgccaattttgtgactagtcactggctactcccacacacacacacacactcacccaaccacttgaggtgctcaagtggcatgttttgaaaccttgtaatcagagaaagaaaacttgattctcacactgagttcaaggaggttatagattcctgcttgtgtttctgtttttgtgtgtgctcgtacataattttgggtactgtacctcgttgtagccttaaattttttcttttctttacaatatcttgttcttgctttaggatggtattattgttttagtattatgggcatttgaagttcaattatgtgtagagaagatttgaaagagcagcttagagttgctcaacagatttttctgattttggtgaggcaagttttatagatgtttcattgttggaatagttctatcataaattatagtacagggtaaacgtgtagttgcattgtactctgggttggctctatgtgtgtgtcaatataatactcatagtgattcacaaaataagggtgtcctagagagatatataattatatattttctagttggacccaagaaaaattaaagataagtttttgctttgaaccactattgaagtatgttgaactgaggatgctggaatttcacctaacttatactacagtaaagtctagttttgtccagtaaagttttactatgaaagattccaattgttctttagaatagctgtagtgcttgacttattttggctgttggatttgttaggttttttttttctttccgttcacaatgatatatttacatctttctttcagttgcttatgctaccagaacctccattcaagccaacatactacacactggttatcattgacctttgtaaggtaacatcaaaaaatatttgtagagaatgtgtagatatctgtttatgttcctctaggagtaatatacagctttaattacacgtccaatcccgttgtaagtttaaggattctgatcagatggttatactttcaggctctccctggggcctttcctgcagtaatagctggtgctgttcgtgctctttttgaaaaaatagctgatttagatatggaatgtcggacccgactaattctctggttttcccaccacttgtaagtaccagtagcatatagttaccttttcatgctcataattttaagtggagttgtttggatagaaaattcttttaggctaagagacgatataaagtttacaagtataaaggataaatgaatattcagagtgcactttacatattctcaagaaaaagtttatgcataactttagtcagaaatagggtaattttctgatattttattcctctacactaaacatgttttttatacatacaaaagttacccaaacgcaatgaagagaaccactggttttaatgcagaaaaaataaaactattaactactttccctgaataaaatagcagtaattattctagctatttttctgctttacaataaacattcttaaacaggaaacttactaaactaaattagtttgatttctccaacaagtttcagtgtaagtatgaaatgtgtttcaggagaactaaaaagtcagttttttattttttatgcagagtatcagaattttgtatttttatttaggcattttatcatttcatatgtactcattgtgttcaattgttttttttttttttttttttaaaattgggaatagctggctatattttgaaatgtctctgtgggcagatgcgtgtcaatgttttctttgcttgagagaggaaatatttttacttttctttgcacacagtagtcatctatttattttttgatattttcatataattactggataatatgaggtgtcaattgtcaaaatttttatagaagtaaaatattctaatcttgctatctgcttggtcgatttttctggcaaagaaaagttggtatgttcggttaactgcatctataattgattcctgaccatgcagatcaaactttcagttcatttggcactgggaagagtgggcttatgttttagacctcccgaaatgggcccctcaacgtgtgtttgttcaggaagttttggaaagagaagttcgtttatcgtactgggacaaaattaagcaggtaagaatcatgctgaagccaattggtttacatgcataaaatggtcggttggttttccagggcagtgttattagtatgaatagcattgatattgaatttttggcatccattcctgcaagcatagtcagatttctaccaccagcatcagtaactgaaattgcagtctttttctgcttatatccatcttcatttgttcatttctttcctgtgtagtggtgccgtgcataaaggagtcctggttatcaaaagtgatgttgtggaacagtcttttttgatgttactataattattatcaagaaacatattgttgttaagttaatatatataatacagtaaaatcttcgtcattctagtggactagcattatgtagttgtaaatgttttctggtgaataataaacccgcattgtaataagttattattattatttttaaagtctaattgcctccacaaaatagtaataatctgaaatgtgtaaatatatattttatgttaccttgaaagttcatgatgaattaaaatatttatctctaattgtttcagaattgttattaaatcattaaattttgagtaaataatagcttgccaacatagacacattcttattgaagtgagtatatttttagctacatccctactactaacttataacctctttaatgtaataaaattagtttggtcccaatactattgaggttttactgtttatttaaatatttatatgatggcaggaggtacaacagagatttatttttctgatattcttccaaacttgttgctgacatgtttttactgctttcatgtgtttatttcttaccatttttctagagtgttgataatgcccctggtttagaagagttgcttccgcccaaaggggggcccaactttgactttagagctgaagaaggtagtgaaaaatctggactttctgcagacctaaaaaacttggtgaaagggagggcaacagcccgtgaaatgattttatggatagaagaaaatatattccctgttcatggattggagattactctcaaagtggtggtgcaaactctacttgatataggatctaaaagttttactcatttgattacggttcttgagagatacgggcaagttattgcgaaactttgtcctgatcaagataggcaactcttgttaatcacagagatagcttcttactggaagaacaatgcacaaatgacagctatatcaattgataggatgatgggttaccgacttttatctaatttatccattgtaagatgggtattctctccagaaaatattgatcaatttcacacctcagatcgtccatgggaggtatggtactaagctatttaatctattattctttttatttttaaaaaagacacaccaatcatgtttcataaatatattctaaaatgttataaatttgtatgttcatgtaggtcctaagaaatgcggttagcaagacatataaccgtatctgtgatctgaggaaagagatattatctctgaagaagactcttgtgttggcagaagaaacagcagtgaaggccaaagcagagttggagactgctgagtcaaagcttacacttgtggatggtgaacctgttcttggcgataacccagtgaagttaaagcgtttaaaatcatactctgagaaggctaaagaagaggaagtgtcaattcatgagtctttagaggctaaggaggctcttttggcacgagctcttgatgaaattgaggtacatttttgtgtgtcaacaagtaaaaaaatgattctgaacactctctctctaagcatgtatgcttacctgtatctatatgtgttcatttatatgttatcatgaatatattgaagtagtgtttgtacttctattcattagatttcctctgtgattaaaatttcccctggttttgaggcatacgtgcacagttctatatatatgtgctatatgttatcatgcatatattgaagtaatgtttgtacttccattccccattactagatttcctctgtaattaacatttcccttggttttgaggcatacgtgcacagatctttgagaagtcattttatctagtgttgacattttccattctagaatttttcttttcttctcttttctcctgtcagttttccatttagattttcttgttcttcagtcaagtattgtatcttgtttcttcatttcattgttgttccttctgtttttccatcttgactattgttggcatgtccaggcattgttcctctctttgtatcaaaacttctgcagtttgctaatggaacgtctgccagatgcatccatagttagaacattgcaggaactgaagtctgtccctgcagattccatggctgttgaccttgaagaaccagcaacaatggaggtggatgatgaaactggaaggcctaaaacaaggtttttaacctatcacattaaaaagaaaagttgctctctattttctaaggtaattatgacacaactaaaaatgtgttaattctggcagtcaattgaatggagtgacgaaaagcaatgtgtataacataggcgaaaaagagcaatggtgtttgtcgactttgggttatctgaaggccttttcaaggcaatatgcttctgaggtaattttgttcttttttttttggaagcttctgacccttctgttatccaactctctcaattggattgctgttgacaataatttgataagcctaagacttatcttgtgtatcacaaaatgattaaatgaaatacttagggctcatttagtatgccgtataaaagtggtattgtattaaatagtaaataacactatgtttggattaagcaatgtattgtattaattattacgaccaatttttttaatacataataaatgttccgtattagcgtgtattataatatttacaaaggatttggggtcaacaccaatcttcgatccgggaaccggacttggacccggactcggacctgaacccgaacccagtccgggactccgacctgtagttggtgttggaattgagtgtatttaaaatatattataactttacataatcaattaatacaagtcaatatcaaacattgtattaaataatactaatacaatacaacgcaatccaatacaatacattacaatacggcgtaccaaacgagcccttagtctcttatgtacatgagctgagttgtctttttaagaccaaacgagcccttagtgttttaattttattggtccaattgtaatcctaggtggcccaagtcttttta

SEQ ID NO: 15316 - DNA, 9209 bp, Cannabis sativa
tataacctctatttatagagtttttcactcccatatgaacatgaatgaccaccataaagcccttggatgttaccaattataaattgagcattaatagtattaaatgggtgattttaaggagttttggaatgttagaaagactcaaaaacgtttgtgcttgtatgctgaaaaaacagtaactagttactagttaccattttttcagctatagccaattcttctccaaagtgttccaaatcacttccaattgattttgaaccatttatacaccttataaatgaataaatcaagtcgctatatttttaatagctatcatattcattcacattcataaacaattagtaacatctttttctaatttaaaagtgaaaaaaagatgagagttattcaagtgatcatcaaatttaaaagatttgcaactcttattttatgatcattctgcacattttgtaactccataatatatgttacaatttgacaaaattaatattttgtcacacttaattatttataacttaattatatattaatctaaatattatattatataaaataatatataatatagctgcacgctgcttaaacatctctgcgcccgcaatattccttaaatagaaaaataatgccgcccgatcgatcggaaatattaagacgatcaagcttactcggcatgcatgaagtattggaaatattattatagtactcattatacacgtacgatattattttaatttgtaaaaaaattgaatatggccaatatatatggatcctagatatattcaatcgtgacagacagcacagttcttaattaagatgtcaccctctcattaacaattacgtataggaagggagctcatgagggcatatcctcctcaactgcgtagcatatcctatactataagaaaattttgctctgattttaaatcgatcccttaattatagtttacagggcattaattatatatataatataatataaaatcaggcagctggagcataatcacaaccatcatcatcgtcgtcgtcatctccatccatggagccttcttgaatattactgtagtcatagtgacattatcatcagcaagcatcatagagaaaagtacgtactttgtagtaataataaaaaataatactagagtagagaagaagaatataggaatgtggggttctgaatggacttgggtagtagtggttaatttattataaaacataaatatataggtgagcaacaaagacctgttgacgtacggcgccattatgtggtgatgtggtggctcgtagggtcgagtatggccggcttatgtgtgtacgttacgtagacatggcagtagcacttgagtattgatgctttacacatgtgacatggcattggtcatatcatatcatatttaacggtgggtactcgctccttttggtagattcttctgatagaattatagtgtagtactagtacgttttttttttcaaagaaaaacaatatggtgtagtactactgtaaaatgtaaactatattttggtaacaaataaatgtgtacttacatattaggaccgtggagaggtgttgttgcatgcgcgtgctgggaatgggatgcatcatgcatataaggtataattgtgtgtgtgcgaagaacttgtgatatatatgagaaaggaagacgtggacatttaaagtgaattggcacatttcatcaaatagccggggatatcatcgaactccattctgattattagcttctctttattaatttattcgccttaagaactaagaaggtatgtagtagaaaagcgacttgtttgttatatactattctgtggctgggacatctgataaatgttattctccaatattcacactaaaaaagtagctttatattttcaccgagtgagtcaatagtcaacctttgaaaagcttaccaaatgtataatattgtatataacaaattcaaatcagacttctagcaaaaaaaaaaaaaaaatcaaatgtaagaattcggcacataattaaaataatatataagtaaaaaattaatgaaaaaagaaagaaaatttttcataattttctcattgtctatatcattagaaatttgttaaatttataatgaccaattctcattgtttttggaaaacgtaaattagatcctttagttattagttattgaagtttgaatcggagctagtgccaatgatttaataacagagaaatgttaaaggctaacttgtgatgagttatagattgtcactatttatttataaaccatttataaatagaaatgttacttcgttcacaatagtattagacactttgttattagtgttaattaaaaataaaattattttaattttatagatttcaatcacacttaacctaacattaatctaataatataagtagagaaaatagaattaagcacaaaagaaaacatatatctttaattttctgtagtaaatagtttgattttatttgcaatagtttgttttatatttaaaagactgaatcactcaattccgtttaatttagatggggaactacgtggaggacaatataccacaaataccagaaaacggccaccactcccaaatgaacactcactcacccatcatcttttggctaagctttcctttctaccaaatgcaaaaacaacacagataataatggcatgcacacagctctgccaccaaattctccggccaaacactgctttttgtgccacttctcggcgacttaacacctcaggagccactacccttacattcccagcctccaagagaaattttagccttgcccacaattccaagtgggctgtgaaactaagcttggtggagcagagcccaaagaagtcgactgtaaatatccaacggctggttgatttcttgtatgaggatttaccccatctctttgatgatcagggaattgatcggacggcctatgatgaacgtgtcaagttcagggacccaattactaagcacgattccattagtgggtacctgtataacattgcccttttgaagaatctcttcaggcctgactttcttttgcactgggtcaaacaggttagttaggaagttttgatatattatggatctaggttttgattgtttggttattaggtttaatttctttttagatgtttgttactgattgagttgatatagacaggtccatatgaaataacaacaaggtggactatggttatgaagttcattcttttaccttggaaaccagagttggtttttacaggaacctctgttatgggcatcaaccctgagactggaaagttttgcagccacttggtaagaccagcttttcttttcatatcaaggtatggaatgaataagtttggggcttcttttttccttattttatttatgtcctaagtgctattctaactagtatgtaattgattttcctttactttgtaggactactgggactctataaaaaacaatgattacttttctttagaaggattgtgggaggtgttcaagcaggtactcattccttgttcaaataataaacactgcattagttgctaatttcaaaattaacaaaataaatgaaagttttcatcttagtttttaatggtatgcagctaagaatttacaagactcctgacctgggaacacccaaatatgaaatactgaagaaaacggcaaactatgaggtctgtttgcttgttatgaattgtaataatctatatcagctagtattatcagtatgatctaatttgaatttgaagttgctcatgctgaattctagtaacaactaacatgtgtagaatagtctgcccaactagtagagaaagtgaaggaaaaatcagtaactgtaataagctgttgacatgctgatactgaatatttttcttgttatcacctaattagaatctactttggtttggttttactgagtggcaaaatatcagaattaaaatggcgatagatgtggtgtccttcaactaagtctatatatatatatatatccacagaaccaagtttagagaatgcggatccattaagagaacacagcaagaactaagacaatataagctagaactctcttcttagagatagctgatacccttagtgaaatctcgttgctcgagtgtctaatggaggtactttggacccgcttgtgaccatggagataaaatcccaattggacctagatcatccttaaactcctttaaaaaatgaaagggtagctaagaatagaaaatcaaagacacgagtctagaagaattcaaaagatttctctctccttgacatgtaggtctacaaaaatatcaaatgaatactctgcacagttacagtagaggtgtaaagatttgtgagaatggaattgttctgtttccaggaaattactagttagagaatcctgactgagggaaaaaatggctaagaaggctaaaacagtaataactgttttactgatgtgagaaaggatgtcatgaaaacatttcaacgaatgtcaagacagaaatttccttgcccttattcaaacgaaagaagcacacgagtgaaacaagttttgagtaatgtaacaaagaaagatacaaggagaaggagaaggggtcattttccaaaagccaggtggttgtcacagcacgatttgatgttgctatcacaagaagtagtgagagatcccttgttaacaaagaccatagaaaaccaaaccaatgaatacttacaaacagttttactactatgatttatactactaaagtatagaggttgaattgactcgatgcaattatattttcgtcatttttaattctgatgcttcacgttattcttggatggattcaacaggtaaggaagtatgaaccgtttgtagttgtagaaggaagtgtagacaagctctcaggctccactgggttcaacgatgtcaccgggttaatactcttgcaaactctcttttcattttgctttctttcaagtttcaaatgaaaatgatagtaaaatatcctgtctgcctgacaggtacatttttggaaagaattccgccatggagaagataccaatgacaactcctgtcttcactgaagcttttgattcagagttatccaatgtatccatccaagtagctcttccacttgacaaagatataaacaggttaatatctatgtatttatggattcaagcatactaaactgtagtgttttattttagatgaactatcaacaacaaatgtgcctcaacaattcattttgcaaacactattccttatagatgtgtgtatccatgaccagtttacccaatccaaataaagacacaataagcttgagaaaggtggaaggaggcattgcagccgtgataaagttcagtgggaagccaactgaagatgttgtttcagaaaaggagaaattcctgcgatcatgtctcatcaaagatggtcttaaaccaagagttggttgtttgctggctcgttacaatgatcccggaagaacttggagttttgtaatggtatgtttcatagtcccttgtttacttttctacttcatgaacctgaatagtagttttgtaatggtatggtcttaaaccaatttttatcgcaaataataaatccctgaacctgaatccagttatttaaacatacaattcattttgagacaaaagaaatttagtctgttattggtagattagataacctcaacagctgaatcctagtgttaatttcatccctcaattcagatagaaactagattcttaactaatgtatttgacattacaagtaggaatattttaagatagcaacttatatagagaacaaattgagaaaacaatttatagaaatgttaaacttgtattctcttgtactatattccaactcacacacacccctttccagcgcacttgagctagcctcttcttgttaatttcctataatttaatgttaatccagactgaattgtttttaacgcaagattttctctagctaaggcataaaactcataaagaatattaatttattgaaggaaaacaactgtcatttcattggaaaaaaactgatgatagcgcagaattagtaggataaatgttaatttttggagattttatgttttttacaccatttttaggcaatatacacaaatttcattattagagttatgattgtagcttattggaatcatgcttagtgtaacttttgcacctctacagtttcattattgtactactaactaacaagtattgttttggggtgatttgatgacattgaagaggaatgaagttctaatatgggtcgatgagttcacactggactagctatagttgtggatttgaggaagcaaagtagacttgttatacgtgatttattagaagaattttatttttataatgttaatatatgatgatttgaagtgcatctctgagtggtgtcatattgaaagagttttcatattttaaattataatattaatatatgaggccgattgtttgcctttgcttgtagtaatattagttgaatttgtactcgaggctaattaatttaatcgattgggacaataaacagtttcaattggataccctgcatgtaattattgcgttgcgcaaacgtcgagacacaagtgcccataccaagccaaaaccacatcaacaaaaactctgcattagattagattagtagtagtacgtacatgtgacatttcaacaagccaccggattcaatggacttttctggggtttgataaacattttattttattttattctttctcaaatattaaatttatataatttcttttcttttttaggtcaaataactcaaactcaataatgaagaatcacattaattcaaactcaagacttaataaggcctgtatcgcagcaaaaaataaacacacaaatggcaggcacacaactagctcaccaaagtttgaggctaaacaccgccgtaccaatcagtgtttggcgacggagctccgccgcccctaattactggggtttcccagtttacaagagtttggaaaacaaaaggctaggagtcctcaactcctccaagttgaccgttggatcattagtgacggtgccaaaatcaacgttcaacgtggagggattagtggattttttgtacgaggatctgggccacgtgtttgatgatcaagggattgatcgaagggtctacgatgaaggcataagattcgaggatccaatcaccaagttcgaatctcttaatgcgtatctgtttaacataagtctcttgaagactgtttttaggcctcaattccagttacacttcgtcaaacaggtttaagtgtactgttttaaatcattcgtatttttcttatttctacgatggactatcttgaaaataaaaataaggaaaacaaataatggaaatcagctggttctaatttgacaaggaaaatggaaaaataacatagctctaatttgataattggaacggtggcaattattagtcttaatatttgtatttctcaaaaaagaaaaaaagtcttattattgtaatatggcaatcgaatatataatctacttccaatctaactttttaatctacatactgtaattattagacatttaacgttaactcactgaactgaattgtttgaattgaatcttaagcagcctatagtacaatacgttatttagaatttgtaatgagaaacgtaaaatttgatcttggcatttgtgactgattgagaggttaattaattatatatatagacaggtccttttgaaataactacaaggtggactgtggttatggagtacatgatttcaccgtggaaaccagaaatggtcatcacaggaacctcaaccatggggataaacccaaagactgggaagttctgtacccatgtggtaacatcttatgcctcattatcaaaaaacctatacactgaaatctgaaacgtatcttaactaattcataatactacctttaatttgtttgtaggatacgtgggactcaataagggacaataattttttctctttggaaggcctttggcatgtaatgaagcaggtacgtacctatgttaaaagctcatttggttggttatacgtcaaaactatgtgataagagctgattttctgttttcttatgcagatgtcgactttcaaaactaaggatattcttggaaaacccaaatatcagatattgaaaagaatggcaaattatgaggtctcattgattaactttttatatacatataagcgtacaatacaaataggttaggtggtgttgttttgggtctgtagttggaagttttaactaaatatgctcttacatgggctaattgcttctgcaggtgagaaagtatgtcccctcgttagcagtaaatggaacagagtaagtattaaacaacaaatttaaggaattcttaccttatgtatcatgagcttgttctcaacaaatttaatgaattttatctctagtacatattttcttaataccagttttcaaaagttacactgatacacattttttatgatagtttaacggatactcatcaattaacaaatggtttgagagtaacgaaaggaggcattgccgcagctataaagttcagtggaaaagctaccaaagatattgttcaagaaaagttggaaactctcttttcaaaacttgtcttagatggcctcagaccaaagaccgggtgtttattactatctccttcaacagattccggttcttggaattttgcaacggtatgttgtgaaaaggtttgccaattcttttttaactatggtactctccctaaataattgagcttcaatgatctctttattgaacaaaacttaatcaactacttccatataaaatgctaacgatgttttgttttttctttggggggggattgattgcaattgaaggagaatgaattgcttatatggctagaagatttttcaatggactagcttcgatcttctctcattccctacatgatacatccatgttgaacattttcctttcacaccttaaaatatacattccccaatttgcgaagataacttggagtgatgtttcttcatttatacgttatatcaaaacttggtcgtatataaaacgagtcaataatgatggtgatggataactgtacaaataataattcaatcaattaatctttgttttttattttttccttaattgagtgtacatcttttttggtaaagtttacatgccccattatagacataactttctccaaaagaagcaaaatgggaagttattaaaaaaaaaaaaaaaa

SEQ ID NO: 15317 - DNA, 14727 bp, Cannabis sativa
  modified_base (7120)..(7127): a, c, t, g, unknown or other
caattcaaaactttctaacttaagagttaagatgctaatttatggatatttaaaataatttacctaaacacttttactttgaacaaaatgatacgaggacgaaaaataatttgaacaaaatgatactcctgtaatgcaacattaaggcttcccttgacaactttatttttaatgtcaaaacacgatgcacttgtgatgattcagcaatagtctcttcaaaatttaattgtcggggaaaaaaacaatgctcctacaatgctacaacgatattttggtatatgatgctattgtcatgttcatgtgagtttaatttttgaagcaaaacaatatattgatgatggcactattaaaacctattttttttaaaataacgatactaaaatttagttattatgggaccacgtcgtaaattacccaacataatgttagagaaaaatatttacaaaattcttttcttctgcttttttgtttcttttgcagatttacttttaaggaaatggattttatgtaaaataatttcaatttcattaatctcataatcctcaactagtaaaaccaattttatcgtgttctcacaacacgacgacacaactcaaaaatgaaaataaatgaatttgagtgacatttaataattatgcgtttttgtaattgccataggtttcataatttcctttttaatgtgttcataatcatgtcatgtcatgctatgtcgtgcgtcgtgtgacttgctaattaatcgtgctatgtttgtgtttaaattttcaacacatttaataatcgcatcatgctcaagtttggcttaatcttgtcatgttataatcatatcgacacaaacatgaaatgatgataagaattgtctgctaggaattgcaaatatttgtagcacttaaaactcaggtcgtccttctccacacgaacatctgtaattgtatatccagaaataatatttacttataaattattaatttgattactaaaggaggattacggagttaatttctttctaaatgcgattatggagtagtcgacggattgatagtcatacgcagaaataaaataaacatttatacatatagtatataaatatatattttatgtaacatgttcagactatccgatgacaaataatagaagccccattttccgcttaaattacagcctaaatcctaaagctgcaaaagatgggtgaaagaatgccaacaagatgaaaatgttacgtactattcagaatcagaccatgcgtgcttgctattcagacccaaattttggtaccgttcttccataatgacggtggagaaaaactctaccgttcttctacgttgaatctattccaagcctcctatagacaccaatgtaaggcagaaaatattcaaggccaagcgatgaagctaataatgcttctccaaattgataatgatactaaaatatatatatgcatatataagtcataacacaggaactcacctttaaaagatcgaaaaccttttcacaaatgtatttctgctgaatgtttgcaccccgttgctgcagcttgtcgggatgaaccaaaagtgtagctttgcggtaagccttcttcacggcagcagctgtaaggatgtctatcagaggaattggctgccaaccactatcaggtccaaggatctacacaaaaggaaacatctaaataaataccattttgtgataatttctagccataacaaaattcaaattagaagaatataacataaccaaaatctataatattctatttattctccgcaacttcttttggtctatcataacgtgatacactaaaaaactgtataagtaattcaaagtcattttcactcaaacttgtttcgcatctttgcaaaattacaaattctaaatgacaggctccctcattaaaattttgatgtcattagtaaaggcaaatatatgcattgaatctacatagagagatagaaggttaggcattacatattggagtgttgacagcaatgcacgtaaatttccctccttcccactagaccaccttttgacctcgatatcaagagtttcagctaatctctgccacaagaaaattagtttgagatgataagaaacacttcaagcctaagcagtctttagcgaaaagttccttaagaagacagaaattaaaatttacatgtctctctgcttgctccatctgtgcaagtagatcacgcctattcttttctgcaagagctttttcctggagacaaaagaagaaaatgaagaatgcttgttttgtttcaatgttgtaagcttgagtataaaggggtcaataaacataccgcacgttctgttatcctatgatgcctttctgacctggctttatgcctctcagctgattcgtcagtggttccatcaaatctctcagcagtgttggaaactgttaagcaaaatataagaattagcttaatatgtgactatagtctccttcaaaatgatattatgatagtaagccaatatattttattctatgtattaacttcagaacattattattaccatgatctgaagaatttgggtatcttgaagtgcttgcagaggatgatcctttatgttgtggattctgctttcttgcttcagatgcaaacttgccagacatggctttttcaagagcacgctcacgggcctcagctgttgctctctccacagcagcacgttgtgctttaagtttggcttccttatcaggctctgcagaagtctttccaactctttcccgtgcctcagctgttgcctttctacgagctccagtagctgctcttcctgcagcagctcgttctcgggcttcagcaaatgccctttcacgagcttcacggattgctctttcaacagccatcctctcctctttcgctctttccctttcctttgcttcatttatttttctcaggtgttctttctccagtttcatgtccttttgccaactatcactggtttcactctctttcggagtgacagttgatcgatgagtctcctcattggtttccatactttggcatggcaaggtttcttgactattattttctttctcctccacacttattggggcttcttgatattcctgatctttttctgtactcgagcttgtccttggctcctcatttagctctatagttatcccttctccttcagaagtatcggataactcggatgctttcatagtaataccattttcagcccatgtttgctcatcgctaccctcagtctcagtgctactctcgtcatcttcctgactcatgccaagatcagattctttatcctcagctttgtccatttctgaattcacttcttcaacatacagttttgaattacaaactaactcaaactgtgaggcatcttgatcgtctggattttggacaaaattaatggcaaaagtatctacattttctgtatcatttttgtccaaaaaggtactctccatcttatcttccattggcttcactatcttggtgagttcaagacctagtgaaaagccatgtgtttcaggtacatatctgtcccccatgtcatagttctcttcaatagattctagtttattcccacttacatttggttccaagaaagcatcacttacctcttcggatacttcaacagaatcattttctgcatgtgaagtagatttctgaaatttactcaagttgtcacttttgtccagttggcatagatcatcagctgccctgagattgtttccctggttgcactgttcctctagagttgttttcaccttctcatcatctcctggacttggatcaatttttgcttccacattttccatctccgccctttgacaagtctcttcttgtctgttctcattgacttcctcgtgagaagcatcctgttgaagtatcttctcatttcctcctgtctctccaagattatcatttccttctgatttgccatcaccaacaagtatgtttgcaatttttttccctagatgaagttcaaattgtgtcttctcaattatttcttccccgttatctctgctaacgaaccttttgccaatgtcttctacaccatagggattgttatgttccttttcacattctttgggctcgaagacttcctcttctttcttatccttttcaacacaatcccgtgttggtgattgtctcttcatatgatcgacatcctccagacactctattgggtatttttcacattgattgctctcatgtaatgcttgagctatcttctcattttctcccttcgtccgggcaacttgcttctgatcaattttctcaagatcgaaaacattgacacctggcattgatttaccaccgccaattccaaagtcagatattccactaactccattaagtctacttatttcattaaatttctctgggtgattttcttcttcagctggttttggtccctcaacaaatggttgtggtttctcatatggttcctgctctcttttcttctccttcacatcattaaattctgatgaagtaatccagtttctatcagagttctcaatttcataaaattgttctgctgcctctaatggttcagcagtttcctgtctgtgatccccttcacttgatctaaggctattagaaagtgtttccctggttgactctttggtgcttgaaacaaactcctgaacttcaatgtctggtcccattgcattttgatttcttgtcatagcagaaacagacgatggaatattcaaatctatggttgtagaccaatgttcacctgtgttctcaacttcgtaaaactgctctgtagcatctgatgcttcactttcctccaacctatgatctacttgacttgatggtctctcccatggtgtagcttccctatcaatctctttgaaaagcctaacttcttcctgaacttccaagtctgcagttacttgaaatgctccaactgggttcttctcttttgtcctggaagaaacatgcaacggaacatttacttcttcgcatagttcatgattcttcttctttttcaatttgtttactttgttagcaaccatatcctcctttctttcctcgggtttcactctttcattagagctcaatttcacacgattttgcataccagccttctttctttccattaactcctttgccatttttatccttgcttgagcctcctctattgccttcgtcaaagcagctgcagaggtagcagcaacagaattcttgtctatttcctcatacaaaaatggtggtgaatcagcaccacaagaaccttcgggagtatcagtcctaaaaatcccttcacccttgcctatattaatgttagcttgcaggcttgaacaatgctgtacttttggttttgaacaaagagtttcgggtctaacttcatctttgtcaaataacttatctgttggatgagacttaaaccagctagaattattttgaaattcagcaccactaacagaagtctgttttccagtctctcctgctgggacaactctcttgactctactgacattatttccttctgttatcccctcacagacattggcttttgggacagtaccatttacctctgagaatactggcttatcatcttcatcaattaaacgtgcatacccttgaacagcatggagctgagctatataagtcgttccatttgtcccaagtgtaccatttgcattgccattgttgattttattgtatgacacgttgaatttcttgacttgatgcactgtttcccctgccatatcatgattcaactcgttgcaactggattcttttgcagcctctggaggcgataatctttgagctggtgtcctgcatatttgcaaaaatatatgaaaattagaaatcaaagtcaaaagtacaaaataacaaacactattccattcaatctctacctctggtagttgtgactctaattcaaaagaaactgtccatttctactcgataacattacgtaatatacaagaaaaagaaaactatcaaatagaaatggcaaaaatgaaaagacttaagttatatacaagtgaaaaattatacaagaaaagttttcctgaagaaatttagaaaagaaaataataagcttggttccaaaagagaaaagtttatgaaaagcacagatcgacctctgctgctaaatgtaaataaatatttgatgtactcctccataaccattcactcaagctagaaaagaaatatatatgtgtgtatgtacatatcgatcacattcaaaaatcgaagaaatttgacatttcgcattcaaatttaaaataaggaaatacagtgttatgcaacttttctttttaatctagtttaaagaaacaatgaaagttttagagtactagtaactgcacactacataccttgctcgctcagattttttccttttgttcgtttcccgagaaaattcctcataaggcactgcgaaagttgaatctccaaaaccaccgaaaatattagaatagtcaaggttcgagctccgaacgtcaaccgaaatcttcggctctttaagctccggaagttcaaggaaaggaatcgatgagccaagagaagcttcagaaccaccaaaaatctcgcgataatcttcaacaccagtcgagaaattaggagcactaaacttcgacggggcagcgaaaacgccgtcgtatatggtgtttccggagaaactgtggccgttggagagcttcttagagaaagtcagagacgaaggttggtagtccatggccaggtctcaagtctaacgcgctttctcttcttcttctttaggcaaaaaaaaatctgcgaagccaaaggagagggggaaagagagaagagacttccgtgaaaatgctgtcttaactgtcagaccaaccgtacaactcgtccgagtcggcgatttattataagctcgtactcgtcgtacagccaaagactcgggaatcgccgcaacgggttacgggcggagccggtgattgagagagactgtgaccttgagtcttgacctccctcaccaatctccatgaaattaatacttatttgattgggtcttgtcgcgtagcattaattaacttttgaatcaactcattattactagtactattagcgtcgtagaagggtattttcggtatacaattaattaaggaaggaaatttttatggaaaaattatatttaaagaacactttattttaataatttttannnnnnnnaaaatttatatctttaattatattaaatttttttaattcaattcatatttttaaaaaatatacttattaaataaaaataaattatgaaaataaaatcaaaataaatattaaaattaatataaaataatgtgaaaaaaaaaattaaaagtaatttttaaaaattatttgaatttatattttttttaataataaagtatgtttattattttattgggtacaaatagaagtccctaatttttatttacccaaaatttgtactcaccctattttaataatttaatctacataaaatttgtatttttaattttactaaattttgtaaatttttttttttgaatttatattcttaaaaaatatatttattaaataaaaataaattatattttacatgataaaaattatgtaaaattttcttaaaaaatatacataatttaaaaatatttatataaaataaaattaaaataaatataatataatgtgtagaaaaattattttaatttttttttaatagtagagtatatttattataaaagggtgcacttataatttctcttcggttgttttcttaaacaaaataatattatttgagacaattcataacatcaaactgactttatgaatatttataaatatataaggcataatattatctcatgactcaaacttactaaaaattaataaatggaatacggaatcaataatcgtatttatttttctctactttttatgtttagacaactaagcataaacattgttagacattttctttctttccttttttccgtttacctattttatagttttacataatacttcaatgttttttcttaagttaaacgaaatttccattaacaagtaaatgggacataatccattacatatagtttataaaggagaatcaataataatatactaaccaaatcatttataataaatatgtaaaaaagaaaaatatcttcaatttaaagactcataagtagtcaactataaaaacatcacaagaatgaaaagaatacaattttcatcctgaatgaacatatcacaaattacacttatcaatggcaattaaccaaagactttttaataaaaattgaatagagatacctcaataattcaaactagaataaaagaaaataacaaaaccaatcaagccaaagacaaccctactgaaagattgatccatagaacaaaaagttaataacaatctagggatccacaaactagaccactgagctagagaaatttcactcagaataaaaattacgactctcattgatctaatgagagggtgacagaccaccattcttaaaaggaaaagacagtaagataaacatgcattgtgagagatttacacaaattaccaactaacttaatgactaaatattataataaaatttagtatatatttttctttttctaatagtgcggtatgatttaagacacatttatgaaattctatatcgtagatcacatcatactactactacatagtttgaagaaaaaaaaatcaattcacatttacactgtaaaaaaagttctacagtgcttaagccaacagtaaatgttagggtgggcaaaaaaaattctgcaaaaatgacctattaataaaaaaaatattgtttctatatgatagaaaaatataatattttagggacatcgacaaatatgtgagaatcattataaaaaaaaaattaatatgtgagaataaaaataaaaatagtttttttatagaataaatatgaaaatatgtgaaataaaaataaaaaaattataaatttataagaacaaaaataaaaatatgtgagggcgaaaatgaaaaattttattttgtgagagcaaacatataaaaatatacataaaaaattaattatgtaaaagattaatttattaaagttgagtagcatagtttgctacaatatggtacggtatatgtgggatttatacagtgtaagctttgataaacacttctattcaagaataagagtttcattgcaaatttgactatcgatcactatggttagcttagtgtgacaattcgtgtttatggattgtgttcgtgtcaagacttagatattacaaggaaatggtaaatccaaacctgactcatttattaatcgtgtcgaaaactaaaacttaaattcaaatggatataacttgacccgacccacttaactcatttatataaagagttatatttaatttttgttaacgtatcaacttattgacatgtttataattttttatgacgcttttatgagcaatctaacatgtttatgtcttattttaactaaaaaatataatttatatgtgataaatataataaatataaaagtgtttactcttacataagtcattatcatatcatttttagattagatgtgtcaacccgaaaatgagccatttaataaaagggtcagctatgtcaacccgtatgatccaaactcatttaaagtaagctcaaatccgtttattttatagtaatttcgagttgtattgtcgtgtctaacttgaattatccttcgttggctgcttgatatttttcgttgatgtaatcttctcaatagtgagtagcaaaaatataaataaataaaacaattcacttaatatacatatacataaccttgccttattttttcgtgttgtctcctaatcgtgcttcttaaactcgtggtaattttgtaccgtacttaacagtccaatccaaatgtacaactcaaatataaatatttccataattcagagtcgctcgtgtatttatctgtcaaattattcgtgtattgactctacttatggattgttaaggggcatgagaggcatcgcttggaactgtagagggttagggtagacctctatagttcgtgaattgaagtctctaattcagtcgcactccccacactttgtttttctgaacgagctcaaagttaatgctacctctctagtacgtagtcttaattccctccatttttactttaatatccatgtgtcggctattggtactgcaggaggaattattttagcttggaagatcgagtttgtgtatgaatgtatttcttgctcccaaaaccatatttctggtcttgtctactcggatcctccttcacatccttggcttctctcttgtgtgtacggtcccccttatttccatgctaagaaaatgttttgggctgagttcttgaagattggggatagatttggtggcccatggctaattctgaggacactaattttgtgctcagtgattcggaatgtggtggttctaaggggagggacctgtttatcccgttcatctcaagcttagtgaattcttggaggcttattaacatgcctactctagagataagcttacttgggataatcaccggtctagtatgaaccatgttaaatctgctcttaacaaaggtttagttaatggggtgtggcttaggctgttcccgagagctgtccttagctcctcttagacttacaactctaatcatagacctttgttcattcttatcggtggcctggaagaaaactttaaaaaaagcttcaagtttgaagaatgctggactcggacgataagagcaagttagtggttatctatacttggaattcagttatttactcttgggctctcgtcagggtcttcaagaaaattggagcaactcaggtcgctcttatgcactggaatagtactcaatatggtcgaattgacaccataaataaagagttggaaaggaaactcaactctcttcagagtttacccgtgggaactagaaattgggattccgagagtgacattcgtcggtctctcaatgaggcctatgagagaaaagagttgtattggaaacaaaaggccagggtaaattggctcaaggaagggaataaatactctaagcttttcttcctctaggccgctatcagagggagaaggaatgctattgagagtatcttgaataaagataatatttagatttccagggtgagttaattggtaatgagttcattgacttttttaaaggaattttctttaaaggggataatggttatgaccttaattgtggtcaccttattcaggataggttatccgatgtggatcaagcggagcttgttaagggccttactcatgaggaaattcgtcgtactctcttttccatgagtaaaaataaagctcttggccctgatgggatgtatgtgcttttcttcaagcattattaggggtctgtgggtgaggacttttgtgaagcagtttctgactttttttggatgggtattatgcatgagggtgtcaatgctacgaatatagtgcttacacccaaggtccaaaacccgaaaagaaccaaccattatgtgcctacctctctgtgtaatgtgatgtacaaggtcatttccaaaatcattgccaataggattaagcctattttaccctccctaatatgtcttattcaagctgtttttgtttcgggtggaaatattcaagataacaatgtgatagtacaagaaattatccactccttcaacaggaaaaaaggcaaagaaggatttttttgccataaaaattgaccttatgaaagcttatgatagactgaattggagatttattgattatgtgctctcctattatggggctcctcaaaaattcgggagttggatctaccagtgtatttctaccacatccctcaatatttgtctaaatggagggaaatttggtaagattacgccttctggcctgcgccagggcgaccccctgtctccttacctctttatttcggctacagaaattttttcaagacttttggaggatgccccgtgtaagggcaatatcaagggtattagactcagtaggggaggccctattctttcacatattttcttcgcatatgatcttatcgtggttggtaaagctaatatggaggaagttaaaggctactggcaatgccttgagaggttttgtaattggtctggccagcaagtcaataaacttaaaacctctatcttctttagtaaaaatacttccaaggacatgaaaagaggaatcaaggcagtcctaggtttaggattccctgaaaggttaatatcaaatacttggggttacccttattcagatctaggcaaaaggatgtcgacttcaattttgttttggataacctcacatctaaactccaaggtcgtaaagcaaagacgttgtcaaaagcgggttgtcccacccttagtaaatttgtgggtttatctttgcccacgtatgttatgcaaacgactaagctctcgagtcgccctgttgccaagattaatggtatggttcgtgatttctggtggggctccgaaaaaggtaatcatgggctccacctaaaagcttgggacaagttatgccttcctaaatcttttggaggtcttggcttccgaaaaaaatagagaaatgaatcaagcctttctggcaaaatgggattggaaccttttgattgaaaaccaatccctttgttgccggatcatagaagctaaatacattaaaggaaagtctttcgtgaattgtacctctaaagattcaaatttattgttttagaaaaatgtggtaagaaccaactctatcttaataaaaggtgcctgtaaattggtagtaaatggaagggatactaatatttgggaggacccttggatcactcttaggaaagatttcttctctcgttctaatggttcctctactaatggggtgagcaaagttgttgatcttctgttagatagtggcaactggaatatccctaagttaaacagtctgtttgaccaagagactgtttctacaatcttgaaaggaggtaacccttctggtcagggcaaagattagatgggtttggacaatgaaaagtaatagtcaattcacgtgcaaatcggcatatctagctcaagctttagacaggggacctcattgtgaggttgccccttcgctctagaaaaagctgtggaatagtaaaatctcaaagagacaaaagattctttggtggtgtatcatgtccatggcaatctcagttcgttcaaagatcagtaaaaaatttccaattgaggatgttagccgccccctctgtgggacagaggatgaatctcttgaacacttgtttctttcctgtaatgtggcggttctctccttggggtatatttcatatctgtgatactgacattcggatgtgggactggataaaattcatttgggaccttaaatactaaggcatcaatgcataagaggtttttctttatgcttcgttaatagttgacaccatctggcggatctgcaattataaggtacacaataagttttcggttgatgtgaaaaagtgtattgacttgattcgtattttttttgtggattaccatgcttctctgttcccttgcctatctccgagtttggcggatgtctggtgtcctccccctcaggattggctgaagctgaattgtgatgttagagtggggttggatagcatgtatattgcagtagttgcaaaggatcatcttggcagggtgatttgggttcaaacaactagattggagttctatgatgcgttgtgtggggaagcggcgacttgctgcaaggctttggatattgcgaaggaccttggctctaagtttattattattgagagttattcgagggttgttatcaacgctcttaataagaaggagtctcattgggtgcttgagaattatgtctctttttgtactagatcctctcctgcttttgtgagttgtattttcattaacattagtagagaccgtaactttgttgcctataatatggctaagtggatatttacttcctagttaaaaatttattttgtaatgtctaactacttttattaagtaatggaaattattgtcatttttttgcttcttgtcagattgagtttatttttttaaggattgtcatgttgagatttctcgggtttgtttgagatattgtaatcgcattatttggtttagattttctgttttaaattaaagttaattgattggttcatatatatttcaaatgattacgccttggggaaaataaaagtaccaaaccccaactttaacacaatcttactttgaagacgaagttgattattaaattaattaattaaataataaaaatttcccataatttaaaaccatttgttcctttttctttatcttttttttgttagaaaaccatttgttccttttattctcttttggtttgatcgatgcttttctttttctttttctttttcggatataacacttggtcggaacttattaaagttttgcatttatttttataagcctgaagattcttacagccttaagaatattatataatcgaaataatcactaagataacaatgattatcattatttaatttattttaatcactcttattcttatttaaatttagatatataatttttttaaaattattacatgaaaaatacaaattgacactttatttacaaaaatatatttacaaagtgtggacaatatttatactttttatgtgtttttaattaccaaaataactgttacactatcacttacacaatcagacgaaggttgctgagtggttggctgaaagttgcatcagacgaaagtttcaatcagacgaaggttgctggg

SEQ ID NO: 15318 - DNA, 7132 bp, Cannabis sativa
ttatttaataattcaaagcattaaccatatgcggtctttacatttagtcacaaaaaaattatgttgtagctaaaaaattgtcgctaaaagtaataattttttgtagtgtcagctaatatatataactcatttatttatcactttcatgagtaaaattgtaaccccaattttcgaatttatattgatattgatattattttttaaacaatattgaatattattcttagttgaatcttatgaatctctgtaccatttattccaatatattttgaacgagtcttacttaattatatgtattactattatgatgagatgaatattaaacaattatctcattggcaacttgcttaataatgatcccaagtcttcaactctctctcccttaatgaaaaatctataaatctataaattaatagatggatatagtatagctatatatattgtatattatacatttattatataatacgaatacctaatacattcttgtgagcgcgaccacgattatttctgtgtttgagtatatgagtgtataacctatagctagggtttgcacaatcatatagctatatgtcttaaaacacaatgaaacaaaaccaattatattagaatctgaaaaactgaaaataccaacaatcaattatccactctgaaaaatttattaacactataatctcacttttaaaaaaatgaaaaatgaaaatggacactttttttttttaaaaaaaatatttgttagttattaaacaaacaatatttcgtttacaacaacagagtaaatttgtggaaagataaaaatagacacacttgtatgatagaagttatttttttttttttctttctaactattctaatttttctttaaaacaaaattatagaaaaaaaaccatacaaaaaatgtgtaataaaaacaaatccgggaaaaaaaattatatgttaaaaacttcatatatttcttaaatcatatatttttttattattagaaaaaaagaaaaatactacaattgacttttttttttcttaaattcccattcatcaatatttctgacttcatctccttatagcttgtatttatggttcaaattgtaagaatacatgcttaaaataggaagtcaaccatcataacaatataaatatacatacatacatacataaatatatatacataaacatacttatatatttttcaattgtaaattacaaaaatctatgtccatctcaaacattcatacaaaaaaaaaaaaaaaccaaaattctctcttaaaaaaatgaacattcccaaacactttatactaattatcttcttcttcttcatcatcacatccttctcatacattggttcaagctcaaaattagtcccatgttttaaagcagcttgttcaatccacgaaccagatatccaattcccatttcgaatcaagaacttccaaacagacacatgtggctatccaggttttgatatatcctgtgataataactcaacccaaacactcctcaatctacctaattcacaacaattcttagtccaaagaatagactacgacacaagaagaatatggattaaggatccaaacaattgtttacccaatcgaataatacttcattctttgaatttgtccggttctcctttcgacaatttttacaatgaaaacttcacatttttcaattgttcttcttcgtatcattcgaattatctgttgagtactcctatagcttgtcttagtgggcccacttatacagttgttgcaacgacgtcgtcgtatactattgaattcttgtctaaaacgatatgtcgtttagtaggcacttttcaagtcccggttgattcgatcattaattctgagaatttgtactcgtgggatttcggtggtggtgacttacttcgtctcacgtggcgagatgttcccacgtgcaatcggtatgaggtcaaccctactcgtggaatagtttgttcagaatacaatcctcaacgaggtatgtaattataaatatgtaaggatatttgcggcaaaattctttaatttttgtaattgttatacatacgactatattaaaaaaaagtagtgagaaaaatattttattttacgattttgttacagttgtatattttttagctgttaagtgtcaattaaactcgttaagtagcaggtcagaaacacacgacgatatattttttcaacttatttaatatgtagtctaataatatgtcaccatgtatttttgagttgatacttgattatcaaaaaagaatacaactgcaataaaattataaaataaggtacttttgtcgctattttttttaaaatatgtgtaataattgtaaatattaatagagttttgccccatatatctcgattatgtatgtgtaaatttctttttttttttctttaaccaaaatattcttttattattatataaaaaagatgtaaaacctttaaatttacactttatccccaatgaaaaataaaatatgcaaggattgcttttactcacaatgcagtaaaatctagaataattttggcataaaactaattatattttaattataggttataactaaataagagattatttcataaaaatattatgagaaatacggtattttaatgtatttttatgttaaaacttttgttaatttgttattgattttttttttgttgttgtttggaagttattttcctgatacttttatatatttttcttgttattttcgtgttgtttttatagaataccgtaaaaataatttataaaaaatagtaatttatataattatttcattaataaaaatattagtaaaaaaattaaaacactaaaaacaacaaatatgtaaggacaataacattagcaaattattaatatatatatatattttttttaacaatttaatatatacttttcttatttatacatattatattatattaaaaaaacataacatagtataattaaattatatattttaagtaaatacaatatactgtttactaagattaaataaaagctttagaaattaaatgactaagtaagcgagacaaaaaattttacatggtttagacgttaattatctctaatccataagttagtatattagccttgtaggtgtacaaatgtattacaaaaggtgtttacaataaaaattctaactttggttctttaggtttctctctcgaagaagaaaggttagagagtattttagcaaaacttcgactatgtaaatttttgtgatcccccctttgcgaagaaataaaggggtttatataggctaaagtacgggtatgggtatacccatgactggctgcttaggattttctgcaaagagcccacccactattgggcccctaagaaggctcttcctcgtgaggcgaaaggttcgtacagttgggaccatttttggtgcaggatgcgtgtctagcggaggttgcacttagtagacaaaacccttagaggagccgttaggcaaaaaagtttattcagaggtggcacgtgcactaccatactctcatacaggggacaagatctaaccctatgtcaaaaaagtataaccgtcacaagggtcatccaactctaacttcataatagtcgtttagtcctcccttgtgcaattggtatccgccttaaactcttcgtatgacttctaggtgtcttcctgcaagtctggttggtttggtcttctccggatcccagatggatggcagggcttccaggtcttggatggtaatttgccctgtgggtaaaatctttggtcttctccgggtctcggatgtatactagtaatttcaacaataaaattatggaatgtaatgctcagttgcatcgactcaagggtaggaaggatgaagattttgtggcacagtatagggaagtcgagaaggagttatttgaagttcttactaagcgagaagtgttttgaaaacaaagattaatgcaactttggcttaaggaaggtgaccaaaatagtaagtattttcatgcctccgatagtgaacataaaatacataatacgatccataagttgaaagatgaaagtggtgcttgggttgattaggagtcagggttgaaagacctcatggttaggtattttttagagttttttttggcctctactacttgatgggaagatgttgtaaattgcattgaaccatcaattacaccatacatgaatgggatattattgtgtcttgttactaatgatgaggtaaggcgagctttgttttagatgcatccaaataagtcttcaaacctagatgtgatgactcttggattttatcgaaagtgttggtcagtggtaggtaaatatgttgttttgctggttcaggctttttttcatacgacttctgttcctatggggctgaatgatactaatctagtgttaattctaaaaaagaagtgtcctaaatctatgggtgatttgtgacctatttcttcatgtaatgtggtttacaaagtgatattgaaagtcttggctaatcattttaagtgtgtgcttgacaacgtaattttggattttcaaaatgctttcattcctaagagactaatctttgacaatattatggtatcctttgaaataatatattatttgaaaaggaaaagtgttgggaaagtaggttaaatggcgttgaggcttgacatgagtaaagcatatgatatggttgaatgaccttttttagaggctatgctcttgaggatgggttttgatagtcggtgggtagagttgattatggcatcaatctcgtctgttaaatattgggtccaatatggtggtttctttttggggcctattactccaactcaagatattcaccaagaggaacctttatctccttacttgtttatcttatgtgcggaaggattgtctactcttattaatgactatgtacagagggttggcttataggctgtaaagttgctcggggtgcgtctattattgcccatatgttctttgtagatgataattatttatattgttaggcgttggaggatgaggctaaaaggctaaagttgcccgtgtgtgctccatcttaggtatggtggaagctggtgagaattgttagtatcttggactcttaaatattatgaaccaaaaaaagttagccgtgttgggctttcttaatgaaaatatgaggaaacagatcgaagggtgggatggtaagtttttatctagagctggtaaagaggttttgttgaagatggtggtgcaatatctacccacctatgctatgatctttttctttttcctaaaaaggtgtgtgacaagatggaaaaattaatgtgttctttctagtggaagaagtcgtgtaaaaacggtagtggcattcactggatgagttgggacaggtgtgtgtcacaaaagttcatgggggacttgggttccagaagcttcatgattttaatattgcgttgcttagaaaatagggatggtgtcttcattatactcaagattctttagttgatcgtgtgttcaaagctcgttattatcctcgtgggtcctacttgggcgcagagttaggaagcaatttgagttttatatggaaacatatccatgaagctcagtttcttattcgaaaggggggccgtatggtcattggatttggaatgagtatttatattcttaggggtccttggcttctggataaatagaaacctttgttgtttcagatcagcctagtttggtaatcaaaaggtctccagtcttatgaaggttggagagttatcttgggatgaagaggttcttaaagatatttttgttgagaggatcgtaaagcttattttgagcattcctttgttctcctcaatgtctgatgatatttggcagtggaatggtgataattctggtgcatattcggtcaagagtgtgtatcatcttcttcaagagcttaaaggtgagttagttggagttggtaactcagtattttggaaagagttgtgggatttgagagttcctcctacagtcaaggaattgttttggaacgcaattaggcgtgaaacatgttcccctccccttgttgttgtgtccaagataattacgaattggagagtctatctctcattatcttgtagagtgttcgtttgcttttccttgttggcggatggcaggtatttcggtgatagagattagtgacaattcttttggagatggtttcatgatagattttggtgtcgggattctaggatgaaacatagagctgttatgttttgttgggcgttgtggtctgtgcgcaatgacaagacctggaatggtaagaataagattgttaatgtgattatttcgttggctaagaatagttttgattaatggagttatgctcaagatgaaattattggttcgtctttgttttctttacaagatagcgaagggtacgagcactgaattgcaccagttgataatacaatcaaaattaatgtcgatgcagctatctttggaaattaaaataagtatgggtatggttgggtggtgcgaaaatcttttggtcagcttattatagcttcgaaagtaagccatatgggattagttgatcctattcttgctgaagctattggagttaaggaggtgttgagttggttgaaagaaacaaggcagcatgatgtggtgctggagtcgaaaagtttggtcacgatccaagctatccaaaattcgttagatatggcttctatttttgggttctgtatttttgagtgccgacagattttttctagtttgaataatatttttgtaatttttttcaagtgattcgctaattatgttgctcaccatttgactagagcttcgtagttaaatattggttgtacctattcaaattctacaattctgaatagtttacttgatgtacttttaaatgatttgaattaatgaaattgcatttttctattgaaaaaaaatttaaattacaattaattaatttaacaaaattatttaatgtatatataattaaattattaaatttaaaattcatataattaaaaaatatatattttttatgattaaatttgaatttaagttactagtatgtattatgatttcaaaatacaaattattaaaaaaatatagtaccaaatctatatatatatatatatatatattttttacataaaatctatattttgataaacacaaaataagaagtaagtagacttc

SEQ ID NO: 15319 - DNA, 1662 bp, Cannabis sativa
ttagcacctggaaaacatcatttgtgctgattccaatgcatttttcattgtggggttttgacttaataattcatacaagtcatcatttttagtgactcaaacactaacactggggtggtgggttggtgggtgggttgggtatcttctctcttattttatattttatcattatacacacatacataattatgtatattattattatataaacatgggactttttcaatacaatgtgaggaaagaacagacaattcacaatgatgggatcttagaaagattgacacttggtcctctagtaaacaatgagactgttataaaatattctattcaagtcatcattaaaaatctaaacttttttttattggataggaaagagaaagagtaataaaataggtaaaaatggcaatgaatgatccaagaaaatgttcatttttggtgggtgatccaagaagggcacaatccaatccattaagaaattgagtttggtaataattcatattttacatatataaatgcttattatatcaatggccacttatggtgtgtgttaatgttctacataagggcggctattaaggacttcaaacgtagctttcacagtacacaaccaagaaaagtggcaatggcaccattgagatttccaagggttgtccttaatttcaattcataaatagcaacagtgctaagttggtgaaatgctttttctattttttttttttttcatatttataataactattgtttaatctaactcttgtattgagattgaggcaatgagccacggcgtaattgtagttgaagcttttaatcattaatgatcactcacagactataatattcatacttttgtctcattgaaaagtgtttggaaactcattaaaattatgttatattttagtattatacagagacaaactaaggtttatataccattttgtcacaatgctaaggctctaatacacatcactttctccaaggataattatattactaaggtaataaattataagattaaactctcaaaataaataaggtaatatttcacattactattcatttactagtattaatccatttcaaacagttcctaaatttcatttaattatggatattgtcctaattctaaaatttagttatttatcccactgataatcaaactgtattattttttaatctattttgtcttgtcttacaatcagtacatatatattgacaaaaatcatttttcctaaaccaaattttgtatcagtttctactaccatgcccaacatttttaataagggaattttaaaaaaatatgcataaaataccttaatattttatccttacactaatacatatcaaaattgaaaacctatgacaatttatttaaaatccaaaaatacccttctcataactcaaccccaactttttctcttcctctctctctctcaactgaaccacacacgatccaaaacccccctcaccaccgcccacaacgtcggcccctcaccactgcctacaacatcagcccctcccaaatcaaaaccgagcacttctcacggcctaccgcctgccccatcaaaaccgaaatgtccaaagtaagattccgccccccctttttttgtcattgtttttttttttgtgatatatgatttggagtattgataggtattgatttta

SEQ ID NO: 15320 - DNA, 4524 bp, Cannabis sativa
tcatttaacaaaatacaaggtctaatctgtaacttttgcaaaacacagggttcaaaatgatatttacccaaaaatatatattaagtatatataaaataattatacagaatgatttagtttgaaccactactaaaatttctaaaaccgtgaccgaactaaaaaatttaaaatagtttgaatagatcaaatcattcacaccgaattcatgtggtccggtctcaaatgatttgctccagattagttagggtttagaaccatagattacaaattatatagacactcttaaatattaaatattatcatcaagtagtattttaattgaattttatatatttattttataggtgtgtttttacccgatggacaaaaggtaaatatttttgtacaacctttacttatttgattattgaagaatccaagaattttaataagataggttttttcattacaattaattttcttaaaaaaattactatatcatgaacttatatttaccatacattttaaattacttcttttaacatcttcttaaatcttcttaagaagttactaaatttatcaatcttttaattttgtaaaagctcttgctttttttggtacgattaacatgggttaaaggtgtttactttcgtacattaaagctttattatctagttttctaagatatttttttctctctcatattagtcataactttaaaattttcaatttataaattagctaaacatgtccttagaatagatgatcatctttcttagatggaactgatcaaataaagtgatcatgacccaaaaaaaaaaagtgtctaaatattttaagcatgttgtggttaattttgtgtacaaatcttgatgtaattactttcacattaataaagtaattacattttgtcctaacattatcaagattcattaattttcttggcagaaccttggatgttgcttctcaagatttaggcgccccttgcataccacaaataggatactgaggcatggaatggatgcctggtttagaacggtttggtaagttattgcaaactaatttttctttctctctctccaacatgcgaatcctacttatgacttgtgagatttctatgataaattgatcaatttagaccttgttagtaacatttcttaatccttcatgagcttgttatccaatatcagggagtacccctaaatgggaaagagtaatcttgctccgccacagtttgttcacaccttaaatgcaacggctggtgcagtcagacagatgcttgtatgtctgcttgagaattaccaacaagaagatggctctgtcattataatagacctaaccctttgaggccattcatgggtggacttgagcttattactcctaagcctagacaaggtggccacattattttctacttacactcttctgaggatgtgtagaatgtagttgcaggattgttctttggttttgaaactactatgaaatcacaattcagtaaaaacaagaaaattgcttgttttttttaaagagttacggtgggtaatttatagtttagaattggaatattaaataatgttgagttttcaattttatgggagcgtccatacattgtacacactccatttcagacagaattgcaatggacatttgggtcttgttggttggtactctaatttagtgatgcttcactataccctctacaatttgagtttcgtgatgtcaacttttgggatagcatatgtatatgcttcataattgatttgttggccaaatccactcaattttgtgagagttgttatgagatcaacctgaaaaacacaggtacagttaagaatcaatcaagtggtttacattatgccagttaaattagattaaaaagaaacacaaaatcattagacaaatagattttgggagggacagacctcataatctgtctgagatacagtttctcggctgcgttgatatttttcaacccaaggcaaaacctgaggatctgtggctaacaaagcttcggttgccgtttgatcaggacccaagaatgcagacattacagctagctggccaaagatttaaaagaattgaaaataagcaaataatgtttgattttaaagtcagcatgtatgagcaaggaaattaaccattctgagcaagcaaataacgtttggacttagtatttgagacacacaataaaacacacacttgttgaattgctcccttaagggccaaggttcctatatatatactcttcataatcggtgcactagccgactttaattgtgctagagaattctagtaattgtatttggagtttagtttaaagtccaagtcctagaatgcatttcattcatctaaacactacttaattgcaatagaactttctaagtcggtggtgttcttaaaagtgactcaaacttcagacacttagtgaaaacaaaccacatggctcattgtttgaacttattaaagagagcaaagaatggtgaagtaacaacctgtcggggacctaagccaatggaaacgaacttgtccttcatttcttggacggtggctttctcccacaggggaacccttccttctggatctggctcctgggcatctgttctcccaaaggttctatcaaacaaaccccacttttggaacaagaagacaaaatgattgtttcaattatcatgtattcaaatatttcaatgcaagctaaaccatttagttactctcaacaatataagaatctacccattttacctctatgcaacacctttttcttttcttcaagaatgataagttagttaaaagaagaacagaagataaaaaacaaacctgcccatttgaaccatatgcagagtataataagcttcctttctcttcattcccaccacattttcgaatagcagaagctaagaaggtagatttggttgcactttgtgctgcacaaaataaggagcttgagttttctttttttttttttttgtcatcttcatgagcattctaggtagtaagtatctcaatagttcattacctgcaaattggatgagatcagcataggcaataggcccacccttggagtaagaatctatctccttcttaacttcctccaacaaattcaaagcaccagcaaaccctttgttttcagatctgcttatctctgagcttcaagcaagaaaattggagaaaagaaagtagatgagatttctacacttagcttaaaagaataccatcatcaactccaacaaaagaaactgaaaattctctgcacctaaattatacctgaaccttattgaaccatttgggcctcctgttttggtagcctacactcaaactctagcaaatgagcacgttcctcttttgtgcatttggttaatttccttacaaattatataatcaacatctaaccttgtcatatgttattgcatcgttaagtgccaaagttagtatggacgggataagatctggatttgcctgtaaaatccaaacaacatatcaaactagagagatcaaacttgaatcattattaggcatagttacataaattgtgcaaattacctttaatgcagtataaagagtgctcttgatacttgctggaaaaaacagtataaagagtgaatcttaatcagtaaattgagctaaaaaaaagagttgttgagagcttacaaagaaattcagaacgctgtcttcgttgtatcaaatcagcagcagtggcagttctcacaaatgctcccgaattcgctattaattcctaacataacaactggcggaaactcataatcacatcacttttgattccagcatttggttacatatttttatagaagtggtaaattaaatttaataaacaaatctgttaaggggaaatttgcagaagaaggattatccacaccatgccaacggaagcaccaatgcatttaagaatgtccctacgtcggaacccatcctcatcagtaactgcagcttctattttgttacaacgaattgagagctgaaattccaaattaaaaagagagaagatcaaaaactgtataaggggtgtgcatcaaacaagcaaaaacagaaactatgtagtcattacagtttaaggaacggagcagaggagtgagtgacttactggttgagtagaatatggggaagtgggagtgttggcattgacattgagagaagagactagagaaggaagagtggagaggaaggagacccccatgatcataataagggtattgatggagaggagattgtgaagaggataatggtaatgaatttgaataacaacaacatacaatatgaataatatgttgttgaatagagatgggtttgtgtggagctgtgaaagatagtttaatgatatatgttatccttttcctatcttttatgtgtctcactaggattccctccggatatcataacccacatcaatcttctctttcaattccgattacactcaagacaattaaatattactttattttgtttaaaatttttcattttttttttcatttttttactatggggaaatttattttttttaaaaatactgtgtactgtattaagttttca

SEQ ID NO: 15321 - DNA, 8763 bp, Cannabis sativa
cacttttcttgaggctagcaaaggaggccgaccttcacttgtttggattagtatctccttgggaaaggaacttctagtttcaggacttcgaaaatcaataggtaatggtgcaagtacttcgatatacaatgatgcttggatccctggatacggtaaagtcaactacctcaaacacctctcagacggaagttcaaatgtatcagatcttataaccccgtctcatcaatgggattcaaatcgtattagaaccatttttcctgttgatattagtcaagccattgaatctattccactcttgccccctataccctgatacctattactggccatacacaacacatggaaattattatgtaaatacaggttaccataaagcccattccttaatgagtaaagatgatcccaccccttcggataccatggctagccaaacctggtggaaaaagatgtggacacaaacaatcccacctaaagttaagcacttcatttggagaaccttttacgacatccttcccaaaagctacaatctacataagagaaagtccatcccttcaccaaattgttgtcgttgtcaacatcacatggagaccctagagcatgctattttcagatgttcaactgtccaaaaggtatggaaattgacccaattctcttcttttatatttaaatatatggaactaacttgcagggaaattcttcatgtggccgcttcatctctcacggatagagactaccaatttttcctttgttttctttggaagatttggcattgcaggaatgattatccccatcaccagaagctatcgacaccagctcatgtgatccaatcaacctctgattatttggatctgtatcaacaaaataacaggcattcactcacatcggggacccatccttcttatacagtagcagatagttacgaagccccttcatcttttaacttaaaactgtctgtaaatgctgcccagaacacaacaacaaacaagacaggttttggtatggcgctcttcaacaacatgggggatttgcttctgtcagtagctacaccatggcgaggcactcaatcggcattattaatggaagcgcatgcgctttcctatgctctctcttggtgccaccaatgaagcatacaaccagatcatattgtttcagattgcaaattacttgtggattatgttcgcagtggtgctaatcatcatttgctcttaaacagatttgcaaaggacattaaaaacttcctatcttatcttcctaatgctacttttgtacatatttctagggagcaaaatgaagatgctcatcgtcttgcaaagtttgcattaggcctaaatcaggaagtttgttggaaaaatcagcattttaattgtaatctgtaatttgtatcctgaactttattcctctttgcaatggatacatgttttcttcaaaaaaaaaaaaaacttttgaaaatataaaattgaaaaataaacttttataaatattcaaataaccgagtattgacaaaaatgtaaaaaaaagtgacaaaaagtagcgccacgtgtaaaaatacctaaacaaaatctctctctgtctctttttttttttttttataaatgcgactaaaataaaataattaaataatattgaaaacataaaggactgaaaatgagtaggaaagcaatgtactgggtaatttttattcagttggagaagaagcgaagaagcaaagaatgagcagaatactgaaagtgaaagtctgaaacaaagaatgggcttgctggcgtaggcgattgtcatgataacaaacagtatggccttgatgcttacctgattctcctctcaaactaaatccaaaatctctctctgtctgactctctgggtgtgtttatatatacgacatatttgcttacatggcttcggctcctctgattcacgcgcgttattgttactcgcccatatttggtggttatcgaagaaatggctctttaagttcgtcaccgtcggcgtcggcgtcgccgtcttcttcgtcgtctttttcctcatcgtcggcctgttcctcgtcttctaattgctgttcttcgtcatctttgggcttctcctcctctggtaattttcttcgaaatgactttttatttagacggtgacttgtcaatgtcgaaaatattgaaatataaatacttatttattggatgagatagaagggaactaaattaggattttctttttcctttcgaatttttttgattcatgtgagccttacaacacttcaagttttgtttcttttagtgtaagctaacatcgaaaatttatcattaatactcaagaccgagctttgagttgtaaagatggaatgtttcgctttgtcttatttatgtgccttttaccacttcgaacggtggttgaggataattgtttcagggaatcaatatgctccattttttttagctgttgattacaaaatttttgttcagggacaagcaataattggagaaatcaaggttttagaggtcacagtatgtctacaataattcaaggaaattttggatcatccaggggtattactaaagatcagcctgatcatctccttgtccttgttcatggcatattggctaggtacgtattcaaccatttcggtcttaggagtcatatgatcaactttagaaatgaaaactaactcatttgagggttaatttgattagtcaggctaaggtgtgtgggatttgatttatcatgaggattgtagggtttaatataaggataagtattgaataattataggattatttcaaaagaaaacataaaaacaacaaaagaaaaaattacaaaattacggttgtctagaattttaagtatttttacgacttttaagattttatatacataaaataagtcccataacatattcttaaggcccattttaaacgttgaactgttgccattagttttcaattcaactataaatgttttgttgttaaattttatatcaactaaatgtttttcagcagtgtttcatggttatatttctttttgcttccaattcatataagcttctctaatatttattttacagcccaagtgactggacgtacgttcaagcagagttaaaaaagcgacttgggagaaaatttctaatctacggtatgttcgtctcatttattattaatctattcaggtttcaatcacagatttgcaactatagttattctttttatgttaatatatcaagcatgatgacatgttaggccaccgcttagactaacatattccaggcataaacagggcaataattagaattaattaaaatagggctgaggtgttgtaaatgtaagtatgattggttggtttgatagttttctatggtagttgttgtcgttggtataaatataccaacagctgccttaggaaaggattggattgttgtattcggattgtggaagactaataacttctttgtagagttctccaagtgtctcaacgacttggaactttgtaactctggtaacgcaaacagcagaattctttgaaggattgatatttttttcttttttcttttattagtgtatcagaccatgtgggatatttgatagtcctctatttcactatggagaatggtcgtccaattttaaggggtgaagtaaacataggaagaatcccaattttttcacaaaatgaagaggggtaataatcaataatcaatttttaggcttcatctaaccctacaatatttggatcatagaaaacgatagcacaattgctagaaaacctgcatgccagtttcagctacctatcttcgctattaacttgatgttttctgcttcaccttttaagaagggtgtcaaaataggaaaagcttatcacttgctcatttttcttctattcatgatccaactttttttgtcctcactgaaaagtgaaacatttggggctgtctaacaaattggcaatcatcttgcatgtttagagatttgtctgataataattcttttttaaaattcacttataaaagccacacagtaggtatgaattcttgattttaggtttggttaaatagagaacacaatggtaagaagcatttgcaggatagacagacaagtagtattgataatttgacccacaggctcatcatggcaacatgtaaatttttgcatgtgctttcaacattggaaagagaataaagaaataaataaaaagaaacaattggttgtcaaagtgcttgatacttgggttacgattttttgttggtttcttgattaaaccaaatctgtagtacattgatagaactcagccaagaaacccacacataaaccagaaaaccttctctttatttctcaaacgctggcctcaattagagactaagacaaaaacatacatagtatagagcagtagctaatctgagatagctaatccccaaagtcgctcttccattattagaactcttttctttttgataaaaagcattacgacaacccaaatccacttatttatattcctaaactaacttttggtctagcaaaataaaatttcctaaaaatcataacaaactctaatatatacataacaacactactaatacaactcagctaagtaaaaaaacttagcttagttaatcctcttgttgcacctcacataagtgaaccttatgggaggtctatcagacatttgcatgagtcagatgccataatatttttagtgcttgaatttgattaggtgttgatgttttgcagcaagttcgtcgaatacgtactctagaacttttgctggtatagatggagctggaaaacgattagcagatgaagtgagaatcttacattgaggagaatttttaaaatttggttatatctcctatatttgatatttgtaagcaattttttgatttgattatgttacccttggcttttaaacaggtcatgcaagttgtgcaaagaacagaaagcctcaagaaaatttcatttttagcccattctcttggtggcttgattgcaagatatgctgttgctgttctttactctccaaattctctgatgccaaattcacaaacagcatattcctcgaaacgtggtatgattgctgggttggagccaatcaattttataaccttggcaactccccatcttggggtgagagggaaacgacaggtttgtgcagaagggtgtaccttgccacctttatttcattttatatttcatatgaaacgagggttatcatagtattaggcagagagcctagttgcaaaagttgatatttgttgatcaggttttcctgacaactacaaattgtagagaggttgaagacataaataagaacacacgagatttaacgtgttttaaactattaatgaaaattgaaaaccttgtccacgagtcagttgtattaagaggaaaactttgcaaggttgaagttctttggtgattttggtagtgtattggttctatccttttacaagtgatattttgaccctatatatgggcccgtttgagtgggccgaaaaacaataatctatgattagtctcactaatagtagtggtcttacattttttttaatataaaaagtatcgttttttcactaacgtacaaatgttcttgataagccaccactaacctcatgcacagtaggagaaacaaagggaagacaaccaaaaaaggaaatgacgtggcaggggttagttagaagagttttggttgggtgtgggagtgtgcagctagtatagtgcactaattagtataaataatgtgagttgtttcctgatcgggttttatgtgagaattgtatttaggttttaccttgtggagagatcaggttctcgaatcttgagatttgtcaataactaagggttgagacccatattttctttctttatttgtgttcttgatattaattgacaggttatctctatcaattggtatcaaattcacgatcttttatgggccctacaaaagactctcaactggaagtcattgatgagcggattgatgctgtgcactgggagatgcaacaggagttataggcatttcagattgaatttcagttgattttgagggagctcgataagctcagagagggtgttggtccatatgaacctttaagggaactgaacttttccaaaggatctttgaccatatcagtccactatggtttggatctgatgtcaaccatttaaaagcggatttgctcgagaatattcctcctacatccagcttccaaactctaatgtctatatctatactgggcagccttacgtgctccaacctctttaataggttgataaggttagggacttctcaatctgctagatttcttctaaatttgaaatcccaactcttcactagtcgcctggtaagccatcatcgactaccatctcccaaatacattcattcatgcctttggataacactgctagattcagaaaggcactcttcaaagatgattcttcaatccacacatcttccgaaaaatgaacagtatccccttttcccactaccaatttcaggtattcctcatacatatcggatatctctctccaaggcccttttggagaccaacgcccacctaatttagagtcccagaaattttgtgccttactatatcggcctgaagtcttttaccttgcaattgttgagtcttttgggtatcagacatatgaatgtttcgttgatactgccttctattctcccttctctttcgaacgctttaaatacttccatgagatcttctttaatgatttaccaatttgcttaatgctaccagattgaatccgtccggtcttggagctctgttaccttcacaactgaaaaccacattttttacttcctctttctcagaaggtttttctaattctatggctgaagtagctgtgatttctcaacactatgccctcgatgcccctacctcttctgttttctgaagtgtacaatcttgagaagaagttaatcaattcagccactatttcttcttctttatcgataatggatccatcttccctctcaagtcgcgagatagtattctttgactttcttgcatttaataagttatgaataaaccttgaattggcatctccttcttttgcccatttacattttgatttcagccacacacacctctcttcctataattttagacgttgccattccgtttttaagtttctccattccacctcaagggactcgttccacgaatcactaccctccattctatctaaggccatcaaccttccttttaatgcattcaccacccatttattttgtccaattgtagctttactccattcctttatgtttcttttttctttgcacttttttcagtttggtcatgaagttagatcccaaccattcctccacctttgcttctttcctccattcttcaaaaagcttggggaaagacttgtgttccaaccaaaaattatcaaaacgggatgggcctggactccattttggcggattggtatcaatcacaatagggttatggtctgacactaatcttaccagcatttcttgcctaacaaacgaaaaattagattccatttgtttgtgaacatgaaacgatccagtctactacaaataggatttccttgaaagtttgaccatgtgaatcttccattgtttagctctggtcaatcagcttcagctcccgaattaactcatcaaataccttcgtgctctttgtatttgaggaactattcaacttctccccttctctcctcactccattaaaatctctgcccaagcaccatgattccccacatatggaactcaatcctgccaactcatcccaaaaatcagacctgctcttatacgaacatggtccatataccccagagaaccaccaaggttcttttccttcagccttaattagtatagaaatagaaaaatctcccatcatggaatctattatctcgatgcttctcgtgtcccaaactaccaatgttctcctgatcttcctatggctggaagtaatatccaggctttgaatctcgatctccatatactcccaataaatcttctatccactttatccttcttagcttcttgtaatacaaccaaagcaggattaactttagagattgttgctttaattgcttttctcttctttttatccccacatcctctcacgtttcagaataagatcttcattagatacgtttcacgacccttgacttgttactgcttttgtcataattcacattaaaagtcaacttatttagttctctacacatcctcctcccatttttagtatcatcaaacttctgcccccatcattcttgtttggtaatatttacattcccatggttgatagagattaccgttttactctatgatgcttctttctcaaagtagcagctctcaacctgcttatcccctaccaaattagattggtaattgctttcttcttcttcatctctccaaagcccctccatatcactaatgatgtcctcctgctcctccttatcttcttcttccgagtactcatcttcctcttttgacgagtcactttctgaactatcctccaagaactcttttaacagtaaacaagacataaacaataaaatctctcaaataaaactttattgaattgctgaaatagtacacgaatcaagcattcaagaggcttatctctcctattccaatcatttgagaggattggtctctctacacgagtctactcttttctaattcccaaccatccttacaaaagaacccatgtcctagtcctatttataggcattagttaatgtaactaatgccaactaggatcctattagaataagacaagtcagccccaaaccaagg

SEQ ID NO: 15322 - DNA, 4010 bp, Cannabis sativa
  modified_base (539)..(545): a, c, t, g, unknown or other
  modified_base (1338)..(1343): a, c, t, g, unknown or other
  modified_base (1687)..(1688): a, c, t, g, unknown or other
  modified_base (3848)..(3851): a, c, t, g, unknown or other
tttttttttttttttaagtgtatgtttggttttataaacatttattatgtgtatattttcaaaaaaaaaaaaaatatattataatgtatatttatatgacgataaaaataaacccgaccttatgtaatggtctaaactgtctaatgtttaaactggtcctatatataatgtgtgcagatgtagcatcatcaagcactgagatttgacatagatttatatatccctatacttatatataaagatggccaggtgcaaagtataatccctatagtctttctcattaattattattattcataaaacaaatatcttaagttaacaaaaccaaatatataatatgagtgttgttattgagtatcagttatatttaatacttttcacaggtagtgtcctataattagttagtcatattctttaaaaactattttttaagttatatgagacctaatacttaattatactaatagcactataatacagaagaaaatattaagtaattgcattttaacaattctcatatattattattattattattnnnnnnnttattattattattatttgatccttctttgactttgagtgattgatatttgggatattgggatgtatcattcatttgttattggcatccattacactttatatataaagttaatagtttacacaaaaatatacatttaaggctgtgatgagtctgacgatgtaagcacagaaataatatattgaatataatttatataaagaagattgttattgagcactaatagtacttagtatttttaaacatattgtcttacaattagttagtgatactctttaaaagttattatattaaactatatatatgagagtactcgatacttaattaaactaatatcaataataccttttagcatttctcttatataaaatatgatgtacggatggagtcttgtttccccactaacgcttagcagcaagccattactacaatatatattctgatcatatatattaggcttatttgtatcgtaggtccttaaactatataaattttagtaagttggtcttcaaattttattttttgacaaattaatctcaaaactatataagttttagcaagttggtccccaaactttatattttggtaaattaatccctaaacttttatttctttagcaacattaagttctcattattagatattgatatttttattatttattttacttactttaatttatatttttgtgttaaattcaaataatttgatttttttaattttaatactttgagaaaaataattatattaatattttgatctattatattaatattaatattttaatactttannnnnntatattcatatacattaataataagaaaaaaaaagataaatactagcggacacacataatagctagagagaattttagcccctctcatttttatattttaacatttatagtttcttttattgttgatttatgaatatgtggtatagtataattttcataagaaaaagaacaattgaaaatgattaaataataatattattattttataaacaataaaagtaaattatattttcaaatttgtttttaacttatgtttcgcggcgaacctatgaaaatttaccattgttgatgcaaattttaaataatcaataaatatatataattaaaaaattattaaaattatnntaccacatattcataaatcaacaataaaatatactataaatgctaaaatataaaaatgtgagaagctaaaattctctctagttattatatgtgtccgctagtatttatttattttttcttattattaatgtatatgaatataataaattaaagtattaaaatattaatattaatataataaatcaaaaatattcatttaattatttttctcaaagtattaaaattaaaaaaataaaattatttgaatttatcagaaaaacataaattaaagtaagtaaaatagataataaaattatcaatatctaatagtgggaacttaatgttgctaaagaaataaaagtttggggatcaatttacaaaaatataaagtttgaggactaacttgtcaaaacttatatagtttgaagactaatttgtcaaaaaataaattttgaagaccaacttgccaaaacatgtataatttagggacctgcggtacaaataaatttatatattaacatatattatgaagacatcgagtgtgtatatataatatagatgaaaagaaaaaaaatattattttttttggaaatgtaacctaacttccattgataagcaagaaaatccaagttacaattacaatataaccaatttgaaaataggccattctaaatgatctatctatctaagcctaataatttcctagtcaagttgtgtgctgacacattatcatttcaggaaatgtgatttagggaaacattaggaaataaaaacaaagagatttgcacaatttgaacaagatttgagagagaagatatgtccttccacttattcttgatcttgttaaccaaaatttgacaatccaattccactatctctaatgggaagttcacagttatgcaccaagaaaatgcgatatgcaaagccatagcttcggcgtaggggttgaggcccttgcgtaatgagaaacccacaatattgtaattttttcttattaagtttgatacttaaattcattgaaaaagagcaatatattcttgtaaactacataataataacattattgatctctcaaatttgtataatttatataatcatcaatgtgtgtcgataattatatataaaaaggaaatttgtacaagatttttatgttctctatatgatctatacaataattgtaggaattttataatttaaaaaatatatatgatatatatataaatatatagaggtaaaagtatgtacattatacgtaatattaagaatcatataattctattttaaaattaattggtggtgacagagtaatctatattcttatatatgatttaatactctatcatttatttcatgtaaaacacaatacgtatgtataattgaattataattgaatttaaaatcattctatctatatataatatttggttaaactacgtaacattcctcctttatttctttttggtttgatcaaattaacatttaaatattttgattattttttataaaataaaggtatatgagtttttttcttttagaaaatggtggaaatataaaagaaaataataactacatattacgtggatagaatatgagtaatgaaaaaaattattctatgtatgatgctttatgataattaaaaatataacaaaaaattactatcatcaaattaaaaaagaatggttataaaatgagagcaaaaatattgccccaccaaaaagagttccctatatatatattactttgatctatagttttatgattattattatatattaggggataagagataaaattaaataaataacctttaataaaagggataattaaaaaaaaaaaacaaaaataacaaagaaattataaaaatgcagtctctaaagaatttttaatatttttttacaggtttttatattttatttatataaaatataatttttaatttatttttatgctgtattttattattttggtattatcttcttattatttttatttaatttttttatatttttatagaatactataaaaatataaaaaataataaaggaaaaactataaatgtaagaatgtaaatttttgggtgattctacaatacacccttttaaaagggatgtactgatacacccttaacttgtttcgtcatccagaaaaaaaattttggctaattttttttcatattcatgnnnnttatagctatttaagatatcctataaatttttaaaaaattcggaataatttacaatatagaaaacaatgttcaaacagtccattttacacacgtataaaataaaatagtcacccgtgcaacacactatttgaacaaagttttcggtatgttaaaatttt

SEQ ID NO: 15323 - DNA, 3426 bp, Cannabis sativa
ttgttcttcattattctccttatcattgaaaccttttcccactcctctttctcagcatacaaattggatatcatcacataaggaccggattccattggctccaatgccaacaaatcctcagctatctcctcagccatctctacattcccgtaaatttgacaagctccaaataagctttgcaatgaagacaaactcggttgccctggaatcattctgaccatttcccttgcctcctctagttttcctgcccttccgagcacatccaccatacaagaataatgcgcaggagatggttcgatatgatatcttttttccatagaatcgaatattagacggcccatctcaaccattccctttctactgcacgccgtgagaacagaaagaaaagtaactgagtcgggcctttccccttctttctccatttcattgaacaactttatcattgattcatagtccccatggccagcataggcagagattattgctgtccaagcaaattgacttctcctaggtgtatcatcgaaaactctttgagactcgtggatgctaccacgctttgcatacatgtcaagaagagcagctgagataattggatcggtgtttaatccaagttttatcaagtatgaatggcatctttgcccatattttagagatatatcctctgcatcagcaatggcactcaaggcactaccaaaggtataattgttcggcttggacttcgtaactgcaactaaaaacatctgcaaagctttttggtataacccattttgagcacaacccgaaatcagtgaattccatgatgtgatatctttgcggttgagctcttcaaagaatttcaaacaatctcccatggactcaaactttgcatacatggtaatgaggctattgcaaacattttgctctgataaaaatccagtcttgatgcaaaatccatggattgttcttccctctttcgccaactttctaaccgatatggcatagattagtccaacaaatgtaacatcattcggatatacatcatctagtctcatatcattgaagagagacaaggcatcatcttcattcaacgaaatcatcgatgtccaagacactacatttcgtttgtttatagcttgaaaaactagttttgcatcttcaataacatcacacttagaatacgttgagatcaagacattgcaaactgaaacatcagttccatatcctaatttcattgtcaagccatgtatcagtttcccaagcactaaatttctttcatgaccacaagccgaaactgcactcgttaatgagatatgatcaagctccatccttcctttcaccatttcggtgaataacaaaatcgcttctaagccatgatctccttcctgagtatacccagatatcattgcattccaagtaaccaaatcctttttcggcatttcatcaaacaatctccgagcttccaatagacgatcccatctagaatacatggatataagtgcatttccaacaaaaacttcacaatccaaaccaaatttggtaataagacaatgcaactgaattccaaaaagaaaatcttcatgatccgaacaatatgctagaatcgtagtatatgtcacgggatcaaacctgaccccattcaagttcatttgaagagcaaagttcaaaacatcctcactcttctgaaaccctgtaagtatagtgttccaagaaaccacatcaggataacacaaactctcgaaaacacataaagcactttccaactgcccatttttagagtacacattcatcaaagaattagcaaccacagtatacgaaacaaaccctgaagaaatagcatacccatggacttggcagccgattttcagctcacttcgacaggccttaagggcaagagccaccataacttcgtcaacatttccagagaaacccattcgaagcgtgtccttaaagatttgaagactttgatacggaagattcttgtgcaaatagcagagcattgagcgggtaatggatgcattatcggcttcagtactttgatcaaacaaatgatgctcatttctaaaagaatgaatctttataactctaatagaacgttgatatagcaatctactgattatggtgaaattcagttggcgggtaatcatcagaatcttaagaaaaggtagttattttgatctggtcgaataaaatgtagtgcaaaaaaactgagagacaaatgcatttttcacttgcatcaaattttgcctttgattgaaactcaaagttttcatggcaaataatctcaatcccaactgcaaagccattatgattttagcttatcttatgaacctcagaattgtcctacataagaacaagaaagcatataaattagccaaagttattcttaagaattacttcgatctgagttcatgccaatctattctagtctcaacaacacatctcacaagaacactcatcacaatctctctgtatagtttctctcttacaaaaacaaattacaaaatgaatctaaatgctacttatatacttgtccaaccaagtactaaagagacttaactatcctaaacagtaactaatgaccaaaacaaacataagcttaactaaactctaagatggtgtttggttggaagtaatggaaacatagaataggattgagaatagaaattggaattggaatgaaaaatgtttacaaaaatttatcaatacattggaatagggaaaatagtaattacactgcaattcttcaaaatacaaccaaactaagaaaatttgattcatttccattctatttcatttcattacctccaaccaaacaccacctaactatgtagtattgtgtatataagtatgagcatcatcaaaaagcttgtcattttgcagaaacataataaagtttagttgagaaattttatcaaacacataatgaacataaaccataaaaatttcaaaatatacaaatgaaaatacaaatcactatctaatcaatatccatatcaaatacaaactcatcatcaccaaaaccaatatccaaaaatttctcaccttctagaccccgagacccaccctagcacttcgtcgccgtcgccgtcgccgtcgggcaattgtaaaagaagatgatgaagaaaatcgtaagaaggagaaagagagggattttttttaataaataaataaagaataaattggatttttacccctcaagtctatcatatttgtagaattttacactattttcccgaactatacaaattattacaaatatctccttctagttccaattacattcttctaattttttatagagttttttccagctaaattttctcaattatcatctcacttgcactttttttttttgaagaaaagcgatgaaatatattaattcgaggaaaagttagacctcgcggtcattacataataggttccccggaatagaggacaccggaataa

SEQ ID NO: 15324 - DNA, 13873 bp, Cannabis sativa
  modified_base (11288)..(11292): a, c, t, g, unknown or other
  modified_base (12471)..(12472): a, c, t, g, unknown or other
tctctctctctctctctcaacagagacaaaaccaaggaaaacacttaaggttttcatctgatttctaaggttttagcaaagatttgaagaagttctaaccaaggtaagccctagaaactcttacttcttgaattctctaagttctagttggttataacatgtaattttgagctttagaggctgttagggttagaattatttgcagttcagtttctaggttcaatttgagttgaaattgagttcttgatgctagtctttatgtgttatgtggtgaatgaacacgtttgagtttaaacactcaaacttgggtcattaatgacattttccgattaagtgtgcttttcttgatgtggttactttggaaagtattatttgaggttggtacaggtattctagaagttttgatgaggtttggactcaattgggaaagttttgaacttgtttgggttacctggtgcaaactggttaactagttttacaagtcctataaaattgattaaccgaatcaggggtaggtttcccgaacagtttgatttgtcggttcatgttattttaagagccttagatggttgtttcctcgataattagggtattgttatgataattatcgatagcaaaacccttagtaataagtttaggtttcccggattagggttttggcatgttatttatccatttatgtaaatgtgacttagggcatccatccaacacgaggttttccattcaggtcagccaactcacttgaattcagaaacgaggtaagaatagcatagaacatgttatatatgcggttatgtgtatgtgtgatatatatgcatgcttattatgattcatacactaccaacactagtatggtagcaatactaagtgtattggtatagtataggatgtttaaagagtacagtacgatgttatcaatgctagtacgggtaggtacatagtgtacgtggtataacacttagtggtactcgaggtacgggtaggtacatagtgtacgtggtataacacttagtggtactcgtggtataactctttggttagcaaagatgatacgttaattaaaaattactgtagcgcacttaagtatcagggcgttacaacggttattattgattatttatgttatgtttcattttattttataaaacggtttgccaataaggccgttcatactttatcataggcttctcttcgtgaggtgtgaggttgatcatgtgttttgtggtgattctttatttaatatatttagacacattattttaggtgatttaatttaataaaaattgataaattattaaaatatatattatactgttattttaaaaaaatatatcaaattttacatattttatttcataattattaaaaaaaaattactaatcgttcttaataaaaatactataatttatatgttactcattaaatattttattagtttaatattgactagtaaaaatagaataagataatagatttgtgtgtaaataaaatctaaaaacaaatttcgatgaataattaagtagagaaataaaagaaaggacacattattttaagttttctaagactaaataacataaaaaattgaacacgcccctcttgtcggtattacccaaaatgtaaccatggtttatacaaatatatgaaattgttaattgttggttgagtcagagtcatcactcatcaaccacatctacagtcaaaaaagtcaaaatttatattaaatagtaacattatttttgtttttattttttttttaatttttatatgggacactattttaaaaaaaaaaattaaatatccaaattccaacagcatagttgaccaaaagattttataaaaaataaaaaataaaaaataataatttttattcacgtttcacataagagtggttaaaaaaacaaatctaataaaataattttgttaccagtaaccagagcatgctcaaggggcaaaatggtcatataaaaagtctatataggcttgtctgcccctatcaaactcatttcttttgcatatcttcttctttacacactcaatctctctctctctctttctctctctctctcatctcaactctcaatctcatactgttcatttctctctgttgcacctgatcttgatctttctctctctcctttgatcagttccagcaagcgtaatttgtcctgtaagtcttttattttaaatatataatcttttaattttcatgggatgtgtttttatttgagtaatattgtgtttggttcttgggaaaggaggagagggtatgatggaaagattgagtcttttagtttgaagggtttttggatctgaagtttttgctgttcttttattatgtatgaatttgatttgattttatttgtttgtttcttgagaaaactgtggtggtggcttatttttttaatgttgaaaataattagcttaattttttaatggtggtcctagtttttttctgttcgtacaaaccagaacagggaaatttaatctgtttgtgataaaaatttcttctctttccttttcacctaaaaggaaatatgccataaagcaaagctgactgtttactttctaattctttgtaaagagaaagaaaatgaaatttgttttggttttggtttattgatgtatattgctttgtgggttcagttctttttttttttcaagagcaaaaactgtttggcatgaacaaaatgcagttactctctaaagatatgttttcaggaatatttacccgacaagattctttatatgtataaatttctgaaatagttaataaacaaagctggcttttcagttgttttctgctttaagagtgaactaagcttaagtcagataataagatatcatacttttgttctatattagcatattaaatgttcttaacatgaatggagcattgcattccttgtcttggttttcagttattgagtttgcattacttttttcttatggttttaatgtgttcttattcaatatatttgcaggatattagttaaatataaattgaagatcaatcatttgtggtggcatatcaaatattgaagtgaaatagaacaacatgctttggttgagtttgtcagttgatgtgtatcgtaaagttgtgcgcttgaacttatattgcagagttattctgtaaattaatcctttagaggtctttcgttttccaccttagtttagttgtcccttattctaccttccatgggatccgaacacgtttttgtatttgctcctgatatttataggattatctaagtagctgatagttcaaaccttcatttccattaaaatctttctgttagtttttttctcctttgattttaatccatccctttgtactagttctattagtgtttaatcttagtatctcactagcttggtctgataaaccatcgtttcgttgttcgctacttgcttccaatcgttcctcatactcaattcagcattttctgctccttttcaattgtgttttagctgttcgttatcctcctcccttagatttggccaattaaatcgcctagatttagtggttttcgtaaggttcaagcgtagttatggtgtgccaagcagcaagccaaacaagatttcgggcattgaaacatttgaatggaattgcaggaagaccaacgattatagttagagtaattgcatgctttcaacctttgcaggattgccaggtttgtacaaacacacctgtttcgattttagttctctgttaatattttcaatttgttgtataattgagttttgttaacctttttcttttgttatattattctccaggcagaatactttcgtcatttgcttaaacctgttacgtaaattggttccatatttaagtcattgtaccaagctggaagttagagtttttcattttcatttctttgtttcgtaaagacaatttcaaactgaaggaaaatcaatatcattaggtattcctctaacttgatcctttaaatattgtatttgatttagttcatgtttaaatgtttagctttctttttatgtctataggtgattgtttggttggatggttaaggccaaaggttcctggccttcttcgcataactcatctcagcaactccctgatttgatttgtatgagcacgttgcttgaaccaaggcaacaggaatgtttgccgtcacatacaaatcaatgcacgtgcaacttctccacacccgtggcattgccagggtctgccaatcctcatttgcagaattcaaagactgagcagaaaaatgaaggtcacgaccacgggtcacttcaatgtttgcccttggactttcctgccttacttcctaccccaaatccttgtgccaattatggtctcggaagaatggttatgcccaatgcgaaatattcagggccatgtcaaaaggggttccttattttcgatcagtctgagaatcaaacgaggctcttttataactacggttgccctcctatccataattatccaagtcttggcactgcaagactagcgtccgcatacgacgatttggacaaattgggacatgctgcccaaatggatagaaatgatcctaccaagaacatcttacacgaagcatctggtgaaaacgaaggcagtgagatgcacgaagacactgaagaaatcaatgctttactctactctgatgattacgaggaggaggaggatgagagtgacactggcgagtgtggtgatgatgatgatgaagtgacaagtcctgatcactctcctatgcaacttaaaaagggttatgtaaagcgaggtccaattgaggaagatgttgctagttctgatggttcaaggaaaaggcaaaaagtggttgatggtggttataataaatcatctccctcgtacactgccagttcaataaacttggatggatcacacggatatgacaatgatgcaaaatcaagctgtggtgatggtggcggccagattggattagagggatctgattgtactttgggaaacatgaggtccaaaaaggataagattcttcaagtgttgagagttcttgagagtataattcctggagtaaaaggcaaggacccattgttggtcattgatgaagctatagactacttgaggatagcaaagcttaaagccgaaactctaggagtaagctaccaataagttgttttgtgtgttagttactttccattcccttccattttagtaatacttgattatattaaagagtagaaagaaagaagaaagcaaaggtgaattgaaaaaagatgggtagcccaagaattctttggatgaatgattgatgaaatttgaaatgacttggagagtagtagctttgttcccttggtggggtcctccccatctttttatttctctatttatctggaaagagctgtatataatgggccaataaaggaggcaaagtattgggatgatattgcacgctgaggctgattaaaaaaaaaatggggtttattttttttttggcttgttgaccagaaatgattatcttttagcttttggggtattaaagataatcaaaaaagtcacacaaaggtttaaacgcatgggaatggtagtagtagtggtgggctggtgtgctgtaaaataaggcttaccttttcttctctcttaattgttgagaacccctatggatgaagtgcatgcgcgttaggtaactcttggccccactttcacttctttccttttccttttcttttccccatttgattttatgtccttgtcctctctcttcacctctccacgcctgtaatgttggtagaaaaaaaagaaaaaaaaaaaaagaaaagatctttaaaagtattcagaaagtttctggtgttgtgggattgaaagaaggaacctttggagtttggacggtgagtttttgatgatgaatcttgtggggtccactcctctctctctctatctctgattattattattataataataataacagtaatgtaataaagtctagtttgttttgtactttttacacgtgtggtgggaagggggggttaaaaagtcatttgcaggtgcactgtaacttatagtgtggttgggttggtttggcttcacttgaagttgaagaagaagaagaagactgttgaacttgtgaacctgtgaacctgtgactgtgtagtgaagaagacttttttgtctgagtgtgtgggagaagggaagggaaggaagtttgtatttgtttttgtgctgaaatggtatttatggacgtgtcagttttttgtatgtgtgcaaataattgggggtgtgaaaatgtggggttgggaggggtgttgttgttgtggtagtattcttcttgttcttgggtgttgagtagtgatatgtatttggcagttgtgttgttttgatcttgttttttatttgtatccattatgtgtttgtatgtgtttatttcatgggaagaagacttttgttgcttaagattctctgttctttttttgtttttgttttagttttattttattagagctgtctcgtgactctttgttgtatgttgtgtatgtacagtgttgtgggttctgacgaatctagtgtataatcttatatgcacacctatttttttttttattattttaaaattagtactaataattggtgataaatagaggaatggcaatttgattggtcaaatcattttcgacaaaaatgaaacaggtctacgtggctcgcttgccttatttgaaaaatataagtaaataaaattatttttttatttaatttttcagaacataaaatcaagttactatactctatctcagtaaaaaaaaaaaaaaaagagaaaagaaaagatttaaaattgtactaaggcaatgataaccttttttttttgttaaggacggcaatgataactttgaaacaacagtttttgtatatcctttaatttttaatttcttaacaaatagacttacatgggttatgttatttaaactcgtttagtacgatgtattatattgtattattagtgttatttaatacaaactatatttagtattgatttataattaataaattgtgtaaagttataatataatttcaatacactccatccctacatcaactatgagttgggtcacgggtctaggttcgggtctcaagttcagggtcctgggttcgagtatcgggtctcggtcttggtctaggaccgggtcagaaattgagattgactccgaatcttttgtaaatattataatacaagctaatgtgaactatttattatatattaaataatacaacttacattgtattaaatatgttggtcgtaataattaataatatattgctttatttaaatatagtattatttattatttaatacaatacgatacttatacggtatactaaaaaaaccttgagagtttaattgattatttgtttcgagactaaattgctaaaatggaaacaactcaagcctcaagggacttttatggtacaagtattgacaataagctcatgatagcaattatattgtgatcattttcatagtggctataaataagaaaattactttatttaattcaacttttaaaattattatttttggagaaaattacaatgttatttgtacaaaatttgtaagttgggatgttagttaaataattaatgatagacatgcttttaatttgcacactcaaattagtgtaatattaagtaggaattaattacatttatcataatttgaatgtacaaattgggagcgtgcttatccaaacaaaattttttttgttaaaataacttgtggataacttttgtgctaataaagttgtgcatagttaattgtggaggtgtagagttaaattaataagagtatagtgaatgaatgaatgtgcattactgaacaacagtattataaggaaggattttgctttaaaaagtaataattatgtttgtttgtagtagagtagtagctgtggttgtggatacgatttgtgattttgatggccctttatgttacctaattggggctcattattattagctttaagagcctttttcagcactagttgcattgcagtctattaaatctcaaatcttattatgcaatacattttattttaaatgtattcaattcccatttctacattcaagttgcaattacaagtacatttttaaaattattattataataaaaaattccaactaaataatcatataagaaaaataatttaacctgtgaaaaaatggatttaaaaataatatggtaggatatattagaaaaataaaggtacatgtgggaacatctctattggctaaccatttcactttgaataatactggcaatagaagtaacaaaaaatattggattatctatttcataggttacaatttcacttttgtgaagaagatgagacactaacaatttcacttttgtaaagaagatgagacactacagttggataatctgttccattggttagaatttcatatttcatattcaataatactggtgttagtgtggtataaaacacgtctatggaagtaacgaaaaaacatataactacagttagaatatttaggtactcgagcgattttgaagtcactttccatttcctttgagttttgtgagactccgagccttttcgccaccgtcattgctggcacttgtgattcctccgatggtcgtgagactctagtttggtcagaggctttctctcgggttcttccatgaaagtgatggcagattcaacatctacgacctttgttttgggggtctgaaccagagcacacattttcccttctttctcaagttcattaagatgcctcttttgggcatttatggtgctttcagcaatatgtgagcctggaggtggagagacacctagagggtaggggttccctagtccgggagctcatacatttctaggtgcctggaggtttgggagcccctaaggggcctgtattcccagagtttgttggtaaactgctccctgaagagggtatggccccatgctgtctgagaataaccaactatcctcgggctgccctttgtcatggataaatgtttgggattattgcctattcatggagacgtccatattttatgagattttcaatctcatcttttaagcaattatactcattggtagtatacccaatatcaccatgttactcgcatttctttctatgatctctcctatgcttgcacccttgcatattagaggaggcttcctgtaatgaactaaattgcaagtagccctataaatattctcatgagcgtcgatcaagttggtatactctgtatattgggctttatatcctttccatccttttttcagagcttcgctccagctttgaatcttttcacttctcttaattcccaactagcttacgcctaattttggaacttccattttttgattcatttgtgtttgtttgggagtgacactacatccggtttgtgctactcctaaatcataaaaattcgtctatgtgggagcataccctgaggcagttggtctgtagagggtagggggtttgtattgggtcccgggtggcataatcgatggagttagaagctgtagtgcagaagctgaattaatgacgttagctgagagtgtcggagctactctaaaatcttgtgtgtaagcatcttccaaattaatgaaaccttgagccctggttaagaaatcaaaaaagtgtcaaatctctttcttcgtaattctgaccaaagtagggatccaatagctaactgtagggccactaatttcatgttgtcattaactttggtctttgcagctgcttccatcatctgttggacgtagttcttcaggctctctccaagttgctgcttgatgttggtcaatgaagtgacctccatgaaaaaatctttagcagccacaaattgcttccggaacacggactatagatccttccaattttggatagattcggatgacaaactcttccaccaatccttcgcggacatggaaaaagttaaagtgaagcacaaacacttccaatcatcatttacttattctacctgcatcaacctgttgtacttggataggtgtgtcttggggcccgtcatgccctcgtacgattccatttgtggcattatgatattttctggcaactgagcctttataattattcttacacatggctccgaattctcatcttctgaattagatacgactccactttatttttgggccaaacagtccgtgagttttgttagagcaacttttactgtacaagagcttcttgcatttgtcttgaaacctcttattgctctgctaaacatttttgggtatctacaagttcttgttgtagtcgtattacttcaaagtcttgttcttaaaactcttcatattccttgttataatttttgctgtagttattttcgggatccccggccgtctcggttttatcattcatcttcatcaatgagatcatcattgatgtattcttcttgattttggcctttatggattaggcaattatccactttcaacgcttctccatcccttgcggcgcctgcctgagcgttcaccgaagggggtgggttcacgtcatccatggcaacattatctcaaccatcacgaacaggcagtctacttaccgtgtttggagttgcaactactgttatagaataaaatatggttaaaatttcttcaagctctcaatgaaagtactaaaatttttaacgagattttcaaaaaccaattaataaatagattacacttaaagaagaataaattaaagacaaagaaacaagaatttgtacgtggttgggacgttaatgaaccctagtccacgagtcaatattattgagctagaaaagccttgaagtacttttacacaagagtgttcttgcctaagttcaagaaacctaatccttagcacttgatttgagaaatgattttccaaccctttgtatgaagggataatattctatttataggcttgagttggttatgggtgaagccagacccattagggtttaaatgtgttaactaggcgcactcttgggggtaaaatacaatttgtattggctttggccggttaggtaaagcccgatttacgagataactatcatctatacatatagggactgtttggtggtgacaggtgttgtgcgtcgccgtgttagtacaatgaatgttagagaatatgatactggataaaaaattagtttccttttggtggtgcgcatactcctcaagtctgacgtggggaaaaagtccttgatttggtgggatcctatgttaaagggatgctatgtaggattgcttttcgaatgtctctgaatgcctcttcatctaccgtttctagattatcccttgatgaagaaactgatttcttgatgaagaannnnntttcttgatgaagaaatcagtttttttggtaatttttccagtgattttttcagcgacaatgccaattatgacgacttttctagcactgtcagcaactccagcgacttttctaacaccggcagctactccggcgaattttccggcaccgatagtaaactctagaaaagtcatagcaattggcattatcgccggaaaaatcactaagaaactggtttttttggtgatttttccgacgataatgccaattctgatgactttttcgttgtcgatagcaatttcgacgacttttccaacactggaagctactctcgcgcgatttttctagtactgacaaaaaactccggcgactttttcagccccagtgacaactccaacgatcactgtagtttcatttatttatttatttatttttaaaaatatgaaaaaaagtttaatatttttttatggtaattcaaagtggcatatcccatatgtgttaagtttttattttaaatgccatatcttttccaattaagtttttttaccatatttatgtaaactaatatgaagggaattttaatatttttatagtaatttaaaatggcatatctatttatattaagtttttattttaaatgacatactatatactatatgtatgtaaattatttttcccatatttatgtaaatacccattgctaatgatgtgcagttaaagcccattttgggcttaggtagtataatgagcccaatttctgatgggcttcagaaaacaacaatggagcggcagagtatgaagtccacggtgacgagagagtttacatcaagtttcaattttttttttgataattcatcaagtttcaatttggtggtattaaaaagcatttacgaagtgaatatgagactgttttaaaatgtctaaataataaatcgctctaactactcaaaccatccgtaccatacagcactataaaaaaaatacaatttgaaatttttttaaggtacggtcacagtttgaattttttctacaccgtatggtgcaatttatagtttcgaattgttaatatatagttcaaaccgcaccacactgcatatcataaaaatactaatttttatatctatttaggtctaatagtgaaggctcaacccaaagctcactaattattgtattgttgaaacttaatttttttttcatatttnntttcaagtcttatggtatttttgagaggtgttgctcaaactttgttgtatttgtaatagtttaattatttggtgatagcccaaaccgcagaaactgcaccgcactatttgttgcggtgcagtttctacgattatttagttttacgatgcgagtacggtttgagatattagaaaaactacacgtgcaaattgatttgaaaaaatagacaaacaccacaccacccgcaccccgaacacctttaaataatatatacatagacagtttgatttcataaattttgttttgatactttaagatatatacacgattatgttgtcaaaatttaacaaattatgtattgggatatacagtttctatgattttttttttcttaatcaatttaatcacaccaaatagtaatacaacatttatttaattattaaaatcttattatatagttaagaacgaagaagatttcaatgaagattactattttttttttttttaatttactttctcatttaaagagaaaaaaaacacctgtttagatttcagtatatttggtaggaaaattagaggttggaataatttagaattatagatcaagataatgttcctatatcttgtggtatatatagatatggtctactcatttttctctctcttttggatgaaaattcccaagccacatctttactctaaacatttacagaaggggtgatattttttgatctttattatgaaaaaaaataaaatatgtgagaaggtataaatgttaaccaaattgcatttttggtggatccatttacacataaatataatttatagtagtttgattgatcaatcattccatacaggaatgattccttgtgctgccaaacgcttttcaacccagaaaaccacatgtcttgctgttattttcttctcatcaataagaaatggctcaacagtgcttacttcccctccataagaggacaatgaaaaaccttttggacctgttaagtatttaaacatacaccaaaataattaattagtagaatgattaattttaattttattttatttgttaaattatataaaaataatattgaattataaatgttgatcaattaattgttacctgtgaggaccccatcaggaaaaaatgcccaaaatgaatatggattgcctttcttagcaaaggagccttccaactgagtaaatattataaggttaggtacgtataacatttgtttttttaattaagcaataataattattataagaaaattttgcaaattactttaaagggaactaccgatgtattttcgaaataatttttcaattaaattctttcttatgtttatgtacattatagttatttaagatatcctgtaaaattttaagaaattcgaaaatatttaacacgccaaaaacaggatt

SEQ ID NO: 15325 - DNA, 4950 bp, Cannabis sativa
atatgagatatattgataattatctttttctattatacattcacaaaaatagatgcaaaataaatttaattgaaatatacattgttttataattcaactgctcaatatatcctcataagatattgtttacttaataaaacatattatttaccgtattttaggcatgttatttacttaatattaataaggcgtgtaatttactttattttaggatagtaatttttgttgccttatttaagacatgtttaccgtattttaggcacgttgtttaccttattttaaagtacgtttacctaatattgcatgtcgtttacctaaattaatgcatgttgtttacaaatgcatgttgtttacctaataaagcataatgtttaccttattatatggtagtaattttgtttacactatttaagacatgttgtttaccttatttaagacatatcgtttaacttatttagacatgttgtttaccttattttagggcacgctgtttacttaatattgcatgtcgtttacctaaattaaaacatgttatttacctaataaagtatgttgtttacctaatttaaaatacattgtttatctaaaataaatttatgtacataattattaagatggcgaacatggatgttatgacaaaagatattaattaattaatcaacttgaagaatagcaatgaaaaaaatataaatgaattacataattatttttcattaatatttttttatgattgttaagactaacatagatgatgtagtaaacatgatattttcttatttcattcataaagttagaagtctaactatgcatgcatgcaaatgtaattgtaattgtagtagaaaatatttaataagaagagctcaaaaatctctcaagttatttagagaaaataaaaatagaaaaagtgaaaagagtacgatatgtaaaaaaaaaatagaaatgatagactttaaaaaagaaaataaaattaaaaaaaatatatagaatctaatttcctcatagtggtgaggtgatagctgagattcgtgaggaagctatggatgtgatgagaacattgtattcaatcctaaaacgtcgaattgtgaggcacatttgattgctacaaatgccttgcatggctaggaagcataaatacttgttcctgatttgtctctccctctgtaatcactttctttgtatgtcacatttttttctaaataaggacctaaaaatattttttttccctatggcctactaaatttcagggccggtcctgatcacatgtaaataaaatatgatagcataattagtcaaaatagagaattaaatttaagagtgggtgcgtttgatgtttgacgggaggtaatgaaaaagggaaaaaaaaaataataattaagttttattctgttcctttatttgttgaattttaaaccgtggaatgacttttacaagagaatccaaatataatttagattgctcgagtaacagcagcatgaattgcttcgaccaaatgaggcactgtctttgagctcaaaccagccatgctaattctcctgcccaatgtaaatgaaagaacacaaagagtatttataatcaaatatatgaaatattattcaaatttagtaaagacaaaagagtgtgtatgtaaaattagagggaggcctaattacaattagagcaagtcatatatgtcagccacactagccttagaacctgctaatttgactcatacataaaaagcaaaaaaggttttgtttattggttttccctaactgaccatgctacttttacaaaataatacaatgttatttattattacccatcagatgacatgtagatgtggtattctttagtcatgaaggcaatttgatcttggtttaatcctgagagagagtacattcccacctgcctcattatgtgactccaatcaccaggtgtacctgtgaaatttaagacaagatgtttctgacatgaaatttgaaccaagtttggactctggaaatgattttctaccaagttgaaatttcagagtgcatatacaaacatatgaatgtaagagtgcatgattacctaatttctagataaacatcaaactttgcctgcgcatgttgcctccccattccccatacccaactcttatttgatattatttactaaggataataaaaattagaaaaccaaggttgactgacttgcctttatcatgtaaactattaacaagtttttgtcgaatattgacaaggcgttccttcattttcttcaactcgctagtccactcattatacatctccctgcatttaagcatccattgattttcaaggacagctttcagaaaagtcagtcagtgaagacaaacgcacgcacacaaaaacaagtctgctaattaatatccaatttggattttcaccaagaagttttctcatgtgtgaagagctaccagaaagtcatgcatttcagaccaggaaatggcctttctttcataaaatcttctttaccaaaaatacacaaacctaatgttagataaggaaatgaaattctaactaatttattattgttgctcttgttggcctgctctatgcatgtcaaagcagatcattattaaaaataactcaatttcctaattcagattagtgatacaaggaagaaacaaaatgagtttgcatcaaaaaaatacctgtccttgaggatagcagtcactatggaagctccgtgaataggtgggttagaatacatgggtcttatcacaagtttcaactggccctcaacattgatagccacttcagctgtcttgcaaacctaccaaaaggaagttcccgtcaaacattccaaacgataaagccattgaagtaatttggaaaagagtttagaaatgagcaagtataaacttatgcagtgctaaaataagaatgacatgtcctcaaaaatatataaatgttgtattaaaatgacaataatttcggtccttacaatgataagtgcaccaacacgttccccatatagtcctatattctttgaataggactgagctataaggctctcaccaccatcagcaacaaataatcgtacagattgtgcatcagcatccaagtttccactaactaaaccctaagatagctcaggagacaaaggttaataaagaaaaataataataatatcaaaagctttgtaccttgttcttggtagagaaaaattccttgacccaatgttcgagtaccaaaggcgatactctccttgaaatgttctaaatttaaatgaattgtagtctacctgataagcagaatcgaaaaatggtaagagcccattagatcttatcaactgacgtatttgttcccactcctgaattgtaggatcaacaccagttggattatgaccacatgcttggagaagcacaatagatccagcaggtgcagaagagaggtcttccaacaaacctgtatccagagccaagacaatgagttcaactctcagtcaaacttagccttgtggatcatttaagtagcctcatcagaagtggtgaacaaattcatccaaaaaaaaaaaaacaaagtagcctcaaatatatagacaatactccagaccttgaaggtccagcccatgcgttgctaggtcgtagtatcgatacgtcttcacaactagaccaactgaagagaaaaaatttgggtggttggaatacgtaggctcaggtatatatactgacttctgcataggaaatgacaatgaaaaccatgaatgctgcattggtaccaaccaaaatgaacgcaaaaaaatgaaaatttaaagtatgtacagtacttgatggtaatgcttagccaagaactcagctccaactctaagggagccacaaccagctacacactggacagtggtcactctgttttctttgatagctgggctacttccagacaagtgaaatatataacagaagaagaaaaccattaaactttctgattcagagaaaactattcagttggaaatgtgtattcttaagtatacttatctgaccaacaaaaagaaaaatgaaaaagaaggtagcttaggacttttatacctctcgacacccaaaattagtttagagctcaattcattgaattctggtattccagttataggaagatattccttatccctggacctacaccagtgttcatacaaaatcatattgcaacttgaaacaaaacaaaacaaaataaaataaaatgtctaaaagaaaacgtacaggtcattgactagaagctcctctgctcgtctaactacattcaaaacaaagggttttccctcctattgtgccacaagaatcaaaccacattcaggttttttttttctttctattactttgaataagcagagttcatgatatagattgtgtattgcaacaacaacaacaacaaaatagaaaatggtattagattagatgagttcatttctattaattgaattgaatttgtgcatgatcaaagcagtagagctagctttacttctattctactagttgtgaaaaaaaatataagattaagaacacacctcagttctataaactccaatacccagattgagctttaatggacttgggtcttgtctgcaagcagccataacctgtatatatagttgaaacttgaaatgaggattataagttgaaagtagaagggatttgataaaatcgaagtagaagattcttacggcatagactaggggttcaggagctaagggaacatctgaaaacgcagattcaccattttgagagtcggagcaaaattccggagactccatggccataacattaactcacatgtgtgtcccaacgaaaatttgggtaaactttacgtattttagaagaccacctaatttgtaactaaattaaatctaattttatattgaaatttttacatcaaaaatccaatttactcaatttattacaaaaaaacccctacacgcttacatcatcatttttacctttcctctttcttttattac

SEQ ID NO: 15326 - DNA, 5932 bp, Cannabis sativa
aattttgaatcacatataaacaatgaattgaatattttggtgcatgattttattactaattagtaattaccagccactcccgatggccttgtttgccatccaaatcgagaactttaaccgctacagattgagctttcaaaccaggcctgaccttatcatcaatgaaccctttatacacttgtccaaaaccaccttcaccaagaaagttagtcttagagaagttgtatgtgatgttcttgagctctttatgtgtaaaaatatgaatatttgacccaaaaagtgtactcgatagatcactcatgagagataccatagatgagttacttaaatcggaaagtgacaatctctgagaacttgtatcttttgaagaagctggaaatctggtctctgttgggactgtaactttctgaggcttcatacatgaaggcaagagcgacttgattatgatcttcttaagaatcatattttgttttcttaatcttaattatctatgctttgaactatgattatgtatgtagtgtgtggctagctagttaattatatagggagctgataaaatatgtatataaaattaagggattttggaatcatgaataaaatgagggtgtgtggtgtggggggtagaaataggtttgagtttagaagacttgataatgaagtcaatgactcaatgataaatccataaagcaaactctttgataattatatattaattaatacatctatgtgtcttcacaattatatattctcataccattagtacctaatatataatataatatatatatatatggccagctctactatttacaaatatatgcaattaataaattgtagtagttctgttgtttgatcgaatagatgtaaaaggagtacaccaagtctaatgtttggaaaagtagagagaaaaaaattcaatggtatccatagactttgatcaatatcgacccaacatgctttattaactaaagtgttttgtgttttgcaaattttgtgttgatgtcacaaaactatactttctaggtaatttcttttgttgttccgacttttggagaccttcgacaacaacaacctagccaaggtgaactaatataataccacaggccagtttctagaataataataattaattgatttttaactgtttattttattattaaagtaataataatttcttgtttccttaacctatacgtataaggtttaacttattccatttgggttattgatggtaatctctatgtattattaaattgaaaatcaatattgtatgtgatttttgtagttcctccaattaaaatgtatgtatatatccatgataaaattgcatcacacgtgaaaataatgatcataatatataatacgaaaaattattcacgatttaatacactaattcacttataggttaataattttttaagcaagtataataattaaacatttccatcagaaaatagttaaacatggttaacctactccaattaattattgatggtaatttaactaataactattcattaatatataattaaaaaagttccaagttccaaaaggaaaaattatatgtatctctccatcatgaaaatcacgttacatataattaatatatttatatatatattaacgatctaatgttacatttaatctaaggttttgtaactagataatatattaaccgaaattttaaataaggtagaagtgttggatcaatcaatagaggagatcttattatatattagggtcgtctttaagcataaagaggttactttttaaggtcccaaaataaaaatgaaaaggcttcattctgtttttatttaattaaacttaagtgtactttgaaccaaaattgtctacaattggattgattaaggcatatgacacattataagtgatgtgggttcaaatcttgtgtggcagtacccttttgaatttgttttaatgttttgctacagccaatccaattatatatatacttaaagatttatttaaattaatttttcattctactttttcttttgaaaattttcacttttattaatttaaactctatttttttttaacaacttttcattttgtaagctcttttcgatatttttttttttccatggtccaccctccacaatcacacatatttagtattgtgggaaaaaaaatcattaatttaatcatcaaagtatattcataacaacatatattgtactttctgtaaatattattaatttgatttgattgaaaagtttggttaaaatcttaaaaatagtcttctgctttggttttttttttaatataggtaaaaatgaattttgtgttagggctccaaagtttaaatcactttatgccataatatatttagggcaatcctgcctattacagcactaagtattaattcgtcctttcttaaatctatttgatctaattataacggactgatcatccaattataattgaccgaaaaatattaaatatccaattgtaattggattgacgctaattttgaatatccaattaaatcggatcagacgttagatgggaaatccaaaaattcagttaaacatccaatattttcatttaatttagaatctttagatgaataattaaatcttatgatgtcatacttaaaatatatacgtatatatgaaaattaaaattatatttacgtggcataatcccaatattttaagtttgtaagtagcataattctaatgtttaaatttacggtttgagttgctacaataattttaatgtgggttgttatgtagattttgattgcgattaaagtcgatccattagttactatatgagtttttatgcatccgtgaaaataaaaaaaaattaaaaaaaaaaaaaaaaactattttaaggtgtaaaaataaaaaattctataaattattcaaaaaatttctaaaatttacaaaaatatcttacttaactatatcatatatccatcaacaataaatagctaacaaatagtatataattgaactttttttaatatatatttatattatacgaaatgactgatcatcgcgggtcaagcagggagctgcaatttgcaaacacaaaatcaacctttcttacgtgaccaatatttattaattatttacggccaaagaaaataaaaattatgtacgtgaccttaaattttccaaagtaaattataaatattagaagtctttgttaaatggatttcgagtgacatcttttctgctgacgactgttgaaacttatagcataaaatgaggtctataattttaacctattatttcaaattgtttctttgccaatttttgtttttgctcggcattttttatattattaattattttgtggaagttttttctcggaattaattattgttactttgtctgttatgaatttgtttgttagctttgtcaatattctatggaaattgttttatggacgaaatgttccatgtaataatgcaactaaaccaatgtattatttatttttctaggaaagaaaatgaaaataaagtttagtaattgtgacgttttatatttgtttttgggcgacaaatgagagtctgctatgccactagcttcgaatttaaactagtttttcttccaaggaaatgatgagtctacaaacaaatctatatattagttcattatatttagtaaaaggaggcaagccgataaaagccttcacatttaaggtaatcatttcagggttgcaccaacccatttttgttttttatttcctttcaaatgacaaaaaagtcagttgagagattttctttttttgatggaacagtcaggagatttttttataatgttagtataaataataattgaagtgaacattttcaattatataggttcgattagtaaactccaatagagaaactcgatcaagtgattataactaatggtggtgctgtcatagtagaaaacgtttgtgaggagactagatcaagttgatgtgtggtcaatttttagctgcctctttaatgggaatcggaggaaaataaattaaaatgtaaatacagtttcagggctaaataagagactactcattatcatcattaaaaaagatttatttggaagattttacttgacgatgtcaattaatagattagtgcgcttaaattttcttgtctatttttcattatagccagtttgtttagaatgatttaggcctaaaatgggcgaaattttcacacgtggtatagcttcaatttgcacaatactactaattaatttataatcctagaaagtaacaaaatttccctttttttatttatattaaatgtacaatttttgaatgaaaaatataaaacatcacaaaaaggcagaaattatgaatagaaatgatttgacatcatgaattgaatggtttgaaatattagtgcagtctgttatagctttataataagttcatttcgatgctttagaagtcgttaaggtcttcacgttaattgacaaaatttatattgcaaacgactgaaatcttatttgattttctaaaaaaaagatagccaagatacattgatttttgtaatttgcaccaaacgatacaaaaaaaatccattagtgatgggtccaatgagaaacatatttggctacagtagaaatttcaaagcacattttttttttagaaattaatttcaaaacacattctaactattaattttaatggtcagaaaacaaggacagagaaatatttggtcatttctttgtgatgctgaaattcaccaacccaatttcgattagattccttaaattcctaaagagaaaaaccaaaaaagaaatgtttatggcttacagctaagttgaaagtttaaaagtatgcttcacctgtctaataatataattatctgatcggtcaaaattaacgtgtccacttcataatcttcaaataaaaacaaatagtgagtaaaagctgcagaaaaattcgagcaaggatgacttctgttcataccattactataaatttttctcaactattttcagtttagacaataaacatataagaagaagaaaaacaatgataacaattgaggaaaacttgtataagttacctgatttttattttcacaagggaacaataataataaaaattaatagactacaggagcttcaaactgtgaagcataatttataactgaattagaacaattcactctataaatcccaaaaaagaaaattaaaaaataaattaaaattaaagactcaaaattatagaggggaaaatgaacaatattgacaaaatccatgaggcttgaatacagaccaagcagctccaattgggggtgatggtgaagcaaaattttaataggcaaaatttcctcctcaaatttacaactgcgtgcgttacaaacaaaaaggcagagaatgagcaaccgtgcaaaaatatttatgtaaggggaaataaaattgatctctttaaatataataggagtgttttttatacctcattcaaaagacagccgaaagaaagaaaaaaatatgtacacacaaaatccctgcaagttttactggaaaatgttataaaagaagagtaagaagtttaacagagacatttgcataatggtttatggttacctttggcaaacaaaaacgcattgccatgatacaggacagaatgatgttatgtggagagcaagcaatttcgaccaacaactttacgatgctatctgaaaacaaggctgccattctggtgaacccttaagttttcaatgaaggactgatagaatgatttcaatgcctttatatcacaaccctgagagaaattaataaatagatcagtatcagaatcagagatgaaattaagtgaatatgtgatctcaatacttgaaaaaattaattaaaaaagaaactcttatcagtaagttgctactgatatttcccaataaagctttggttgcatttcactaaatcatagttgaaacttgaaagaatttctacactta

SEQ ID NO: 15327 - DNA, 5611 bp, Cannabis sativa
acagtggcggaaccaactcacttacttaaggggataatataaaaggggttttgatgaaatacaaaaattttatgaggacaaaaatgcaattgtcaaaggacaaaaatgggaaaaaaatatagggacaaaagtaaaaataatcaaacctttttatacaaaatataatttataataaattgagtggggtcatgtgtcctcatatgacccttcatgtggctcgcagggtcgggtgtgggctaaagcggattatacctacgtcaagggcccacccaacccaaaaaccttataattattttttttaaaataatttatagtattttcaaaaatactatatatttatttcatcaaggccaataatattttttaatcctaaagcctacaaatttttagggtcggccctagtggctcggcctcgactttcacattcctaaatatagtgtcacaaatactttaaagaaaataatctaatttgcgactcaactaagatttttattgggcaattaaactcttttttactttatatgcatcaatactatcttcgtgtgatatttgtatccacatttttgtgtatctcccacatgacttatttgtaatagacattgttccattttaatgatcatttaatcaattgatttgaaaaaaagacactaaaataaattaataaaacctagttctttagtagatgccaagctggctctaaaccattgaagtttttgaagactgagatgttataattaaatgtttgtttaataactttttcataacactaattcttaaaacttttcaataaaaaataatatagcttattaagtggatttaagaaagttcaaaatccaactaattgactatttctcttttgaggaaaaaagttaactttttttccatgaagagaattaaatatactatcttttatttgaacggataatattggattatttattaatttatggttatcataagtaaaataaaaaatgtacatatatactaatactactaccaaagacatggctaaaaagtaattaaacattatttattttaaatgtttaatactaattaaaaaaaaaacctaaatacaattgatatactttgtataccaaatataattttaccaagaaagggtcacacctcatatgtacaattatatgaagatatggtccaaaaagacaatataacataagtatttttctaaattttgtcttctagtctaacaaacaaacctcccttacacacacacccaagaaaatgtgttttattttttagttttaagattaatcactaaccaattataacatgcttatttaatacaatatttttgttaatattattattatgattagtataaatacaatttcaaaagatgtgttttgtaaaaattattgatctgtttttttttatttacaaaatattaaattgaacactatattttctaaaatagtacaaaacagtacattgaactaattttttgtcaaataaaaattaataataatttaatcttgttataataaaattaagtatattttctacatttgttcaagctatattaattgtcttcaattatataaaaaaaattattaaaaaatatcaagtcttattttttatttaacaaaataaaaaatttaataatttaaataatattaactttaatattagagctaaccaaattttattgttcactcaaaagagaaaaaaaaaacaaacagctcagctcatcttattcttgagtggatgacatgttgggtatgggtcaatttggcaagattgaaataattcttttttgctgatacttgaaagatgtgatgtgggattttatttgttaatataaaataaaaaaaaaattatatatgtatttatacacacgtttagactgtcacacataatggtttgaaattaaaactgtcttaataataaaaacttaatcagtttccactatatttatgtattttatattaatctttatcttatcctgttgtggtaaattttaatttaaatatgattttttttttccacaaacaaacaaattttataataacttaagttaaaccagaacaactaacaatgtgactttgaatctggattagtgtataacttttcagactttacctaatgaatgaccaaaatttacagctaaccttttagcttaagcttgagtaaaatgtatttgtatttgtattaggttaattaattaattagttttattattaattacattagttgttattaattaatcaaaggtgagttgttcctggtccttatttactattctattcttttttttaaaagaaaaagctaaatagaattttattgtgaatttaacatatactaaattatatctctaaattttttaagttgttaaaatttttaagagattgttgaattcaaaaatttatgtttaattttatttaattttactaacgtgagaattgctcaattactaaattgtgcctccaaactttgatatttattcaattatacttctctaattttgatatatactaaattgtactcttaaaatttcatctatgttaaaatttctttagtaaaatttgataaaaatcgtttaatttaacaatcttaatagttcaaagcacaccgatacacttttttacatgtggaggcagattttttttttttaattttaaaaaatgaaaaaaaaataataaaaagctgaaagcatgaaactgccaaacggagttaccttgtgagccacgtttctagccttaatttcattccaaaaacctgtatttaaagccctatgttttaaagaacacaccttttttttttttcttaacaacatctttgaatctctcccttttaaaacctcttctcacttccttcatatctttccctttcctttctgggttctgttaagtccttattgattttgagaaatttggtttattgatcaattttctgtctcaaagttttgaactttaacgcttatttgagaaaacccatttcagaaattagtgaaaaaagaaagaaaggaaggctttttagaaaaagaaaatcaaagaaaaatggaaaataaatcaggggtttgtaaagaagatcatgagttgatggaattaccacctggatttcgatttcacccaactgatgaagaactcatatctcactacttatctcccaaagttctcaacaatcgattctcagctagagctattggtgaggttgatttgaacaagtgtgagccatgggatttgccttgtaagttgtttttgtatttttattttcccatgtctgtttctgtttggttctcaagaaaaaaaaaacaacttttttctttaaaatctaaccttttttttcttttgtttaatgaagggagagctaaaatgggtgaaaaagaatggtactttttctgtcaaagggatagaaaatacccaactggtttaagaaccaatagagctacagaagcagggtattggaaagccacaggaaaagataaagaaattttcaaaggaaaaacacttgttgggatgaagaaaactcttgttttctacaaaggaagagccccaaaaggagaaaaatccaattgggttatgcacgaatatagattagaaggaaaatactctgtttataatctctcaagagaaactaaggtaatattatcaataataacacacaattcaattcatttattttcttcagttatgggattatttaatttgttgtactaataaaaatgatttcttttttgtcagaatgagtgggtgatttgcagaatctttcaaaagagttgtggtggtaaaaaaactcatatttcagggttggtgagactaagctcttatggttctttactacctccattaatggagtcatctcctccatataacaacgacccaagaaccaccacagtcactaatacaagtagtaacaacagtactgcaactcacgtgacctgcttctccgatccaatggaggatcagaaaagtcaacaacatcaaaccatgaataacaacaatattcaaagcttcaacaatcatcatcatcatcatcagaactctctcttctcacataatcaaatcataatccaagaaagatttgggaatttacaatacccagattctcttttgatgcaagaagactcgattttgagtatgttgatcgagaataataataatcaagctccggaaatgaaactatgtcgttcgtccaaaacagagtttgaaacagagtttcgaataaacgacaggtcgtttgatgagcaaaacgacccgtcgtcttctgttggtcctgttgacttggactgtctctggaattattgaagatatatgtgaacaaaaatattgttcatttaaaattattactatgtatagattttattattgggtccatataatatttcttggtaagtttatttttatatatatagaaaaaaaataagaaaaaaaaagattattatatgtataatagggaattaattaattaattcatatatgttttaggtggtgcgtttgtaaaattgggttgtatacaaaagcattcataacttggaatttgattatatttatattaattaaaaatactaagtaaatatttgctttgtctatattcattttaaattgtgttttatatatttatatataagaaagtcatcaataaatggtgaattaatttctttggaatatttatatataagaaaattattttatttttgttaattcattcacccaaaaaaaaagatagtagattattttcaaaaaaatatatataaataaataaaaagaaaaattatgagtctcatgagttaggccaccaacctatagagttcacagtgtttaaaacataaataacaaaagtagaagataatttttaatttccccaaaatttatattctataattacactaaaataaaagcaagtttaagcttcaccctaatataaaaatgcttctatatacatatatacatacacatatacacgtttatttgagtttcctacttttataatataatgttacaatttacatactagtattttaaaagacgtataataccatctctagtacaagaatttatccttatctctcttttttattattattattattattgtaaggaaattaaattgataattatgaactttataattttggttaagaataatattcctttgatatttagaaattaaagtgtaataattacataggcaaattagattgcaccacatcgtatcatacaagatatatagttatagatactaaatatgtattcttttctatccaatattagacggtattctatactagaaagatatataaatcaagagaaagaaaaaacaaatttgtttattatcaaaatatataaataaatatctttatatttagttctattttttatctaaaaaaatatatatagaattatgtaaaaattttaaaaatattttttatattttatttataattttacagctattaatttttttttaataaaaatactcttgtaaagtttaaaattataaaaatacattttgcttcacaaaaagtaagaaaataacaaaaaaaatcaatctcgcgatataactataaaataattaaaaataattaaataaaaaagtttaaagagaaagaaatttttccatattgatgtatttttatatttttttttttaaa

SEQ ID NO: 15328 - DNA, 3399 bp, Cannabis sativa
atcaaattctaaatctataggcatggaaaactctctaaattattcaaattgacagccactaactaatttctagagctatataagaacagaaactgttaatattaggagcaaaaacacaaccgtggtggtgtttaggattttggtctatgaaaacagcccaatgattgtataatacaaaataatttcagggattgttgaatgttttggttagataggaacaacaaaatcctacagctcagcaatcaaaaccaacaactatctacttgtatgtcttttttcttctattttattggttactttaatgtcaaagttaccacccatacttaatgtccaggtagcaaattcaaatctgttagcggtttttctgtcatttgacaacataaagtaaacatcgatcatatagatgaataagtgattcttctcagtcacattccttcatgacaacttaaaggaaacctcaaatctatagatctataagaagtttgtcaaatcctgtataaaagtccattgataagttaagaaccacgtcatggtttcagaagatgacacatcaaatcaatcacaaccaacccataaataaactaatacaaagaatataagggtcactcttggtcttgtgattcttatgtttacaattgacttcatttgtgccaagacaagtgctggactagactatccagatatattctcaattttcaatattctcaagcaagcataacaaactaccattacagattatcatgagatgatccaaagctatagagccaacatacaaaggcagccagaaaaagccactgatatcttggataactcttactctcatgactcaatcgataacatgatatcactggtggtatcataaacaacagaatacatatatgaaagtatttcaatattaaagaccaacaaacaaatttaacaattaaaaaataatcaattaatccactgtaatataggaaatatggcaattaatttctaaatgaaaagtgatacattcaaactcatagaatttaatatgataaggtatttcaaatatttcaaagtgaaacactaataatatcaattaggagaaattctaaagaaaatacaaaatcatacctcaaaaataacgacatcaatccactatatccaagtattgcttggaatgttgaagatataataatagccccttgtaactccttcatgatatgcttgaaactctgccatgtcaaatgagtttaacaaacctttaactcctccatattatacagacgtgtagaagttaatgattgttaaagaaaactagaatagcatgccaaatgaaatgaaagtaagctagaaaaggtagtactaaaggaaaagctaaagcacttcctataattattgcaaaaagacaagataaaagccataagtttctccaaataagtgggtggttacagtcaatatcatagacaaggaaaaaaaagctactgttaactgattatgatttatgagattatgtcattcaaatttcaatattaaattacattttgcaaattgtaccaactcagacactaagaaacttaaaactcctacagcttacctatattaatttttaatcaaatactatcgaaacatgaaacttcaagtattcaaaatatcaagctaaaaaacattcaacgaaccctgttatctccatcattagacaaacattacagaaaaatatacaatcggccgataacttttcattacagaaatgaattttaggcatttgataaacatagcaaaaaaggaccacataacagttgcttattgtaacacaaaaaatacataagaattagaaacatacatttccattgagtcctcgaaattccggggagttgattatagctaaggcaggagcaaggtaaacaaatgatggaccctgtatcaacggtaacctcgatccgaaagaggtatgcaacaaagtggtcactccagaaacaaagagcactgttgataccacatttgcagtatcctcctacacccactaaatcatgtcagataaaactacaaagcaatgtaaatattatctttcttatatagaaatcattcccaaaagaaaaaagaaagtatgaaactcacaggagtgccacccattgccggaactataacaagtggggtgagaattaacgaacccaatattgacaagtaatgctggaacccatatagaccaattggaactgaaatatagcatattccattaatagttaaactcaaatgataaaaaaaaaatcaaaattttcacaaaaaccatttcaaattcccatttcaaaaaagttatcttttcagaaatatctgtcaaaagcgatactcaccaagcccaggtgaatctctaagctcatacttcaaatgcgaatgcctagccatagctccatcatcatcaacactcagcggcaaaacatcgataccttcatcattccgagcttgcctacgtggctgcgacggaggttgatcagaagccggaaccgcagcaccattcccattagcagaatgtttagggattccatcaacttccctcctcttcttcaccgtcttctctttctccgccgaagcctgtggaggcgcggctggcgttgtaacttgagccttaacggactcaacccgaccattagcagttggtcgaaccctacctgcctcaagatcaggctgagcttcctgctctctcggcctagacggcaaagaaatctgaccagaatcactggcattggtctcaccagaaaatttaggcctgaaaccagttcgtttagcccaagaagaaggcggcattgcagaagactccggcgccggtggccacggaccaggacgcggtcgttgttgtttggggtcggagtttgacatagcgaagaatcaaaataaggaaaaaaaaaaacaaaaactagcagggctaagaagccatagctttgaggaatctttagatctgaaactccttttcttcttcttcttcgacctagggctccgaacaaacccttgattttttttttccaaaaaaaaaaaaacagaattaagaaaatgcagtaaagtagagaacttttgaattgaggaaataggttttcaacaaaaaaaacaatggaagcaatacagagtagtaactactgctactactactactagccctagagagagagagaagagtgtgtgcaaaaatggaggagagagaaagacagtgaaaaatgagtgagagacaactaattctctttctctctctatatatatttattattaattaattaattatttctatttatagatattatattttaattctaattaattattgtaataatctctttcttttgtaagggtatataataattttttgaatgtttttatattgtattgtagtgtaatttgtgatagggtaaatactattttagacctctcttttacaaaagttactaa

SEQ ID NO: 15329 - DNA, 13533 bp, Cannabis sativa
caaactccttcagcaaagaacaaaagaatcattaagtatattggtgcaagttataatatttgattacagaagtgaactaagccaatgttgaacaatttctcgcttagccaatgttgaactacattttaagcatttacatgagtttctttattaacatccatcagccacataagacttcaatcatgcctttaaacttttctgaccgttaaaatttttcagtgaactattgagattgttgaatttaaagaaatttgtccaatttcatttaattttactaattcagtaattgcttatgtactaaatcatgctccctaaactttgatatctgccaaatcatacctctcaaactttaacatgaccaaaccatactccttaaactttcatccatgttagactttttttaattaaaattggataaagatccttaaatccaacaatctcaatagttcaaggtagaattttaaacgaccttaaaagtttaaggagcatgatttagtacatgtaaaagttcaaggaacaaaaatcttaattaaccatagaaaaatattacctttggaatattgtctgaagtggagctcgttcccattcttggaagataataattgtagtagtcccggaagatggcttcagaaagtcgtggtgcttgcaagaacttgcgatgaagagaggctgcaagggtgagtaacttctcaacatgttgaaaaacaccagagagtcgtctaaggtcctcaaatgtctcgcttccaggagataaatcaatcactgaaaacaataaaattggcaaccaccatcattatttattaccaactacatgagaagcaacaggcaaacacgaaaagacaacaaaaccttgtaaagacttcaaaactgatgcaatggtgaggtaaagttgatccattttggtttccatctccttcaagcctccataactggtctggtttaatgtgtctgcagatgctctgaacgcagtacagatcatttgctcgagtaactggtgaggtcgtacagtttcaaggtaatgaagtatctgcagaattttaatgtgtcaatgagaactaaatcacatgtaaagtactaaagaataaaaggttaaatgtttcaaaagaaaacttaaccttttccccttctctattaggatccagaagcggcttctgctcagaagctggtaaagcaggtgaatcattccatatgtttcgccacatatttccttgctcagacattctctttgaaagtcttcctcgaggaggccaatcatcttctgcagaacttttagatgactcgcccttctctacattttcccaatctctaggagagtgccaacgaacaaaatcttcgaagacagcatctggatttgctgctttaaatgccgacatatctgattcaattattaaaagcttgttaaattatgtaagttgtcttgtaggaagaaaggttagtgtgaaataactagtacttaagaaaggaagcacacttttaatgttacagaaaaacacaattttgagaagaaaaaatgtagaaaaaagtatttagtatgattaaaaaatttcgtaatgcaatatcaactgtttagaaaaagagtttaaaagcactacggaaaggaacagaaacatgaatcattcaagttataaacttggctgcaaagaaaatatcaagacaaaaaagaaacaaaattataggaaataaaaacatgcgttcctattgttctgtttaacaacacaattctacggactgatggaatcgaaagaatatagcttatcacctgatgataagatctccttttccaactgagcagaaaagtcctgcaacagaaaaataaaatgaggttcttctaaattaacaagcaaacacacatgataacccctagttgaaggaacataagtataccattcaaacacaatatttttagaaaaataaaagacttctctatgaaaagttccagtacattcacaaatcagtttatagcacaattcctagaagtgtgggcatcaaatcatcaattacaatcgagtgtcctacggagacacctaacacgtacacatccatacacacattaactttatataacaatatacacatgctgattcttaaatgaactgatcggaaccttcataaagcaggttccaatattgctgaacaatgctcaagatttgcctattcaggccttgaagatacccagagcacctgaacaatgctgtacagataccttgaactttgtaaaaaaaatagcaacaaacagccaaggatgtcaaaccccaacgtattgatcttttctatgatccatgtagcatgtatagcatgtagataaaccgtgtgtatgataaattgtatatgcttacaaatgattcgctaaaagcttcaacagcctggagtcgctcttcatgcatgtcttctgtcataagtggtgcctcctatattgattaagagcagaaactatcaactttcaagtccttaaaactgcttagagatagaatgtgataaggtcggcaaagcatcatcagaggtagacatttatagattacctgtgtgtagggcacatgcatgctctgaaatgagtttaaaagtttcatggaccctgccacgccagcagaacccctcctcaaatggtcttccggcttcaaatcaggagacaatacaacactttcaggctcgtcaaataattttcttccaatatcttgtaaatcatttgttgttgttgagctgttaaataaacgagttatgtgtgaccaaatgaaattgtggaacctaaaaacaaaaaatgcaaaacatacatacaaatttcaaagattgcaagcaaaaaatttattgttttgtcccgcacttgtaggtgcacacatgaaagttttacactatattcaaatcccagaatgatgaaaacagtctataactacttttcaacgccacctttggtcaccacaaaagggggaatctaataaacatgatggtcatgaccccaaattcccaattgaaaaatcaatgaaatatactaatcattgaagaggtttatgacttgtacactcccatcttaattgatctttcaacatgtagatgacgcatatcctgaccagaccatattattaaatttccaacatcaaaaccatgaatatactttcctaattacagaataataataataataataataaattaaaaatccagagaatgagttagcatttatgaagaatcccacagagatctcacttgcatagttcacctgtcacgtttcccataaaagttttcggtgggtgtatgcatagttgatgagtcctccccagctatactgtttgcctgcatttttagttcatgtagtatgccactgatgtttagaggaagtatgacatataaagaaaaacgtaattaagagaaaaaaatcaaagcaaaacaaagcatcacagtgaccacaaccttgggagaaagttgatcattgcttccaatacaatcttgaaaatcttcagtcaattcacgctttttctcaatgcatattgcaagctaaataaaaagcagaaaattgagaactttgcattattattattgtatattgtgcatttgcacacctaaatataattaattccataaaactccaacatagagttcacagcattaccatttgtagcttctggttgatcaaacaagtagacaagtcaatggaaccctcgactggcattcgaggcaatgattgtaactcttcccaacaccaccgaacttctcgaacaaattctacccagagtacagcaatagctgattcacatagattaaaaacatattgtcattaaattcttcattccacatgttaatagaagaaaccaaggtgaattctacatgttctagaaaaatttcattttggaaataagttgtacaatgatcttaggtacataccacgtatgttgcagttgccaaaccaaagagaatgtaaacaaaattgtgcaaaaagggattggagaggtgcgcctttaataagtcgtgaagtcttatgctcgccatcagtaaactttgggagcaatccacctgcaacaagccaaaatttgcagtacaagattaaaaagttgcatgaaaatttgtaaaatctcttcaagtgcttcctatccaatgaagcagaccctatagaatgaaggagcaagaaaaactacaaccggacaccataaaaagcatccacatgtcaaacagatggattacttgtgctgtattgtgtctaaaaacataaattcacaagagcacgtgtgaaattactgatagaactcaaataatatttgaaattcctctccttattactcaaaccgtagtacccaaatcagagactaagtgtagaacaatcacaaagaactatacagtagctaattcgagatagccaacctcgccttgtccaaaagaccccttttcaatctgaaaacaaactatttatactctactaatcaccctaacaactaactaatcagttataatcccacacaaacagtcacaacctaagaaactactaattacaagtcacgaagcaacataactaaattagttgttaagtaagggagcctatcaattgcatagacagatgaatcgcttctgttgtgttatgtctaaaaacataatttcacacaagcaagtgtgaaattacttacaaaattatttctctgtgccaaaaggatcttcggacctaatttagattataaaacaagcatacgtgatattgtttaaagacttgctaaagttataatatcaaacaatcatgcccaaaagactgaataattctgtcaaaagagaaacataggaaacaaaacaataataataatatatacaggcagaagaataccctccggaaatagttctttgagcacacgatcaataactgtaggtggaggaataacacttgaggacctcaaattgtcagaacctgggttttcaactgtagaaaatagcacgaaagaaaaatatagatatcaggagtaatctccaactaaaacatacatctaccaaatgcagtttagcatattagataggacataaagttctccataaattaattcagacctgagacaaaatcttccataaactgagcagtgaaggacatatccaatgcatcaactaataggcacaactgcgaagaaaaaccaacccaatttccttgggagccatcatttctgtagcaaaaaacattatcaaactttaaagatatttatatatttataaatggaatacttcttaatagatatcactcattgatagttattaaaagaataactataaacataaaatttagaaatattaaaccattaaaaaaattgtcggaattaaactattaaattttaaaccaatggccaataatagaaaaaaaaaattgagttgctatatttaattaagctacttaaaaaaattaaaaaaattctctctttacactatatagaaattatgtttgtaccaaaaatatttaactcaactttttgtatccctcaacctatggaacaaccccagaccataaggtgatatttttttaattagatagcaaaaattaagcatagaaactcaaatttcctaatagtacgcattcatgaataaatactcacctatttataatgcatccttcatacacatgtgcaaggtcgaaaagcatagaacattatcacattatcttattgatactactcaattctagaaacaagaatgatttattgctaacagcttttacagtttgatttattactaacttttatagttcagtttacaaaaatttaatcaatcaaaatttgaagaaacaacttatcaaaatcatgcaatatttctgaaggatgtggcaaattgtacatatgtctaaccatatgagctaaccaagaaagaataatgtctattttttaaatcaaggtaattctttatagactaagaaagtggcttcttacacatttggagacaaaattggatataagatccacttctcagcttcatggggtgaacaattctcgagttcagccatttccagagagttttcaaccatcttttctgaccacatggcaaccaactcaaatcctgcaggtgatcaaccaaaaaagagggaaaaaatagccatattatgaattatgaaaagcattacatacgtcaacaatgaaagaaaagaaaatgaattcactggcccctcgcataaaaataaaacaaatgaatattgaaaataataaaatagtattgtactccataatgattgttaaagggaaagtgagagataatgtcttcaacagggagtaaataccattttgaattatttcaaagaacattgatatgacaagcctgatccatgatcaaattccttacatactcttagcaataatgtagatcaatctccatcacagggaaaaaatgaattccattttattctatcaccttttatgggatcttctgcagaataccactcactccacggacaattatcatcccactgtgttctgctacgagtatcaccgcgaggactaaacccatcttgagtatcttcaacatccttttcttgaacatcattgtcatcttcatcattgggaagggttctgtatgttagcttcatcgtaaaatggactttgaaaagatgaacagaaaagtccaatgtggagtaggccttcaacatcaaaataaaaaaattactatagttggaaaaagaggaatagggacagtaaaccaacacaagttttgggagcttctaaaataacacttcacatgtttgctggaaatacatggcaagaaaagaacttctaacaacacgagtaaataacatgacataatattcctgtgaaaactatttaaacatttctaggcttgtaaggaaacacaaacctagttcgaaaggagattaccaagttcttacttcttacttactagccatgtcaattgtaattgtgtatgagaaaattaatacaagaggaccaaaataggcacattggaaaaatgaacagaatcattagacattactcagtgtactaaccaagaatgaagtaaatgaacacgttacacgaatgttaatgtgattgtataaaatggaaacttacaaatttagaaacaaacaactcgtataatccttctaaatgcataagttttactgggacctgactgccaatatgatctgcctcaaatcttctagtaaatacagttcccatgttatggatgccaatatatgcttttcgagaaggagcatgcacgggcacaaatgctggccataaactgcatagagaatcatacgagaggtcacaaattactagaaatcaataaatcaaatcaaccagacaacctatcaagcatcaaaagttcacaaaggcaatccaactccttttgatggtaaggaaatatgagtgtatgaaatgaacactattaggtaacactgtattgtacaggtgcattgtagagacagttgaggcatgcattctcccatgctttattaaaatttacacagaaaatatttacgaaaaaaaggatcataccttgaacaattagataaagcaattgcaacagcactcagtagcttgctagcttcgggtgcatcaagaaccactccacttgcactttgaggagcaattacctgattatggatcaagtgtgaaaacagtgaaggcaccatgaataatagacaaagagacagagaaatgttaaaacagagttaagacataccaaaaactccttcaccccaaagcataattgtaggtcatgtgacatggaatcccagttcatagttttgactgtaaaagcagtataacacattattctcctttacaaaccgatgatcaaattacaaatcgttaaataataataataataataataataataatgagtaccatcattgttggaatgaaagtagaattccatggaataacttttcgtgagatccttcaactcagatttgaccctaaataaatcttcagagggctccaactgaactgcattctttttctacaacaaattaaagtgcataacaatcacattggagcaaaatgaaatgtatgaagtaagataacacagtactacttcttcaataaaaactcaaaatgcatttgttcatatggtctacttgtctagtttccaaaccctaccaaaagatttgttcaaaaaaaaaacctaccaaaagattcttaggaccgtcagccatccactgccgacaaattgcctctatatcagatataaacctattaaagaaaacgaaattatccacccaaatgtacaaatcccaatatagaagtccacacataaacctcaaaaacaagctcatatatataaattacgtgagtaagtgagaagaagacttacctttcccatgaagaggcaagagtgaaatcatcaaaatgctcaacctggagagatttcaattatagcgtaaacaatcagtgttcgttagtagaaacagaatttgagtttaaaatagaataaaaagattaatagagaaggaaggaacctcttcttcatgatcttcatcttcaccatcagattcaattttgctagaggaagaagccatgaacgatctgataaagtagaaggtcgatgaaaatgttattataacttatatatatttaagagatttacgtatttatcgaaataatatttaatgtggtttgtagtagtctctctaattgattatgttttgtaaaagttagtgtattgcacttttcaattttgatgaatgataaaatagattttgtattttttaaaatagtataaataagatagtgaattgatttttgttaaaataaatcttaataatgatgctatctaacttagagttgttataataaaagtagttaaattttcgtattaaatattatcatcaaattagttatattaacataaattgtcaaaaattaagctcaaactcctatttataatattttgaaaaatacagagtcaattttatcatttaataaaatagatagtctaatctataaattttataaaacatatggttcaaaatgatatttactttgattttgttatgaataaacttttacactaaaatcagaatgtgaatctcgagatgaatacacactttgagcgatgattttatgaaatttatattttgcactacaaaaatttctttaaagtgtgtaaaagaactttgatagtttcataattttattatcatccctcaattttacatattctttgcacttggattgagtgaggcaggttgaggttatttcaacaacccaacccaattagatcgataaaattttaatccattcacattttattatacaacctaacccataaagtatgagttgagttggattataacccttattttttgcattaaaaaattcaaatatttcttttgatacaagtgcagattgaaccccttccccaaacaatagcccaaattcttccctaacataaaagtttaaacaaaaacaatgtagttatcaaaactccatagtccaaatataaatcttgaaagtctttagttgtctattaagcatagaaattgggtgaataataaggggcaatacacctcctaacctatccccacccccacttaatctccaataaatttggagtagggaaatatccgttgggtatgggaacccattaagtacctattaagattaaaacaataataataataataatgtaatattaatatagcttaaaatgaaaataaaaaaacaaaatattaactttaaaataaacaaatattctaccttttaaaaagcctttattacacaataaagtagaaaaaattaatagcttactttataagtatagctaataactttaatacctaaatggaaactataaatctggatcaagtataggatgggtagtattatttccgacccgccccgtaacccccacttcaggtatataaaattgcaccccacccatgctccattactcattaaggcagataatcctcgtcccattcgaagtgggtacctgtaattacacgtctgataaatcaaattttcatcgctagttgttcgtaataataataaatttaaaaaaaaaatacaacaatatcatattaattgaaagatccacagtcaactaaacgcaacaatataatcacaataatattaacaaagaattcttataagctccacaatcaacactcaacacaacaatattgtcacaataatattttcattaatcatatatattcacaataatacactcataaaacgcattacacatctgaaatcaaaaaacaaatacaataaatacgaacaaaaattgtgatttatggaaattatgaaagtctattgttttttcaaacctttacttctttgtaacactttattaacacatgggttactgtactgattcaccataggcctgaaaataaaagtacatgggtgaagatagttatttcatgataacaaaatgttcaccatctttttacagcaaaagggtattgccctgactttttgtatctacaagtttaagaaaggcttcccatggctcttgccttttcctttagaatatatttttgtatctttccagttgaagtctttggtaaatcttcaaatactactgtcttgggagccatgtaatgaggcaaacgatccctacagaatttgatgatatgatcaacactgacattgttgttatcaaatccttccttaagtgtcacaaaagcacaaggtgtttccccccaaagcttatctgggcgcgccactacagcagcctcgagcactgcttcatggctatacaacacagtctcaacctcaactgtactcacattctcccctcctgatatcaccacatctttctttctatccttaagttgaatataaccatcctcatgtttcacaccaacatccccactacgaaaccatcctccctcgaaagcctcctcagtcgccttcaagtccttaaagtagccactcatcacagtgtttcccctgaacataacctcaccaatagttttgccatcggccttaacactttccatagtcaccgaatctttcacatccatctcctccatcgcaagatggttcaacccttgtcgagctttcaatgcatatcgttcctctggtggcaatgcatcccattctggtttgcatacacaattagtagcagggccataagtctctgtgaggccataaatgtgattcactcgaaaccccatctcttccatcctcgccatcacttggggtggcggcggtgaacctcccgtcatgatctccaccttgtggggaagcgggaggtggatgttgtctttaggtgagttcacaatcatgttcaagacagttggtgcagcaccaaagtgtgtcaccttatgcaaatgtatgttatcaaaaatagctttgggaaagacttttcgtatgcatatgttggtagcgccttgagctgcagccccccatggtagacaccagccattgcaatgaaacatgggcactgaccatagataaacaggccttgtccccatcccgtgaagcaaaactgtggctatagagttcagataggccccgcggtgagtgtaaacgacagctttgggggctgcagttgtgcctgaagtgtagtttatgctgatgggatcccattcactcttaggccgtcttacttcaaagtcataactcccattttccaacaaattattatagttatggtatgagcttgaagtgaagctttcaaaatcggttaataacaccaaagttggaggctttatgtccttttgtgcaagaagatcaagtgctcctagagcagtttctagtaactggggttccacaaagatgagtttggcttctgagtgtgctagcagggttgacaccatggccgagtcatgtcgagcattgagtgtacagagaatcccacccgccattgggacagcaaaatgaagctcatagatttctggtaggttgtaagaaaaggtagccacctgtttgttcaaatcagaatcaaagagattatcaccaataggttttgaaataaaacctcataattcttgtcatggcataacacacttaatatcatatatatatatataaacataccacatctccaggtgaaattcccaattgagtgagagaagaagcaagcttaagacaacgttgataagtttggagccaagtgtatgtgatagagccatagataagagatgtgttgtctctataagctttagaagatctctccaaaaaaccaatgggggatagaggaacatgatttgcagagcattgaactaagccctccattgagttccatgactgaggttcaaaatctttagcagagtgaaaatggtgattctgaacagaattaaaaagtaattatcagttagattagttgtgcatgaaccaactgttagtataaatattgtaattaattttatcaaatagataacaacttaacttaaaaagtgaaaaaatgctaccttacaaaaaagaatgaaaaagtgacaaatgctaaaaagtataaaaatgcttgaaactcataggttggtttgtgtccaaattattcaaagtcattcgactgagtttggttggtttttgtgtattttgttaaacaatcttgtttctcttcaagtagtgtttttttaagaaaaagatgtatctcctaaattcatattaatgaaatttaacttttattaaaaaagaaaaagtaaattacaaaagattaaaaaattctaccatatactttcctaaaagaaagtataaaaagtgtacttgttttagtatttgaaaagtttttaatttatttgtacttattcaaaatattttctttcacatgtaattttttttttattttataggtgtaagtatgaagaagattatttgaatttaaaactactttgtatattataatttatttagaatttttcaaaattttagttgaaaatatgttatactacatgtactaatagccatgcctttcaaagtgaaagttggttaaagaaaactgaattttcacccaaattaagtgaaataaattgataaaatatttaaaaaatcagagtaaataaatatggaaaagaatacctgttgtagttgggtttgggtgttatcgaagaaaagagaagaggagaaagaaggtaagtggatttgtgaagcccaccgtaagcttcctgccaacaccctctgcattttaactctaatattttctcttcaacaaatcacaataataattagaacaagaagaagatgtggacaattcaattgaaacccaatattccaaaaaaaaaaaaaacgtaagacataatatctatacaaaacacaaaatgacaaaatgaaagcacttgtttttatcttgtatttttctattccatttttttttataatatatattttttatataatattgttttttttaccaatttagaggaatttttttttatcaatgtagaggttaaaattgggctcatgcctaattttacatgcgatattttaaaagaatgctcgagtaagattgggttggactatttgactaattatgatggtacgatcacaacatcaagcccaataggcccaaaacaatacagtcaagtcagacattaacattacccatggctcgtcattgagctcacaatgatctgacccgtatacgataccgagtcttatcactcatctaacaacctttgaagtggtcagtcaaact

SEQ ID NO: 15330 - DNA, 8704 bp, Cannabis sativa
  modified_base (1481)..(1481): a, c, t, g, unknown or other
actaaattatgcttcttgaactttcatccatattaaattttttttactaaaattgaataaaagtccttaaattcaacaattttaataattcaataaacatttttaacaaccttcaaaattcaaagaacataatttaatacatgtcaaatttaaagggtaaaattcttaattagcttatttatttttatcaattgccttaattctcttgatctatcatataaatgttgttgactttttaagttaatatgcttaatttgctggataccctttatgaaatgcatttttattggctggcagctccctataggaatatatcatggttggggtcagcacatggctggacttagttggatgattgtgatttttattttttatttttttttattttcaataataataataataataataataaaggaatgatgtagtaatcatcattaatctacagatatttttttatccaaatattaaaatctaaaatacacaatccacctattcagctatttttatcttagctagccataattgggtactgttaaatctaaaatagatcccataaacagatcatgatgcaaagtttataactgttttttttttcaaaattcaacacattaaccacaaaaaaagcatatataaattaatctatgtactattatattctacgtaattaagtggtttaataataaattttaataatttgtaaaaaaataaaaattaaactaaatatggtgatataatcaatatatatatgtatacttacatatcgtccatgaatttggcagcaaccatgacacttgtgatgagcaaacggtgaacattgaatgagttaatgggcaaagaagtttgtttctgagcaaaacggtccaaataaacataagcaactatgtagcaagatgggctgcaattggcatacttgaaaatcctctctaaatagctttgtatagtaattgtgggtcgactcaatccatggaagattgaaattttctgagcttggaattggcagtttatgtcgtttgattcagataccctttggagcaaagaagacagaaatgtgattagacttgtcattacctttgggttttcaagttcagccattgatgatgaaattaaagctatgaacttttttttatctatatatctctttggttaattttgggctagctagtagagaagtgtggtgagagtttttgaatgtttggtttgtggatgtgttgggatatataagaggttttttctttctctttttaacagaggatagagagaatacaattaaggtaataagtggtcgttaaagggtgttggggttgatattttttgtgaccaaaatacccttgagagatagtttgaattgtgaattgtgaattgtgaattgtatatgtatatgtatataagatagagcattgctattaggtaacagtagtgcctagcactttttcgacatgtcgtgttgtgattggctagcgatactccctaaaagctantatattaaattatatgagacttgatacttaattggaccaatagcgatattaacacataaaaaggtactaggtaccacagtaccctttagcatttctgatataagatacttcattgtttagtggggctttggatttaatactctaattttaaaatttaacttaaaaagggtggtattgggttttgagagttgggtaatgatgtttttctttttcttttttgtaattttaaactagggaaagagggaagacttaattaatcatggattaagagaggcgggcttagctatagtgtctttttttctcttttgaaataaatatttttgagggaattttttttttttttttgacaatggtgatgggcatgccatactatcatgtgattacatgtgggaaaaaattgagatagtaatattttttatgtgggtcccataattttacaatgggatcttgcatgtggttgtgattccatacaattgggtgacataacatggatttgttatgttgatccatagcattatactacatgcttcttataattttttttttaactcatactagtatatatgtatacatttatacatatacatgtatatgtatgtatatgtcgcttttttgtcttattaaaacaaagatcaattaaatattcataacaaaacaaatggtaagcttaattataatagtctagtctaataatggtaactcctattactacatacaaaataataatgatataatataatggtaggttttgagttgtgatttaagatttggttcatgtgaagagatcctttgaggttcttatttcatcaaatacatgactaccacttactagaagtcttcaactcatctttacaaaatatttatatacatacacaattcaacaaaaaaaaaaaaaaaagtgtgtgtgtatgtgtgtttaatagtgagtatgctataatattgtgaagtgaagactaaatcttgtagtgaaaggaatcaaagagcaaattaagctaatatatataaatatttatatatatatatatatttatctgtaaacagcaaggagttgaataccacacattcacaaattcatgtcatgaggttgatttgttttgttcgacttttgatatatgctctgtggactacagcctgtgattgcactagataattagatttaagttactcacctatatacaatagtatagtattacttgttttttaggctactgattactttcaatatctaatacaattaagtaatgtatattttagtattagttatgagagtacatacataaaaatttaccctgaaatttcctcacctaccaattaatttagttgtgtcattatatataatctcaatatgtgcatttatagatgaaatatattaatatattggtactatactatgtatttttacaaaatatatcttatagtttttttttttttgaaaaaaagttatcttatagtttcgatttattggatacctttacatttgactttaataaatcacatggtactctaaattacaacaatttttttatgtatattttcatatatatttgtagaaaaatctaaattatttgtacttagtgtaattttatttcataatatttgtaactagtgttgtaaatatgggtcaagttttttaacatgacacgaaatcagcacacatccagaaggcacgagtacgattatgcacaaaaaaatatatgcttggtcacgacatgctacgatgctatgaattgtactacaaaaaagggaaccttttatccaattttttacatttaagaaaaataaaaagtagaataaaagatatgtagaaacattttatcccacttttgtatttggtgcctataagatgaagctagagaaattattaaacaagggtcgtatttggtgtgacattaaaaaataatcttttaaacaaagttactattgaaaaaataaatcaagataaaaatttcaatggccatccaaacacaccccttatgggtgaagggaaaagctactatcctagtttggaccaaggaccatgtttggctggtcactaaaaaaacacattttctaagcctttttccataacaaaaatcaaacaggcctcaaggaattaccttttctcgcagttatgcccactctttgacacacacttcacttcatctttgtcataagtgacactcgaaggacttcaaccacaaactaggtacattttccactacaaattttagaattttattttttcttctcaaagatcagcattattcttctttttttcacattatatacatctataaaatttattatttttataaaccaaacaaaatggtgagtttgtgaaggggttggtttggattcaattttttgggagtgagtttgtttagatttattgtttgccatttatgttggattttaagcttgaaataggtatatatatactatgataaatatgtgtgcgcttaattttttaataagatttatttttttgatgatgattaataagatttattaaaatgttttttgtgatatagttatcttttcaattagtctgaatttaacaataatgttagtattaatattttttttcaattataatattttattgtgatcaatatatgtttattaaccaattagaaattaaaatagggtacaagataactttattacttaaagcatctttcagatcaaaagatctaatatattgatattaagaagttttaagttatgtaactatagtgtaatgtaaataatattctgtgtttgtttaaacttaattgtggataaattatgtgactttgtggtgagtttaattttgatttttaagaggctttaagagtattattgtaagtagttactaattattatattattacgtagttattagttaaatttgtatgagttacttattaatattagaacttaatttttattgaaattttttataatgcatttaatattgtaggtgtgaatcactattataatgcatttatttatagttattctaaaagatcacaagacaagtgaaatatgtagcttttttttcttatttgaatatcttttgtatgattaaattaacaattaatctaaaaatttggaaaaacctttagtgtctttttattttgtattctagaactttgtagaaaatttaaattctttaaaattgtagtaaataaaatatagttatactaaactcaaatagattttagaaaactttttaatctaaaagagtaattagtttttaaaatgatctagattatattgatattgtgaactttttagttgtgtgactattgtctactaactataaaaataatttttaattatgtttgtttaaatttaaaagtagatataatattgatcttgtttttggccaataacactaagtcttgaaagtaatttagacttaattaaatgcaatgagaatatgtctaaaataaagcataaactaagaacacaaaattttatataggttcagtctcatttatttagtaatagcctactcatgtttatgattatatttcacttttgagatgagaagcaagaacagtttaatctctctcgaaagctttttatagatatttcagcaacgtaataactctcttgaaagtataattttggatccctcaataatagaattgctccattatttataggagataattacaataaaaaatagtttcacaaaagctatcaagccataaaaataagaaattaatgattttcgtgaactgtgacaaatatttatggatattctttaaataggaacttgattatataaaataagaaactttatttaatgagttctcttcacgcgttttcttctagttggattgtgtgaagtgctagttgtttcttcccgttcatgttagcttcgttcattccgtacaacaagttttactttgcttatctattgctgcatttggcaagctgtttatcctatgcaggcacttggaagaccattgtggcccaggtcttgaaaccataatgcgtgttacgcaaaagacgtgtcacatcatccaaataaaatttggattaatattttcctccaagtctacaggagaactttctggttggtgcgtggacttactcagcgcccgtactaggtagatgcagtgacacgtgttaagtgaataagcataacaaacagggttgtcacttcaaatctttttaaagcatcttttcaaatatttgatgcatttaatactctgatatagattaccgtgtcctaggcgcatgcgttaatggttgtacttataatgaatactcattgtaaaattttagagggaaataaaaatttggtttgagtgcctgcattactgttataccctctaaagctctaataaatagagagaaaagaggttcatttgacattttcacatctattaagtctcttaaataccataattattttgcatttcttgtgattttcaagagcatattttggagacttcaagtacttaatctttgacttcaatctcgcatttgaaccttccaactagcaactccaatagtgagtaagtatcttatttctttatgaattttccctttattttcttgcattcaattttacatgcttttctggaaaaacctgagttatgccgttgatatacttcacaactccaattaaaatttgaatttactctgattattatggttgaatatgctcgtgtgggactaaattgttaacttatcgaacatttatatatttttcctgagagaatctattgaatggaggcatgtacatcgttttgacaacttttgggttttcacccaatttttaaacatctttgaatcaggttcttcgtaatttggatggagttctttccatcgatccaggcatttgtctggacaaaataaacaaattattttcatttgaactcttcacttttgttcggtacttatctccccatcttttttttttttttgtaaatgaatacggtcgactattgggaaagtaatagccgcattcacgacaacctattacaactactctttgaagatcaaccaaagacccgtgcaaagtctccttttttagacgataactcttcctctagcttagaaaagtgggaagtatcaagtgatgattctaagcctactgtaccactcgtccatcatcatttttattcagactggactggaggcaacgtatactagagatttttctaggagtacaacagaggtttgaggcgatatctacccattaactggacatatgttgtctgtgcaggcatcccagacactttgtcaaaggtggatcttgaaccctcactccggcctagggtcgaggcagaaatacttgtcactatcatagatcatccttcatcgagctatccatttcgctcaagaaaattggctcgtaccaaataaattgcctagaaaattggcccgagagactcagagttcgtccagttaatggcaaggcaacacaaacagggtggggaaaacttcaagggggaagacgccttgcccgtaagggacccaaaagtccaagaaattgaagggcaaggcgagaatggcaggtatgccttcatgcctttcaaaggtgtcggttggtattgaaagacgggcgaccttttgacttttgaggccgtcttttagtcctaggtgttgattacacagatgaagaattcgacgaggctgaaccatctgagtatcaagaggcggaaggcccaatatgggttcctccgccatctgaactgacaaagaggtgccttagaaatttggacaaaaaggtcctccttggcaacgtgcacgtatttctcccctttaagggacaactagccaatgattcgggcgaaggaatgtgtgcatggtctggcccacatgctgagtatggtgctcttttgccgcttcactcatatttcatgaagttggctaattactacaaaattttctcgatgcagttcatgtcaaagggaattaaatacttggccacaatgtttgtactttatgcgcaacaaggatgggagaaccttctgctcatgacataaactggttctttaaactgaagtcttcctcgcatcacgaatgtttgggatacttggccactaacgtatattcattagtgtaaaatacaaaataaaattaattctttataatatttttatgaaattaatgttatatatttttatttaaaaatattgtaatgtttagttaattttgtaagaaaaaaaattatcacaaaaataagaaaaaagaaagaaataaaagtaataaaaaatgtatatctattattaaagaaattacaagttaattaaactttaaataaatactttcataaaatcaatgtgatatattttatgttgaaaatattttgtttgaatttaattttatattcgcttagagttgaaaataacatttgtggtataaatgagaaaaagaaatttaaatgatacaaaattgaggctaaagaacaaaaaaatgtcattattgaacattaaatctagaaagcccaaagtaccgaacccattcaattttccagtccaccagctcgccccgtggtttgcctcaatgccgcaagaactaactatgaaactcaagaatttccctaaggaaactccgaaaaagcatttctttgggtttagtttcattttatactctcatataatggaaaaagcttcttctaaatcttcattatggcccatggaagtcttcgacttcaccagcatgtcatcgacataaacttccatgttccttcccagcacatttttgaacattttatcaaccagtcgctagtaggcagctttagcgttcttcaattcaaagggcatgaccttgtagcaataaatgcttttgtcagtttgaaagcttatatgatcttggtcagcctcgtgcattttaatttgattgtaagtggagtatgcatccatgaagcttaagagtttgtaccccgaggttgcgtcgaccatccgatcaattcgtggaagtagaaaatagtcttttggacaagctttgtttaaatctgtgaaatctacacatcctccatgtcccattaggctttaggacctggttggctagccatatgggatataaagcctacctgaggaaattgttgttggtcaacttatctacttctgttttcaccgcttttgatctcactagatctaggggtcttcgcttctgtcaaactagatctgccttaagatctatgttcagtgcatgatagatcacacgaggactgattctgctcatgccaaaatgactccaggccaatacatcaatgtttgtgtaacaccctaactaac

SEQ ID NO: 15331 - DNA, 5906 bp, Cannabis sativa
tcagggggcatttttaacgaccttaaaaattcaggggacatgatttagtacatgtcaaaattcgaagggaaaaaatcataattagcctagtattaagtgctagaagtaataacatgggtgcttctaaaaggaagtgcacttgataaactctattagtattttggacattcacatcattttaatcttaatttttttttatgtaacacatagtcatgattatttaagatactttataaaatttttaaaaaatttaaatattacaaaacaaaaaataatgttgaaataatcaaatatatatatatataaaattgtgggtacaacatactcttaaagtcctatttttcgacatattaattttttctaaattttggaaaacacaaaggtgtgaactgtaaaatttgtaaaaatataaaaaaatgttgttaaaaaatgactccatcaagtgagttaaatagctcaaaccttaaggtcatgaatagagtttctttacatgtgaataagcatttttcatttttcaaatattatttaatttctctctccttttgaaattatttttcattaaatttttttaatttatataataaaatattttagaaattacaatatttaaatagtacaaaaaaataaagaagttaatgtatgttataatataaaagtgtggtaaaataagagaaaaaaggtttgacgatgtattttaaaaaataaagtaaagaaactgatgtgagtactttaagagtccgttcggcatagcttttgaaaaagctaaaagctattttttgaaaaaattataataaaattgtattttgtaagcagtcaaaagtctctttataatagagattctgtatttttagctaaatgtaattaaaaaaaaaaggcatctatcagctcctttatatcgcatatatataatagagatacacttaaattaatgcaacttacttttaatgatatataaataatattttatttatcaatattgtgtatatattctaaaattattatttaaatagtctagaaaataaaaataatattaatttaatatatattatagtaatatattttaaagaataaactagaaaagttattgaaagtactctaagaatatatataaatatttataataatgacattattgtttattatattaaattgaaacaaaagccacaagttttttgtttttttttttctaagagtcaagactacaacatcatcatctcaaatgaggacttattatttttgatttgcgttaataatgttcccattaatgtactaattatataaatgattgattaatttatcacttggtttttctatgaacttcatagaagtaactgaggatgaccacagctgcagcaacagccacaccaactgcactttgtgcaattatcacactactctttgcaaattccttgttgctcgaccgaaccgggctgaaccctagctccgaaagctttttgtgcgactctgcgtagtccttgaagaatgcatcctcatcctaccaccatacaaaattaattgagaatagtgttacgataatggatacacgaaaattggtacaatttaatatcgagttttaagtcagaacaagaaatctaagttggttcttgaaaattgaaacacccttctcaatttattagtttcattttaccaaatgttaagaaaaaaacccaaaaatatattttataataattaaggcactacaaaataccaaatttcctaactctacaaatttcaagtagagataatttattttaagccccacaaaacaaaattcaatgtgttgagcaccataagatattttgtgcaatgttttacataaaaataattttagactatgcttgtaagttagattttagtgaagaaagaaaaatgtaaagaaaaaagaagtgtagacaacaaaaaaataataataaaaattgatgtgaaaaattttgttgaattaaatatttttctataaaaaataattccataccaaatatgagaatttatttttaactttattttcttcttatcttttattttccaaaattcaacttccaaacataaaattaaaaattgtgcatctctaaaaattgtgataagaaagtagagatagcacaatttttaacttccaagttatttgcaagggggaaaatatgcaaagtttatatgaatgatcatattcatatacattaccttggcatatagctcaacatagcctcggaatgcaggatcatccagtaatgcaatgtctgttggaagtttcaatagtccttctgattctcctttcagtagctccctacgttacataagtatacacatatatataaacttgttaaatacttgtaaaatgaaagtgtcattacagaattataagaagtattcatttattttcttacacgaagtatgaattgtcgaacttcaaaggctcacttgtccaagggccatcaaagcctgatctgtctggatgtgcttttccctaaacaaaaccaaatatataacatgaatacttacattcttctaattaatctttattttgtaaaagttattggatcttgataaattagatattttttttttaaatagaattaattttttgtcaaaataatatttaataataactctgaattaaaaattttaagataaatttgttatattagaaaaaaaattatcaaaaatttaaacttagaatatttaaaaaaaaaaaaaaaatctattttatacctagaaaaaagaagataaaaaagaaaggagagttaccaatgtgtggccaccagaaagtgccacaatgtccttgtcagatagtcccatgcgataaaagatgtccttaaggtgtgatactcctgcaataaataattcaaaaacagaaaacattattacacaaaaaatgacttctctctccttctttctttttggggctttgtgtgttttgtcacaaaactttatcaatgcaaagcaaaccttgtttagcatctgggagacgcccttcttctggagattccagagaatcctgatccagatatgtaaaaagttactaaaaggatcactttatatacatatacatatgaaacttaaaaagcttaatcaacaaaatacctttcttcctggaacaaagtcaatagttggacccccagtgacctcaacggcaacaactccagcaagctaaaccaaacataacttaattgaataactccatgaatgtaaataataatgtcaatttattgagagacagtagagtagagtagagttacctaaatatttaactactcctatgtggtccaactttagaatatataacagtccataaaaataaattgtgatattttacaacataccctcttttctaaagtttgtaaagatattgagaatagcacctatctattaattaatctttaacaaattttgacaggatttttctttctgagacaaacagagcttctaaatcaaaagataataatcacctggtaaagatcagcataggtaatcttcggatgtttggacttcacttcctctgatatgaaaaaacaaacacaaacagtaagaaaaattaggtgaggaaattttgatgctttgatatccaccatgttgtctattagtgttctttgatcatcaattgctatttagtgatgtcaaaacaccagaaaatctagtaaatcttagttgataacataatttacatctgaaaaagaaaaactagaaacgaattggagaagctcaccacacaagctaatagcaattttcaagccactatttgctccatggcctaattcatgctcatttctgattgagccattaggtcctcctgttttggtattgacatcataagttcccgcatcatgccacctgaaccaaaaatgtcagccttctcaattttctgtgaatgagtaacaaacaaatcatacctgtacacgcgcacgcttaatattactctgtttggtttctaataaaatttcaaatgagaaaagagaaaacaagttaagcaagcaaaaaaaaaaatttaatttcttccctcgcacacacatacttaatattgctctgtttggttactaaaaaattataaatggtaaaagagaaatcaagtctaacaagcaagaaaaacacatgaaattcttctccctagagaattgtcatcaaccagaaaacaaacattcaaagctcaattcccagtgaatcagtaacaaacaaatcttagctgtacagaaacacatatacttaatattgctctgtttgaatactgagaaaattccaaacgagaaacgagaaatcaagtcaaacaagtaagaaaaacacatgaatctcttcctcgatcgaagctctgtcgccaaccagaaaacgatattcaaacaatccaaaaaataattaaaattaaaaaaaaaatgatggaacttacgccaaacgaagcctactcttaatttcgttttttcatagtttgtgtaaacaaacattcaaaatcagtaacaaacaaatcttagcagtacacacatacacttaatatttactctgtttggtttctaagaaaatttaaaatgagaaaaaagaaaaacacatgaatgtcctccctcgagctctgtcaccaaccagaaaacgacattcaatcgtttaagcctactcttaatttcgatttcagagtttgtgtaagcaaacattcaaagctcaattctctgtcaatcggtaacaaacaaatcttagttgtacacacacataccttaatattactttgtttggtttcaaagaaaacaaacaagaaaaacacatgagattcttccctcgagctctctcaccaaccagaaaacgatatacaatcctttaagcctacccttcttaatttcgatttcagagtttgtgtaaacaaacaatcaaagctcaattctctgtgaatcaataacaagcaaatcttagctgaacacacacacacacgcttaatattcctctgtttggtttctaagaaaatttcaacaaaaacacaagaatgtcttccctcgagctctgtcaccaaccagaaaacgatattcgatcctataaacctattcttaatttcgatttcagagctcgattgtctgtgaatcagtaacaaacaattcttagctatacacacacacacaaactaagaaaatttcaaaatgacaaaagaaaaaatacatgaaattcttcctcgacctcaatcatcaaccagaaaacgatatcaaattcaaacaatccaaatcaaaaaaaaaaaaaatacgattaaacttacgccaaacgaagcatgataggagcacaattcttgcttgagatcaaagctcgaaggtctctacgagctttctccacctccttaaggtactctccatctaccacgagtggttccgccattaaaattcagtttcgttcctcacaagcttctctctctctcaaactcaacaccttcaattttcaaagcccaaaatctcttaattgaatttatttatatattttatatttctgttatccatttttttttcattgattggaactgatctacgcaatgatggcgcgtgtagtgaactctctttacagagaattataaggtgatgagatgagatatactaatggagtgtgttgtatgaagttgtagaagcgcgtgagatggttcttccttatctttcttgatcttcgtgcccgtgtgaaagtctggtctggctgattggtcgtctgggttatagttggattgggcctacttgttagtgttgggcccatttcttttaagatccatgatcggatgaaaaggctttgcctttttttcgggttaggctcaattttgcattgtgaaagccctttttaagaaaaatggagaaaaactttcaaagctttgtcgtatttattgggaaacttacaaaaatactggaatttatgttaatttttacaaaaatactgtcacatgaaaatctttacaaaaatactgtgtttttata

SEQ ID NO: 15332 - DNA, 7549 bp, Cannabis sativa
  modified_base (1447)..(1456): a, c, t, g, unknown or other
  modified_base (3213)..(3213): a, c, t, g, unknown or other
  modified_base (3391)..(3392): a, c, t, g, unknown or other
  modified_base (7488)..(7501): a, c, t, g, unknown or other
taaataaaataaaaaaaaatcataaaaatatttaaaattccgtgaaatcatatttttgtaatttttttttgttgtttttgtgtatttgtgaaattatcccatgtaaaaatgagatggataagttaaggaatacctattttttatatccattaatcaaaaatactttcatattatattttattaaaatatacccacttttgtgagtgtattgtctaatgtacccttaccctccacttaagtctatcacataatttacattattctaagaagtataatgagaacatcatcataaaagtgggtatattttaaaaaatataaaaaaaaaaaaaaaacaaagtaaattgagtatacaatataatttccttatttttttttaattagatagcaaaattaaatatacaaaaataagattataagtgcacccatatatatatggattattttttaatgaatattagctattgatgagaacttttaaaggataactataattaaatgtgaattttaaaaattttaatttaataaccgataataaaaaaattaaaatatttatgcttaattttattatttaattaaaaaaagctctattttttacactaaaacatcaaatatatatttctatttaacattacttaactcaaactcaatttcatttaattagatatcaaaattaaacttaaaacattaaagggcacactgccacgttcagtcgtccacaaacttaacccatgattacagttcaatcattcatgttttttataatcataattattaatttaaataatttattgttatatgagagtgatgttgttggtatgtttttttattgagtggaattaatgctcgtataaagcaaatgggataatattattagttaagtacctaccactacaccaattttatcactttttgaaaaaattaccaactacaaaagaatgaatagctataggccggtgtgttcctttttcattccttaaattctttctcttataaaattagttattctttttgaataccagtcgatttggatttgaaggtagcgtgatcactaccaaaacaaatttgttattttttcttccataaatgttgttattttatgagggagaaatgtcttgttaattagaaactcaataaatatatatggaatattttttaaggcatattaccatgagtaataaataaatttaattatgaatattaattttaaaaatattaaaccattaaattttggtccgatagccaataatagaagaaaattttaattttttatgcttaatttaggtacttaattaaaaaaaaatatcaaaaaatacatatttttacactatataaaaaatatgtttatatgtaaaatatttaagtcaaattcaactttttttatcgtttttttgtattatttttttttcagctgatggactaatctcaacccatataatgtaaaaatgannnnnnnnnntaattaaatagaaaaattaatcataaacactcaaaattttctaatattacaaaactcatcaaaagtgcactcatatatatatatatatatatatatcaatacataaaatccgcacaacatttaatgtatacacataatagaatcagggccgaccctgaaaatatatgggccaaagacgaattaaattttggggccctcaaaaatatataaaataaaacataaaagaaaggtgttatgggatttgaactcatgacctttgacattatgtcatccacctcaaccaactaagatatatatatatatatttgttacttataatacatttaaattttacttaaataaaagcttaataattttttctattttttattttggaccccggaaagtgtgggccctaggcacgggcctagcctgcctatgcctagggccggccctgaatagaatcagctttgatactatttgttagttttgtggtactaaattaggtatgcatcagaaatatattttctgattatcatcgtaccacatctcaaggatcaccacctatatacatgaaatatgaaataaaaagatgacatgaaatatttacctcttaaagcgagtcaggatattcttgaatcttttcgtaagttgtatccttataatagtgatgaagaactcacatcgtgattttctagaccttccactacacacaaagattagtatgagctaataggataaaactgtataagtgttcttggtttgatctcaactcacgggtaataactctttttctctggggtgaatagtgatatgattaattaatctttttagatttcctaaattatagggtatatataaatttaggataattacattaatttaaattaatataataataataaaaatttaattaaaaaatttatttattattttaaatattaaaataataatatttaaataaatatctttaaccaattctattatagctatttattttgaatttaaatatttagtttaaagtaaatattatataataaccgattaagcgaatctctcaaccacttaagagaatatctcaaccacttgaagagaatctctcaattattttgagagaatatctcaactaacataaatatttataactattttttaaatttaaattcaaataaatattatcttttgaattaattaattaattaatctacacacaaatctagtagggctcgacttattttataggtgtatcccttgtcttaacacagtgattatagcaccatcattgtcttaactagacaatggcgatgtctttgtctagacaaaattttgtattttctccaatttatttaaataataaatttgcaataaattatttattacaaaatatataattactattttgacaatttaaaatagatttttttgaatatcattatacaacttaatccattctcttgatagtgtttcaaggcggcgatccaaattattaagaatctaataaataatttatataaagtaagattttttttttaaaaaaaaaaaatcaaacttatttatatttgtaaactcatatcttaacaaataaagaaaaataattaaaaattcaataaaaatatataattattttgaaaaaaaaaagttataaattaaactaaatttttacttaaacaaatttatatttttttagaaaaataaaatatactcaagtttgtgctcgtaaaatttagtttttacaaaaaataaatttttaatatattatttttaatatctaaatgaantttttaataaaaaataaataactttttaaatcgcttaattagttttaaaattataatatatattttaatttttttaattattcaaaataattttttcttaagatctaaattaattttttaagatttacttaaaaaagtattaaatctttctcatgtttattttgagggggtacgattnnatagttgtcaaaatttagggggcaaaattgttaatttacaaagacacttcatcatttaaacagaataatgtgactgaacctaagagaaggactaaatttctgtagacgtaaaagttaagggggattcttaacaagtcgtatattttagggggcaaaataagtattgtcgaaagttcaagagtaaaatttactaattactcttaaatttaatataattaatcttaacaatttgatgtctaactcaattattacctttaacaagatacatagaagagggcgatttacttcgcttcctcaagtatgaagaggtttacaccatcttccctcttttcgaaggatcagaaggtggaaagatctcaaagtcttccttccgaaactgggtggtaaattacaaaactaattatatcatattttttaattaattagtctattagaataaaataaattaaaatatatgaaactcgatatttctgtatatataatacacaggtgcaagcatatgtagagcgaaaagctcttgcgcattctctaaacgacacgaaaacagcagtccaccaacttcacaagttggcgagcgcagtggtgatggtggtgataacggtggtgtcactcctagtgatgggattggccacaaccaaggtggtttttgtggtcacctcgcaacttcttctagttgggttcatgtttcagaacacatgcaagacaatgttcgagtccatcatctttgtcttcgtcatgcacccctttgatgttggtgatcgttgtgtcgttgacggcattcagatgattgtggaggagatgaacattcttaccacagtattcttgagatatgacaacgagaagatttactatcccaactctgtgctactcaccaagcctattagtaattttagaaggagccctgatatggctgatgctgtagagttcaccattgatttctctactcccttagatgacattgtccagctcaagaaagccatacaaatgtacgtaattatatatatatatatgtatttgtattacattatatacatattcatcaattctcttatatggatatggatgtgcagatacatagagagtaaaccgaagcagtggcatccgaaacacagcgtgttagttaaggagatagagaacgtgaatgagatgagaatgggtctatacgtgcaacacaccatgaaccatcagaactatggtgaaaagagcagtcgaagatcagagctcgtctttgaacttaagaggatatttgaaactctttccattaaatatcatcttctccctcaagaagtacgtctcactcaattcaacatgctccccaaccccagccctagtctttcaacttgaaactctttgcttagcttctttttttataatgagttttcattgtatttttctattgtgtggtgatcgatacatatttattatcttcttatttgtgtgtacttagtttatatattaatgttcagagtttttaatcaacggttgctatggtttattgatgtctatcacttggtgcaagcaatattgattcagattgttgatgtagtttgacatctttgtaaatgtacgttatataatagagattatacatgacaaaactgctatgtaattttttgcctttattaaactagtcatttactataaaaatctaattcatatcatgaagataaagatggctaattagattaacctaaatcttgagaaatcatgaacttctatttatgttactagactctttgattcacttgcattactagaaaattaggttttagaagagttttcttgagctttcagcatcgattttggcaaaattcgttaccgacgttattctagataatgccatagaggggcagcattaaccgacggtataaagagaccctatgtcgtcagttattataaaataaccgacgacataaggacgtgtcatttgtataatgcgtctttatagcgtcgattattagcaaataactaatgcggtattactttatggcgtcaattatttataaataactgaccttatagaaaattaaatatttttatttatttttcacatatttatttttgtttatttttattaatttatttaaattaaatattattttcatataaataaaaattaaattaattatgtaactaaatgtatatatacattattctaaataaatatattacacaaatattttaaaattagtctaagtatttacaaattattatctaaccaaacataaaaaaataaagaaaaacaaatttacaagctatctaatcaaataaagaaaaatagggagaaaaaattcttatgcaatttagcatcactgcaagccttcgtgaatcactgcaggtctttatgaatcatcgcaagtaatagttctatctactgtcgttgtaacggtaacaactcaatttttgcatcatatgccttcttacttccaaactgtaaaaaaaatatttttattagtacatgtatttgttatacccaaaatttggctatttaccagaagctgacacgtgtactacaaaagaaatatgaataagctcaatgattataatactaaattgcattattaaatgcgactaaataactcatctcaattaattatagttgatagaaatattcaaactcgctaccacataagcatatgcgagataagagtaataattattaatagatgtaattgacgagataatatgcctatctctgaataaatagaatatatgtgatgatcttcagtagacaacctgacagctctaataccaaaattataacgccttaatgattaggcacgctatagtgacttttaattacaatgcacacatttgctaatcaaagggttttattaaaaatcgagataattttaaacttttatattctaaatatgtataaacttatccaaaagggttgggatcccatttttaaacttatttatacaatcaaaataaactttataaacatgtcgcacatcgactacaaaaggaaacttgagttgtcttgagactgaactcttcaagtcgttctgtctggacatgtacaaccatctctaagctctggactcattgctgctcagccttaacatttcctttacctacacattcaagcaataactgtgagtcgataaactcagtaagaaaagcatataacatacaatatattaccgacttgtatttaggtgcccatacacctatctacaaggcttcacaaatgattaagaacattcttaacaaaggtacgacctctgtaccacatgcactatatattgctattgtactagtgttggtaggatttgaaccgtaccctgagtacaactaagtattataccacatgcactagtgttggtaacaccagattacactcttaaacatcatgtgttgttccacatgcacttagtaccgctaccgtactagtattggtaacatatgaatcatataacagcatgtatataacatacatacaaatatacacatatatatattctatgctaatcttacctcgtttttaaattcaagtgtgtcgatcgacctgaatagaaaatctcacactgaacaaaggccctagtcacaatcacgtaaaataggtaaacaactttctaaaacaatttcgggaatctaaacttgaaactagaagtttccctatcgataaatagcatgacaaagtcctaaatatcatggaaatacaagaaaatcaactaaatgaaaaaactgcctgaaaaatggcaggccatttcagtaaaaatagcaagctattttttgggtctttccctaaaagaatggtagacagtttttgcaaaaacagtctatcgtttttcactgtagaaaaaaaaaagactcttcaatttgactcaacactactctaaactttccaaaattctccagaattcctataatcatcattatgaaccatttccaagtgacagaatcaaaaataacacaaacatgcacaatccaccatagttgagttaagtgtgagttcttgaactcaaacttgctcaacatcataatcagcccttaaatttaactcaaataagcctaaaacaacttaattcaatttcagaaaacatcccctagctcctagggttcggacaaaactgttgggttttatgcnnnnnnnnnnnnnnatttcaatataatcagatttactcattaatatagatcagaaataacat

SEQ ID NO: 15333 - DNA, 5619 bp, Cannabis sativa
  modified_base (5540)..(5555): a, c, t, g, unknown or other
taaattaataataattattaattatcttatatttattttttagggagtgataatagagaaagaggttgttatgtgtctccttcatcattgaatcgcagggaaagaaaatttggatttagagagagagaaaataaagaggaagaagaaaaaggagaaaagggttaggacttaggagagagaaagaaagctctgtgcacaaaagagcttttgattcctctctctctctctctataatccaaatccatggctcattcatgctatacttcttccttttcgaattctccaccttcttctcattaaaggaagaaacgttcatttttgtttgttttggtgttcgttcaagtccgacctcatcttctccacaatcgtctgtaggttttctttcaatcctcaaacatcaggtgcgttttgcttaagcaacatttcactctttcaggttataattgtatttatttctattttcgcaaagaaaatatttttattgaaaaacaacaagttttctctttttctttattctctcacttttggtatctatcttttaccttttatttcttggttcttttaatttttttattattattttttttgaattcaacgttgattttatagattcttcttatgatagtctatctattgtaaattagtagtgtttggaaatctgaatcttgaagggaattttttttttatatctttataattgtgaaaaatcccacttttccataacggtaaagaaaagtttcgaatctcaatatttgaattttctgtaggagagatttgaataattcctggtataatttttaattgtataaaattttccatgcccagatttgaatatattccattccagctgctatattgggggttgttgtaatcttaaggacaaggtaggagagttttttttgttgtaaaaggttttgattgagagggttttgcttgatggggaattgttgtgcaacgcctggtacaccttcccaaaacaaccggaagaataagaagaaatccaatccattttctggcgattatcctgtgactaatggtgatggaggtgggaacaacacctgggtcttgaaagaaccaacaggtcgagacattacagctcattatgatctgggtcgagagctgggccgtggcgaatttggggttacttatttgtgcacagagttatcaactggtgacaaatttgcctgcaaatcaatatcaaagaagaagctgaagactgctgtggatattgaggatgtgcggcgagaggttgagattatgaagcatctaaggaaccacccaaatattgtaacgttgaaagacagttatgaggatgataatgcagttcatattgtgatggaattgtgtgaaggaggggagttgtttgatcgaattgttgcgagaggtcattacacagaacgagctgctgcagccgttatgcgaaccattgttgaagttgttcaggttggatttttgttatggttatgttccagctcttctttacaaaagtactatttagtttagttcatgttgtaattttctttataaagatgtgaacacactatagtttctttagtcatcttctttgtttacatgagttatgattttcagagttgtcataaacatggagtgatgcatcgtgatctcaaaccagagaactttttgtttgcaaacaagaaagaaacatcccccttaaaggcaattgatttcgggctgtcaatgttttttaaaccgggtatggaaattaattagatttaatttttactctattatgccacatttactgtaacgtttatttcatcttccaagttttgttcccattatgtaaaatgtttctacttttcctgtgttctacaggtgaacgatttaatgagatagtgggaagtccttattacatggcccctgaagtcctgaaacggaattatggccccgaagtggacgtttggagtgctggagttatactgtatattttactttgtggtgttccaccattttgggcaggtttgggttcatttttagaaggctatacttttcttttgtgaatactatgacagttataaacaatgcttgttaaatttaaggtgtataggttcatgtcagtatactttcttaaatgttattgttatatattgaggtttattatcataactgttcacatatttttgcctgtagaaactgaacaaggggtagcacaggctattattcgctcggtgattgattttaagagggatccgtggccaagagtttctgataatgcgaaggaccttgttaagaaaatgcttgatcctgatccaaagcagcgacttacagcacaggaagtacttggtaatgctcagtttcattattctgcatatttgatgcgttacacagaagctgaaggtttatcttttgtataacaatccccctcactttttcttttcttttcttttctttttttttttctttttgtagagcatccatggatacaaaatgccaagaaagctccgaatgtcccattgggtgagactgtgagagcaaggctcaaacagttttccgtcatgaacaagctcaaaaaaagggctctaggggtagtcctttgaatctttatcaacattgatcatttagtttccaatacaatggaaggcattttaagatgagttgcttaaaagcttggataaattggacattgtcttttcaattggtcttttaacttttaatctataaattgatctataggttatagctgaacatttgtccattgaagaggtggctggaataaaggaggcatttgaaatgatggacaatggaaataaaggcaaggttgtccttgaggagcttcgaattggtttgcaaaagcttggacagcagattcctgaaccggatcttcaaatactaatggaagcggtactatcaaattgtcttctgtctgtactatttattctttaaccttgaataagatttgtagattacagatcattttactatatctattttagtgttgcagtttctaaaagcataaaaacattacttttatgcatcagaatacgtaagtagataatgacttccattgttttttggaagtcgtaggtaatttggtattcaaatggtctgttcagctagctaaaagatggaaaaaaaaatagaggaaagtaatggaggagacatttaatgtttttctttctcacaatggatcttaaacaacttatacttattgtttctacgtcaattaatttaaaaatacattacatatgatgattcccgcaggctgacgttgatggcgatggcgctctaaattatggagagtttgttgcggtttcagttcatttgagaagaatggctaatgacgagcacctacacaaggcattttcattcttcgatcaaaacgggagtggttatattgaaattgaagagcttcggaatgctttaaatgacgaagttgacactaatagtgaggaagtcatcactgctataatgcatgacgtggacactgacaaggttagtattatggttttcacgtggacctcaatcatgcaatcttacgaaaatacatgtgttcattagtagtaagaacctgtataataatcttcctcacaatgtcattagcacagaactaagaatggagctcagctgcatgactccattgcataatgtgtcccatatttgttctgtcataatattttagtttgttatcttgtaattttgtaggatgggcgcataagttacgaggagtttgctgcaatgatgaaagctggtacagattggagaaaagcatcaaggcagtattcacgggaaagatttaacagcctgagcttgaagttgatgagggaaggctctttacagttaaccaacgagggtaaatgaatcaacacttatcagatatcaaatgatatgaatgattaaaaatggaagaattcctttatttttgctgggttaatgaaatttttaatattttttcatttcatttcctctgatagacattgcaataggtagtaggatcatcagagtttaatgggtcttagatatctttcgaaaatagcaagcagcttatatctagatcatttgtattgttttggggttagttgcagaagaagaagaaaaagaaagaaaagtcattaagtcaaagtttggaagagaagttgatgatattgttattttcgacctcaattgtttttgtgggttgtaaatatatatcagtgaaaaggcctggtagtaggcactggcccttttgatttgataaaaaaaaggaaaaagggagaaaaaaagagaggatgtatgtttaatttgatggtttagcagactttgcatcatgtgcccttaagaacttgttccctaagagtataatatgtttaattgagtctcttttaaatctgtaaaagcaattggttataggttcaaattggaaaggagaatgaaaaagacttgatctcttttgtttttgttgttttcttattattgttattattatatttcttagtattttagagtggtcccttccaaaaatccatttccatgttaccatagtgaagtggctctcagcagcttgtggagtgtggactacttgtatatgatagaatagatcacatgaaggatgagaatgtaagcttctccaccaccaccatcattttcttttatataagcaaaaagatttaacctttcagtatcagcaatggtcggacttagatttttgtctttgtataataatataatatattccatctctaataataatatatattccagttccacctctcatctcttttgctacttctaattttacgggaaagaaaataaagggtaggtgaagtcttaatacttggattttgataactttcttgttacatgtgtacttatattagcattagttcatttatagataggtattattctgtatttgattcaaataaaaagaaatggttggctgacccaaatgattttcctctcaagaaaaagaagtaactttataaacgaaaaatattcccttacatgttcaactgtttacatcaccccaacgaagtacaaaagaatatattatcaactgttcagtaactcctacatatagatagttgtgaatagacaatgaaatatttggtcgactcaagaaaagaaactggtcaatgggatatatattttttttttgagatgaaatatcaacttcattgaataaattagcattctgaatacaaaagatgtaagagttcaccagaaataaaaatatcagaaatactacaatcagattgataccgagaatgtataacataatgtactactcgatttgctgatcgtctaatgaaaaataaattaacatttgggagggtagataataaaagttgacagtcttttattaaaaagtcgaaagtggacttcattgcttggttgcttcgatagcttgtactgaaacaagactgtctgtctcaatttgaacatgttgccaattattggtctttacccaactgagagcttctttaatgtctatggcttcgatgacttcagctgcagatcttccaccatggcaatcggcccgtgctgcaacaaggtgaccaagatggttcgggaaaaaattctgaaaccatacttattgtcgnnnnnnnnnnnnnnnncatctacattaatcttgatagtgttttctgcgggtttagcccatgactcagcgccatcaccgat

SEQ ID NO: 15334 - DNA, 7301 bp, Cannabis sativa
tttttttttggagttgtttatttgttttattgttaaaaataatgagaaaataagacattatatgtggataaagagatgccatgtgtgcaaatgataacaagtcttgtgcttaataatgaaaatgagattttaataatgatgaaggcatgttatgtttgtcttctgaaatttacacttaacaaaataatcactaacaagtaacaagtacccataccataatcttgttttcttgtttgtcgaactcgtacgttatatttgtgttttattattttaagaataaaatatgcacttttgctcaataaaatataaaaacctttgcactaaaatttaggctatccagagacagcactggtcaaagaatgatgaaaccatattataaattattcatattaaatttcatgtcgttacatggcacacaaaatcgaatggaattatttttttgattaacacaaatgggattattattcatatatatttagaatttgatattatgccactagagagaatttgtatctatagtctcaaatatcaaatgggattttatttatttatttataatatggaattataatttgtctactataatatgtcaataacatatgactggtctctgggccctaccatagcagaaggctgagcccaaacaagagaccacacaaggttcttacagtaggcccatgaaatgattctgggactgactaatactatcctaaccagagagtatcactgtgctcagacccagggtccctccattgggttgggaatgtggcagtactagaccaatcataggtctggttaatgccctgcttaaccaccatggtaggacaattattcccaataagaagaagaaccattagccaaaaaaccaaagagtgaattatgattgtaaaagcaccaacgcaaaatccacatcattttcctatttcccttactaaataatccatatacaattaagagttaaggatactgaattacctcattaaacctgaataatacatttgaaaaaataaaagagatacaaaccaaaccacctatagaagaaaactaactcaaactaaaaccagaaagaaatgatctaaaacaacaatggttgacatgtataattgcaaaacatggcatcccatcacttaggatttgcaatgcaagagtcagagaattctgaattaaattaatcacaggcaaaaacttcacaattttggggctaggcttgcacgcaaataaggcatattctatatatccaatgatgtatatgatgctgggaagaactgagaatttactcttctagcttatggtcctgtcaagttgatgaaacagctactttcggaggcttcatgccgaatccgtgttttaccttttcgaccctgttcaaaatttcaagaaaagtaatgattgagaagattaaataattcattgtagtattaacaatttacttattatatggtattataagttttcaacataagtagttacaggtgagggatctagaactaagaaaaagatcctagaagttatagaagatcatatacctaagtatcctgtttttacatcaaaattacaatcgtaactgcccctcatcatgaaacatgatgcatggcctatcttgtaatgtttcaaatgttttgcatcagaactactatgtttcaaattttattacttggtagtttcaatagattttctaccattgtaggcaagagtacataatgcctcaaatcatcaatcatgatgtatgccccaactctctgtaatgaaacaatatgctttatagcagctatatcaatataaggtcctatcactaccaacccaaacgttaatcttatgcttgataccaaaataattggcacaaataacatatgatacgaactatactcaagactgaaccgcaaatgatcaaacattaatacaagttttcacaaaagccgcagtaaaatttctagtaacaaaagcattcaagaaattgattcttacgtgggggctagttttccgaggcaatctagttcttctcccgtgtcctcatccaggactctccccgaaatctcaatgatgtatgatctgtctctactagcaggcagccccctactagcaagcaaatccagatctttttggtgaagttctctcccgttcacaaaaacaccagtgttaccagcagcacagttctctggcaggggataattaaattcttcaatatatggctgcaaggagatggcatactcattaagaaggaaaaaagccaacaaaaattgcaaacaacctgaaaaactgagtaagctgattgaacttacaggaactatgccaagacatggcccacccataatgccccaaaatccagcccgataatcgtacctggtttaagccaataaagacagtcaaacaatcaatacaactacaaagatgacaatgtcagataagtttaaaatgattctttctgcaccaacaagtttggatttatatttagatatacagcacattattcacaactgttggcataatgtaaagcatgtgcctcaaatcaatgcacttatcaaatgagagaaacttaccaatattgtccaggatggacatgtccagcttgtttttcagccttctttagtacacggtctgatatggggtgtccattcacccaaacattgcattttccccgatcatcggtttgattagctcttgacaaatccctaaagctctttttaatgttagaaaagaaagattcacctcccttgttcgctttcggctgatcatcccctctgcttccatcccctgaatcttgagaaattacagtattagagtactcattgaatgaaacctccatctcggttgccagcgatgcttctttcaaagaattctgcctggaggtgattttacttggtttcaccttctcttggtctgaacgattactccggtttcctttcccaagccggttcaccaattgactgttagctgagtagtcaaaatggtcttgcaaaggagatccagcaggtggtggtggcgaattggttttgattggatgctgagcagagttggaaacctctcttgtacacataggagcttctgggctgttttcatcctcagaggtacatggagatgatgaatgaaagctttgcatctcttgaggtttggttgagttcacacaatgacctacgggaactgaaactggttctctgtccattgattgaaaatcatatccagaattatcataatcatctgaagagaagttagcataagtccggttcatatggcgatgcgaatataaagtactgttgttaacagcctcattgaagccgttatcctctgtggcattttgaactttttctaaatcagtagaaagaacaactttcttatcgatgataactagactcattacagtagaacaggactcacacctcactttgtggtgagtcttccccgtaagcttacttggcaatttcaaaacttcaaaacaattcctacaagttagaaatggagctccagcaccaagaggatggaaacgacgacaaccagatgctaacatcacccttcgagcacgattacgaacacaacccatgtcatggttaagatcacttggccacctagtatgggattgtacagcatgcaaatttgaatgcataactgtcctagatttgttaggatcggatggaccacttactccattgttttcatggtgaaacaacattggattgctagggccatcagcaaaccgtttattgctgaatgtagagggtggaacaggagcagaagcccttttgtgcttttcatagcagcgaaaacaagagcaagaaggttggtgaaatgttgcattgtgtgagtatggttcaaaaggatctggattattctccatatactgtcctgaaaagtatggatgagaaggatgttggtattgtctaggaaagggacgtgaacctccagtaaccatttgggatccaaaaggatctccatatccaggaacatgattttgataatgtattggaggataaagactttgagcaggcatttcatagccattgttataaggaaatggttcagcatagtgactgtaatacggagatccagacacatgtttatcaggtctaacatactgcacaaaacccctattagatcctgatgaaccatctggcagccaagcatcagagccaccataagcatctggtggagggaccataactccctcaagaggaatcttctctttaggcttgtcagctacatcacaagaccggctaagttgatccctcaactcatccagcttcttcaaaagctcagctcggtcttgatcaacatatggaactctaggcccatctgggacactatgtttcttcaatgattcaccaagaccatgagaaccactcatctggtaatttgatgggccctcctcaggataatttgaagtcgaaaacctcaccccttcaacctcagctcttggattccttcccaagtcttctctttgacctctatccccaaatttccaatctgtcatccttcctgatcttcggaatgcgcttgttggacaaagttctggattttgatccccaacttctcgtccagggacattgcccacttcacctctatttttgttcatatcaacaccattctcatcgacccattcatcagctgtaaccttagattgattcctataaagctcagcaggtttgacatcagctgcagccttttcagacttgcagtgactttggttacgcctcaaagaaccagaatttaacttaacttctgaactggaagcatcacacaaatcaacttctctattctccaagcaactatccaattttgcagaaactccaccaaccctgtcctcgtctgacttctctgacaaattatccccatcttgacgtttgatttttgctgtaaacaaggttaaaaaaagcattcccacctcagaaatataagccaagaacaatatcaaactctcataaataaaatagaaaaaaaccaagcttttccattaaacagataattaaaacaataacacaagaaaaatcaaaaccattgcaacaaattttgagctgaattgtaatactcgcagttcattaagcaaatagaactttccggccatgaaaagaacgtggtaagagatgaacattaaaaaagctttctttttctcttgctgccaaattttctcgacatacaatgtaaaaacggtataaaggaaaatggagcaaaaagattacctcgaagaacagttccacaaccaccacactgatagacagagtaatcagctagctccggaagaagattctcgcactttgggcaccgaaccaatcgtaccttagttgggtccgccattgttgaaaatcaaacctccaccacgactcctaaaccataaaaaaatgcttcgagaaagaaagagaaaaataacaatgtaaaaccaaaagaattattctgcggtcaaagttcggttgccgtgccgataatggagagaaaaaaacaaaagaaaagcaaacccaggtgacgtatcgaactaaaataagtggttttcaaggttgggtttccactaaagagccaagtaacggaagatgggaatagaaagacaaggaaatatcatggtttctgctgagtttttcccaggaaacaaacaactctactctacaagtgtagtgaaacggtaaagtttttattacattacataatacttttatatttggtagtgataattttctcggaaaactacggggagaaatgaaaagatagagaatttgtgggggttggtctgaaaattctttggagtaagtaagtatggtttttgtgttcagagaaaatctgagcttatgcacttctttcttagtgtctttataatattaaaaatataatgattttgtctatttaattttatttattagaaagagacactccgtggatcgttttccaatgttatagggaaaaataactccaaggacaacaggcctgaaacgacgtcgtttggaaagtaagaatcaggaaaaacatcgtcgttctcttttaacttggcctgaagaaaagtgaaacggtgaaaatgacttgaaatagtactcagtaattagtttctactaattccacaccactttattactttactctatagtctatatagtctctatacaagagtggaactagcaaaaagcacattgtcattagcaaattaacatgtttattttttcttttttaactttattccttcgactttattttcctctcctttatatataatatggttttgtggtgttttttttggtttccttgttggtgacgggtgagaaaaaagtacggatttggccaatttgaaaagaagtgcaaaaaaataaagtgtgcgaggaaaagagagagaggaaggccgttttaggcctatttggctttttccttctttctgaccagtcttctataaacgattctctgtctcaccacccacccaactctttggtggtccctacttctatttactcacttttatatatttatttatttaacatacagtttcatgtcttatcaccaccattaattttattttattttttcttaggacaactcaggtcactttcacactcactcccccttgtttttgacttttgaagtacttaatgacaattgctcgcacagtaaattggtaattttcttccatctttattgattgaagggggttgggttggtcacttggttgttaacaaaatttcatgtttgtaatgagacaataatgttgaaataaaggtatcattaaatgaactaactgattccactcacttgttctataaaattattgtgttatgtaacaagttatgagagaaggggggttaattaattgttacatacacatataaagggtagaataaagttggagtgtttgatttgatctgacacattgaaaagagttaaatgggtgttatttgtttcaaaagtagtgcaactacccccacaccaccattctatgcaacaaaaaaaaaaggaagaaaagaagagttttacttcattctcagaaaactagtctttctctttttcttttcttcttttggatttatggattttggaatttttctctttagtaaattcgatttatcacttcaaaaaatacatattcatggctatatctatttgcttttgtgtgttaattgcactaacaaacaacaagtgcatttgctataaagtaggttggattgggaagtagtttgaacagaatactttacaataatcttgctttaaattaaaatctcgtgatttattttgtaatttatgtttgaaccaacatgggaagaaatatactgtacttcggtcacaagatatgattaataattatacttatttatggttaaattatttatgttagatatatatat

SEQ ID NO: 15335 - DNA, 10019 bp, Cannabis sativa
  modified_base (9979)..(9992): a, c, t, g, unknown or other
ctgtcgatcagattgggacagtactcaggcagtgaaactattgaacgctcttcctcagtgagagaaagggtgttactcatatctttcagcagtggatccatgggaaacagagaagacagaggagggtgtgggtgaccggcggtagggaagcatgggaaagaggaaggagggaacggttgagattgacaaacttgaaaaaagatagatgtaattagcagttaaaatgcaaaagggagttagttaaagacataactgatacagaccccaaatgggcacttctatggagtttggagtaggtttttattctgttaaatttttattttttttactcttaataacatcaaaaaaaaattatggagagtccttccacaaattaaagatctaaaaaaaaggataattgataaataaataataaaaaaaaaactcatcacatgttttaaaacttttgtcataccatatctcacttataatcaccattacacttagacttgttgtcatgactcataaccttatttcacttgtataggtttattctgtacataaatcaaatcaaactataagttaatttaatgttatttttaaataagaaaaatatataaattattgaaatcaaacattgaaaaaaataaaatactaaaaaattaaggcataaaaaaagggatagagaacaccatgaataagtatgagagcttaataattacacatttcaatgtgatctatgactttatgtataacaatttttctttaattgaaactctatatagcaattacaattacatatttcaatatatttatagactaaaacttaaaaattttgaaaataggactaataaaatatgttcgcatttatatatatatatatatatatatattagtcacaaaatataagtctcatagtttttaaaagttatttcttttttaataaatgaaaccatattattagcgaaaaactttggaagaaatgagaattttttttaacaacattacttattgttaacgcagattttcgttaacgaattatgaacttttttctgcaataaattaaacacagatatgtaagaaaattgagaagaataataatagtaataatgacaccaagtcgtagttttacagttaaatttgcatactccatgagtctatcttatttaagatatttctagatattgaatacagtattacaattagtgatcttttctctccaagattttctctttttttctgtagaatctttccctatttataggaatataggttgccagtaatttacatttgaattagaattacataaccattttcacgaaacgtgggttttgaccacattccatcatgtgtagataacactagaaatccgcataaccgtttatcattcttatcttcaaggtagtggacgctgacgtgggtaaaggcatctcgctttgtatatagaaaattaaatgataacttggtttaattatatgccttccagcaatggcatgagcaccagtgtactgagcaaacttaagaactgctctttgaccataaggcctcgcagactagacaatcatgtcctacatgctcccaagttgttacatttagttattataatgtggattatacgctaagtctttcaacagccgattcgcctcgtcaatacttccttatgtgtagcgaggtagatgtctcgctatgcattgtccataatttttacgggattatgccttctaaggcaagatggtctctcgtcaatacatgaattgatagtttgtgtatccttgtctcgcctaagactatacagtcagcaagttatgaatatattctatatttaatgagttattctattttgcatttaatgatattaacattattatatctggtggtacatattccacttgattgacacgtgtcactctcagaagtatagtgaaattttgggtataacaattgcccctttgccccttaaaaaacccttaaaaaattcttttaaaaattcttttttaattttttaataaaaagtactttttaaatgattacaaagggtactttggtcttaacccaatttaaaaaattgcatgcttttgaatttggtggttcatggtttcgaggcacatcattagcatttaatgacccatcttttccaattcttccttattcctatctgttggatctctattcttcatcatctgatgattacggtaacttcttttaagtgggaatttatttcccattttcccctttatctgtttttaaataagtattgatgcatctctttgtctcacagatatggatttaaagaatcttctccactcttcaagtaataaagggaaaaagaggactgctgcctcagaaacttcttcagatgttaatgtggaacccctcaagagatccaggaaaaccactgcaaataagaagcgtgcctcgcagactatagacctcgagactcttgaagtccaaattcaggttcacactccagccattccacatgtcaaggagtcagtcccagaaactcaccaggccaccacttcttcaagtaaggcacctgagactttgcccatcgaggttgggggcactagttcaaagtattgcgcataatttgctacgtcctactggcgccatttttgatctttccagtgtagtgactgggatttggtcaacaatggcagcctaacagagatgcttgagaggagccttaccttcaatctctcggttagtttccttcttcttttctttgttttttaacatttcttttaagaacccacaagaattcatgtgcatttttttcgtataggccaccttcttatctcatgtcgctcagagtcgggttctccataaagtaaagcaattggaagctgaactttgtaaaaccattgagcaacgcgaggctgttgctaaagaatggaacgatgctcaaaaggagatttcctgtctgaacgaggaggttgaggagacgagagactcacaagactgaactcgagacagcccaaaaggaagccaaggacaaatttgaggcatgttagaaactctaagaggaacttaatgcagccattgtgaagctcgagggtgctgaggccaatgctaaagaatggtgcaacgctgttgccacgtgttccatttaccgagcttggatggaaaatcttgagatggacttacatttcttgggggagggcaccgaggaagtcttagcttattgcgagaaagccaagaaagaagaagaagaagaagaagcaactgggtccgaggaagatgatgagccatccaagtctcctaccatgtaggcttgagttttttaactcctttttttttttattttaacttttaagaaaatggccttttggcctagacaatggtttgccccttatggaaattttttgtaaagacaaatttgctttgttggatggccaactttgcgttttatttatttattttcacttattgcctcgtatctttatatttgaacttaatatgtttgttcatttgtgttttaatcacaacctaaacaattatattttgatcaaacttaagatactttaagtaagcatttctattgatctcgtttttcctttgagattgctttattagttattagtctactatgtgtgtacacaagtagttatattctgctatgctttctattcgtgagcagttcttatcagttctacttcgcgcgtgcagttataatctaccatttataatttggtaagtaaacttcaacatactttgaataatttattttataaattactttgtatattttttgattgcttatatgaatagttaacctttctattcatatgtttaggttaagtattatttttcaagttatcttcgtacctcgttcataatacatgcctgaataatacaagccgttagatattcaacctcgcatgtagcttaatgttgtttttattagttactctcatttataaatgctacttcaatttcctttctggagggaaatgttcgatttttgactttatattgtccatagacaactttaatcaattatttggaaaaattttaaaactttaaaatggagtgggtttgcaatatatcatgtatttctagataaattctagttgatcttacacatatatatatatgcccctcaagtaattttaaagaataaatttttttaattgattgaataatacttcaactttattaataatgaaaatttacatcacaaagaaaaaatacagtatttacattataagtaaactggtaataaggtcgcaaatattcaacattccagtgtgttgacctcgcttttagccaacgataatgagtcaaatagtaagcgatagaaaatataattaaagtaaagtatgaactaataagtaataaaaaatacaggattttaaagaggttcggccccgtcagttcggtaatagcctactcccctaaatttgtattaacttaagaacaaagaatatagtgtttcctctcttgaagctctcacaatgaaatctctgagtatgctctcttaaatttctctaaagtaattctctcgacctccataccagtgagaatggatcactatttatagggctcaatttcccttttgcttacaatgtctatagttggtaagaacatatattacatatttagaatacacagattgtggaatttagacagcttgccatatctctatgatacgatcccagacttatagggattgctttcatgcttcacgatgcaagtcttggaattgctaagtgttgacacgttactcgaattatccacttctcggttgaggaacacattatctgtgcaggtgtatgctgagctttgctcggaacatcccttcaatcagatgcaaggagtaaggtccatgtgtcactagtatgtgctaccacgtcatagtgcaaaaaatggaataacatttgcccccaagtctgcacgggactttcggaatcacgtgtagacttcacctaagccgacctcgcatcaggatgggtgacacgtgttgggtgcgtctgttcgtgatctggtccatatgtcacaataatgttaaaccgataattaaatcaatttaatccgttctaagactactcaaaatcaaaagttttcctatcgataaatagcatgccaataccctaaatatagagaaaataaaaaaattgaggcatccaaatctggtcctaactggttcaccgagatctcacctggtcaaccaaatttacaagttccgattacctagttcccatccagttcactggattacactagttggaaaaacttcgagttttgaaactcaatattgcctcaaccttgcaccaactcatccggaacattttaaacactcaaaacaaacatatccaacaactcagaacacacaattacacataaacctcaaatttaaagctcaagcttgagtctcaaaaaaactcaaacttgatgctttcagcggaaacagtagctactaaccttagaattactcataaccactataatttaagcttaccaaacctaacacttaccaaactatatcatacttaaaaccaagacttttccttcaaaatttaaagagaaggagtgagccaaagttaccttgatcttcttccaattcaaaatttaaattcctagttgaaatcttgacaaaaaatggtgaggaattgttcttaaatctttttgtttctcttggtttcttagggtcaaaggtgaaaggaaaagggaggagagagagaaagtgattaggttatgtttatctagttttcttcttaacacttctaataaattcaacttaaaaaaagtaaattctatatactataaaatcctctaagtgcataatactaaaatcaagcttaatgagtacaataacctttacttcaacaataagtaatctccaaagccagggttcgatgttcataactaaatacttcgaataatcctactaattctatcataaatcaaacttcctaataccacaattatacattctaataccgatatgatatttgtggccaactaatcgggtttctactattgccatacctgaatatattttatttcaaaaattacatttatattacatatatattctgataaaatctccgtaattaatgaattacgcttattttacccatttctaataatagttccatttttcataattaacctagtaagattacaatcttactcatttattctccaaattgacatattacctcatatttcataaaatatgctttacaaaataattatagttttaggatattatatagggttctataggcaaggttctcgcaagcattaaccctcaactaacctatgatggtgttcccctcgatgtgaccctatgagggggaataaacttaggccaaccaaactaagatgaagggcacccatttatcaatatgtttttctttggctaatcccgagaggtattaattgtagagaacatgaagttccccttgttagcatgtgtagttcattaccccctctcttgctgattacctttgcacttgaagaacaagcacacatttttcctttatgtattccattgaacactttttctagaccgcccaatatagtctccaacctctagtacttcagacatatgttgtttatctcctccttatagcaggtatgatgagatattgtgaaggtgatataagtttcggtggtgtcttacttattaatgattcaccaatgttggaacttatttttaggatcttaatttatgaaaatgtatgttgattataagtaatataatctaacatctaaaatataaaatacatacaagaatagttaacacataatagtttaggattgttgatggtgaaaactcatcaactaacttaaggccagaaaattaaaactcaaacacaagacttagaatgaggatgaaaatatgaaaattcaaaacttaaagaaatatttagagcaacaatggaggaagataaatgcttgtatttcttggagtgaagtgttacaataatttttcaacccttcctcacatttgagaaagagatatttataggctctgatgacctagtatacattggtggtcctaagggacatgatgttatccttggtctccaggctgcaggttacaaatggtggtcttgcaccttgtacctttgtctggtgtcaggtggtcccgagttctagggatagtgggtgttgggcaaccttgtctgggatgtcaggccttgcaattgtggtgcctccactacttgtaccttcttgtcattacaacttactggagacgtggatgcactccctttgcatgcacgcataatcttttgtatacatgcctcgtccttgcaattgtaccttcgctgcattcatcttcaacacttgggaaaacgttgctaagcatttttgtatcatcgagaagagcattttcaagtgatatgcatgcaagtattggccaagttgacttgcatgcaagtctttcttgagagacttgcatgcttgctgagtgagttatccttgagcatggtaagtgacatggccttgagcatgctgagtgacatgcaaacttggcgcatggccaagtgacttacattgtccatggcctagtgactttcatgcttcatggccaagtgatgtgcaagcttggcatatggtcgagtgacttgcattgtccatggccaagtgactttcatgttgtatggccaagtgatgtgcatgcttggcatatggtcaactgactttaattgtccatggtcgactgacctagatgaaatcattgttgagtgacctaggttgaaaccatgactgagtgacctagttgaaaccatggccgaatgaccaaggttgaaaccatgatcgagtgactttcattgtccatggttgagtgaccttcataaaaccatggtcgagtgacttgttgaaaccatggtcaaatgacttgttgaaaccatggtcgggtgacttgttgaaaccatggtcgagtaaccttcatgaaaccatggccgagtgaccatggctctcaagcaagggtttggttaagtggtcgtaagccctacttggctgactcttaaagccgatttctttcccttctcgagactattgttgactaatctcgagaattagtcttattaatttttggggtaagcacttgcccctagtccataagaactcttttaagtgttcttttagactaagtttagcatgcgctgtcccttttgcttggttttgcagttgtctctttaggctcttacgccttgagatctttttgtttgagggagtctttcgccacttgggctttctcaacctatttttagatgtaaccttattattaagggagtttagactttttgagcagtctcaaccttctatcgattacttattggatgttaagggagctgattagccttttgggtctcgcttagcctttttttcaagttattggaggttaagggagttgtttagcctcttgtgttgcgctcagactttttcaagttttgcaattctaatgagggatcttatatccctgagacgacactcgacctcttatattgcttatgtggcacttaaagtgcattttgaatgagagaaaataggtattccttttagagaggcatccctctcatagtcataccattttccctttcatttcatattttttttttcactaactcgttcactttgacaattttgattgacaagtatagtgaccaagccaaacatatgcgtgaagagtgttgaatgccatatgtgaagtgaaaacttaacatttcattggtaataaaaatattgaatcacccgagtacatatgcttcattcagaggcctatataggtgcctctttaatttagtgtaacgtactaaaggcaaacttgccattgctaggaaaactttcctatatagtggaaattcactttgaggaacatcttggatatttaattttcccaggttgtagagcggagactttacttgaatgtatcggcttacaagtattgtgggtatcacctaataaaccctatagggatctaacgggctttttgaagcacactcgcttgtatccattttcaagactctcttaccctcctcgacccaaatgtacttctatgctctctcatagaagtcttctatgccatccatttcccttttcaacataattcccccatagtctacttccagggcttactccagcagttatgacaaacttgagttcatcatcagacatcctccctactttggaacctttggcattaaaacgctggatgtatattcacaagctttctcgttcaccatgcttcacaatggtgatacttgttttaggcataacataatcactcgctacctgatgttgttgaagaaattcctccaaaaattgcttccaggatgtaattgttccttgtccaagcctttcaaactacttatatgcagctctttaagtgtgaacaaaaagtgttggaacctttccttgcatgacacctttttcatctttattagctcgtgaaaagctcctagatggaactttggatcagtagtacaatcatatggcgtcatgcgagggtccttaaaattttgtggtagtggttcaatttgaattttccttcacaaaggggaatcttgatcgaacccatcatcctctaaatttccctttgatgtggtatccatctttcaacgtagatcttgcatctatgcttctagctccttcattcttttgttcatcctttctcaagagctggtgagtggaacttgggttttcctcatagtttgcatggggcctgtgagtagtatgcctctcatcccatcatcgtgcggcttcccaccatgatttatggatgacaccttttttttttactttgctcttgaacggggggcacatgcgcattgcatcctaaaatgagacactttgggtgaagtcccttcataggatcataggatgttggtggctgctagtagtatgcttgcttctcttttctggggcaatgttgcgaattgcatggatctcgcagagttagtggtgttgcattttgtaccctaaaattcattttaatataatcagatttactaattaataaaagatcagaaatcattttatnnnnnnnnnnnnnnatgatttatttcatgattatatactta

SEQ ID NO: 15336 - DNA, 5403 bp, Cannabis sativa
  modified_base (4816)..(4835): a, c, t, g, unknown or other
  modified_base (4911)..(4912): a, c, t, g, unknown or other
gtacacaagttaacctcacatgtcaggacaatgttgtcactgagctcagaattattggagataagtcaattaaggtgagtgattttaatggctttgctattccaaatcaaactttgtcagagagattttcaattgattctttctttaccacactggcaaggcttaataatctgagagttcttagccttgtgtctttgggcatctggggtccaattccagacaaaattcatagactctattcccttgaatatctagacttgagttcaaattttttctttggttcaattccacctaaaatctcagaaatggtgaagcttcaaactcttataatgggcaacaatttcttgaatggaactgttccaagttggtttgattcattaattgatctgagtattttaagcttgagcaacaacaaattgacaggtccaattccatcttcaattcagaaaataaccactctcaccaatcttactatagctaacaatgatatatcagggaaattaccagatcttagtgccttaagaagcctttatgtgctagatttgagtgggaacaaaattacctcatcactatctccaatgccaaaagggttggtcatgctgtttcttttcaacaactcattctcaggtgagattccacagcaatatggccaattacaaggccttcaaaaccttgacttatcatccaattatctaacaggcatgcctccagctaaacttttctctttgcctaatatcagttacttggatttagcatcaaacatgctaagaggttcactttcgaaccatctaagttgtgggagtaagctagagttcgtagatatatcgaataacaagttcacaggtggattgcctacttgtttaagctctaaatcagataaaagacttgttgagtttgatgggaattgtctatcaatagatatgcagaatcagcatgaacaatcacattgtgaagaagtgaaaaaccagaagagtaataaacaatctcgaggcaatacagcaattctagttggtgttattatgggaatagttgtgctttctgtgcttttgattataggtttgcttattttgttaaaacatttctgtcatcgaggaatgtctgaacaacacttactgcacaaagctgtacaagatagctcggtttcaggatactccttcgagctttcgacaaatgcaagtaggttgtccaataacaaaattgtaacacagattcaacaaggatgatgatcaaccaataatgatgccaatcttttttgtcttacaggttttatttctcaagctgcaaatttagccagacaaggtcaccaagtatgtcagtccttttccttagaagagttaatagaagctactaacaactttgacaactcttcctttttgggagaaggatcttatgggcaggtaatgctctcatataggatgtatgatatgaaaaacattgatatccccaaggatctttagttaatagttcttttttcatgcagctatacaaaggaaggctaatgaatggggcagaagttgctataaggtgcctgcaattatcaaagaaattttcgattcgaaatgtaagactcaggttggatcttctttataagctgcagcacccacatttggtacgccatttaggccactgtctagatagtggtggccaaggagattacaatctgaacaaggtctaccttgtatctgaatttgtaccaaatgggacttttcgcgaccatctttctggttagttccaaagttttttgtaagaaatgttttttcaagttatgctttttgcaaatattggaaactaatgttgttttctctgacaatataactgataatgtgtagagaacaacctgagagaagtgctcaactggccacaaagactgacaatactaattggtgttgccaaagccgtacacttccttcatactggaatcatacctggtttcttcaacaacagactgaagtcagataacatcttgctcgaccagcatcaaatggcgaaattgagtgattatggaatgtcaataatctcagaaggaactgaaaattttgtggtaaggttcttcatatcaattaattagttctttaatctagcataattatttcactcattctttggttttaacttctatttccttaatttgtaggcaaaaggagacaattataaatcatggtaaggattttctctcatgtaaaccagtttattcactcaaatgtttattctcatgtattgattgtttattcacttgaggaaaactttgtataaactctcaactatctaaactagatgcagttttgtatgtaaccaattttcggtttaacatttaacaatgggaaatcttaattttcaggcaaatgacaagtttagaagatgatgcatacagctttggctatataatattagaagcagtagttgggccttcccaatctgctagcagagaggcatttctgctcaaagaaatggtatgtgcttcaagagtaacataatctgattctgatcatatttgtgcaataaacactgatatatcaatgcatatttgtctagacaactctgcagagccaagatgggcgaaagcgaatagttgaaccaattgttctagctacaagctcacaagagtcactgtcgattgtgatctccataatgcagaaatgcatatctccagatgcaagtcgtccatcttttgaagacatactttggaatttgcagtacgcagctcaagtacaagcaacagcagatagtgaacaaaaataaagaggtactccatgaaaccacaagatttgatatgcttgaagtagaaggacatgtgaaatgaggaggttcaatctaggcagttcttataagaacaaataatatgattcattttttcttgttttagttataacatagatctctgtctccttgtattcttcaacaagaagtcactgcagggtaagaccatactatttgaatatacatcaatttgtaaattaaagagaaatatcaatcaacaagtctttatgattttcctgtaaggttgtggattgtttttgtttttgtttttgcatttttccttttttgagaaaaatgaccttactaaaacttctagagtaaacccaatagataaagcttaagtaagaaaaagagtaccaagagatatcattaattaaataatgttttcaatcaagaccactagacaaccaaatatggtatttatctaaagtaaaagcaagcttaaccaaaatatgagctgcactattagtgagtctagaaacataaacaaaagaaataataataaacttactacaacaatccataatatctctaataatacatctcaaatctcaatatttgcatttaattcattaaaacaattgagttttccataccatacaaaatgcaagtgcaatcacctatccagatttggaagtctcaaatcttaattagtattttcttttaagctaattagtattttcgctgacatgtaccaaatcgtgtcctgaacttttaaggtcattgaaaatactcctgaactattgggattgttggatttaaggacttttgtctaattttattcaattttactacttcaatgattgtttatgtactaaaccatattccttagacatgtactaaattatgccccctgaactttcattcagggtcattttcaatgaccttaaaagttaggggcaaaaatcctaattaccctttcttttataatattattgaaatgggacaattcaaaattattataatacaaactagaattcccctacagaagtcatatttgttaacaatatttatataattaacaaaaattacactaataatttatcgattacattgatgaacataaatacaagaaataaatcttcatcacatcacctataatttcttccatctacactgttttatattatatttacatgtgaataatatttgtaagtcctaagtaggagtgagaaaatttccatagtgttgagtgtgaccatactgaaagtgaaagagaaaaccagaaaacgccattccaagaacaattccacaggccaaagcccctgagattgagatcccaccaataatactattccctcttctttcaattttgatcacatcatcaaatctctcttcttcatcatcatcgtcgttattttcgctctccccactcaaacaatcgagattttccaccgccttaaacgacatcgtttcgtgacgatcggtcaaactccctccgtcaaatttcaccatcattaacttattattgctattatcattttcactttgcaagtttttttgggcctctccgttgtcgtttaagcaagaacaaatgaagtctcgataagaggcttcgagttgtttaattttgtgagacatttcgatcaagtggtctggttctgtgggttcgtgatgaagagtcagttcggcccttaagagagttttgaagaaagccaatctctgttcgaaatcgacgatgtcggagggattatgatgatgattttggtggtgatcttccgatgaattagaagcaagtacttggctgagttcggattctaattctcggaaaatcttctgtaaaagtttgtgatcatgtgccattttttaagagttgatttgaaaaactagaaaaggagtgagaggcggttatatagtactggagaataacggttgcacctcttcccaagtttcttcttttttttttacttactaaattgaagtttttacttctcaatttaatttatttgaatattattttcagggtgttaaacttttgggctttttgatttttacactttaaaacaattattttttatatttttacaaaattctatacagaaacccctattgcaactannnnnnnnnnnnnnnnnnnnacaaaaaatcgtatagaaatccctattgtaactagcgctgtaaccacttcagaaactcaaaccataaatttgaaannaaaaattaaaaaacagtatatggaataattcccctattttacagaatatcttaaataattataacgtatatgaccataaaaaaaaattgactaaaaaaatatttcaaataacaaaacaaatagaggtgtatcgatacatcttttgaagaaattaaatttgacttttcttaagaagattcaattgaaacttcacaactgggtaagcatgcatatctcgtttgtaggtagagtgcaattgattcaatcggtgttattggacattcattgttattggatgagtatctttattagggatgcacacaaggcggggaattggtggggagtgctcccccgtccccatccccgttaagaattttaatccccaaccccgcttattccccgtcggggatggggcgaagaatcccttaataaaaaaataaagtttataataaaatttaacatacaaaaatattaaactacataaaaaataaaatattacacattaattatta

SEQ ID NO: 15337 - DNA, 11233 bp, Cannabis sativa
tatgtcactctacacgtgtagaatagtcctacacgtgtgagtcatattttaaggtccaaaattagtttctcaattttgtcacaaataattattatttattctgccaataaataataatggattaattctcattaatctctcatttcgtaaggattaaaataaatattattttctctaaaataatacattttctcttcaatttctctctttaatattatttaataataatattatatttaactaattaatataattttatccaataaaattaaatagttaaatactagtaaatgtacagtttataattgccataattaattaaaataataatttcacaaattactattttgcccttaaaaatttatttcccatgaaaattaattctcactcgaaatctatttatcaaataaaaattttccatgtacagtgttgtataaatgtgactcggtgaccatgaacctatatttcaaaacttaaataataaaaaaaactaagattaccataaatctcatcagcaaattaatttggtttattaatttcattattattccactataaatatagaattgcactatttgacaatatgaaattatatttatagaattcttacttgtagtcaattaatataatcaatataagtacctctctctaattattacttcataattagatttagttaaaataccattttacccttctaattatctcttgattctttatgtaccattagttcaatatgaacaattaatctataacttattatagatttggatccatctgttagcactctcagaattaacactataaggaaactaatattcgatccgttaggaaagcttgaattccactatagtataacatgttcctagccactcatgttattaagctctcaaaacagaagttgtaagaatcatattctttgagaataactttaatgagtgaatcaaaaaacgcaatgagcacaaacaagagttcatgtatacttaggattcaggctgatttactattgattatcattgtgatatgataaattcttttgatagtaaatgacaagtttgatgaaagatgtgtttattacatatcgatccagtcatgcataatctaatttatgtaacctattaagttttggctaattaggatttttaccccctgaactttgacatgtattaaattatatttcccaaattttttaggtcgttaaaaattccccccgaactattaatattgttagatttaaggactaaaaaatttaaatctaacaatctcaatagtttgaagggaatttttaacgactaaaaaaattttaaaagcataatttagtagatatcaaattcatatggcaaaaatttaaatgaatcttaaatttttttttaccatatttatgtaacttaactttttctttttttaggtaatatggaatctaactttatttttaccataaatattatgtaaatagccttaaaataaaataaaaggaaaaataaataataataattattattttccattaaaacactaaaactcgctgtgccactgattgattcagctcaatttgaaaaacggttggattacgttctcgcacatgatcgccgtcaatcctcctccgccgccactcaaattctcagttcaccgacccgattgcaaccccaacccgacccggttacatcaccaccgcaacaaccaccaccaccatcgctatcgccgctttgactgttgcttcgccttgagctcgctgaggcgatcggggaacctcatgttccccggtaattggtcatggccgccggatttcatctacggaaggcgtggtggctcgtcgtacaaccgaatcgaagatgacttgagagccgaagctagtagcagcgtcggcggtggtgaggatgtttataatgatagggctgaacctgagcatcttgttattatggtcaatggaattaatggaaggtatgactgtaatttgatgacacaaaatttaattgcacagttaggaaccaaattatggtattctttgttgttgattttaaataaattttcttggattagtcaatgtgacctttgaaattcaggggaaaatattgaaagaaaactgttactttccaattggaacgcttatgtactatgtagtaaggcgtttgggttgaattgttgggcaaacgccttaactttaacaaaattactatctattatctctttcaagtagtgatgtcaatttaacctttgaggaaatggggcaggacggatcatttgctgtctctgaaaatattaaacgaggtttaatgtctaatataaaaatatatattattaatatcaatactatttacatatttatgaacccatgaacgggatttttcttttataattttggattatgattgtatctcaatttttttttatctaaaatatcaattttaactaaatgggcctgtttggattccacactgcaacagacccctgccctgtccatcgggggaatgaaatggggtggtggggtgggggatgaggacgaggcctattgacatagccatcactacttaaaagggtgtacttggttagtgtaagaagaggttttttctctgttctcaaggcacataagtattaacacctttgcatcttttccatgtggtttttatcatgcttccaatcactttaaagtaattatctttttagcaaacagtgattttacctctttagtacattttatcatgttgcaaagtagttaaggagcgatccatgttttcagtgatgcagattggagatatgctgcaggccaatttgtcgagaggcttcctgataaagtatttgtacactgttagtgcttcttctcttttgtggctgatcaattatttatgcctttggtgattctcttcttctcagtgtattttccaaggagtatatttcaacttagttctttggggaaataagaaacaaaataatcttatcaagagaagagaaagaaaataaagaacaaaggtggaaccgtggaaggaaaatccatttgtcacttcacttctataagaatacaagaaaaattaaactgcattctcccattttcattttcttttgatagccagtagtcttatctcattacacatcagccttttagctttcactttaacaaaagaaatatattattgaagacttcgttatcatatcatgctttcatctttaagaaatacccatgacaagacactaatttcttctttgaagttcgatagttatccaaccctttcaatggaaggtattgtttgaaattaatatgccctagaagtaagcggcacacaaggtttagggataaagaagtaatttgctttattttgtggataacatatgtttttctccctttatatttgaactttagaattagttgcttatctaacttccacgatgaaattttatccttataaacctcattttgtgccatctgaaatccttgagtatcgcatgccctttttttttaccactacacttttacattagttacactaaacaagtatgctatatgctacaatacttctcatcattaacttatgcacaatatttatctcacattgactcaagaggggtatcttagatggcaagtactatggtttgcacttataagattgagatttgagaaatattgtaggattaggtgaagttaaaaatgtataaatttataatctatatatattatataatatgtttatctcacatttataaatgatactccttttgatactgttcttaaagaaaaattgtgaaccacaccactctagtttcatataacattgttcaaaactccatcattatgtattgttttccctttctttatttatttttcaatctaaatgacctcctatctcaaaaattgtctttcatgtccgcatgctctataatttgtgattttcaaatctcattctgttgtgttcttgtcacttgagactaattcaagtggggttgggtgctgtgatctctcatgttcccaccctcgtccaagaaaatgtggaagtaatatattgatctttccactttccttacctaaatggcaaaacctttaattgttattgacatgcttatttcttaccaaaattgcgaaaggttccttattaccataattgtatgtttacaggcagtgcatgtaactatgcaaaattaacatttgatggtgttgacactatgggtgagaggcttgctgaagaggtattttggtagtatataggcattaatgaccttgaaatctctaatatatgaatctcgatatcttgaataactttgtttcgatgattgtcaatcaatatcatatgcccccctaattttttttaacaatatgaaaaagtttctattgtaagtgcaggtgttgtctgttgtttctgaaaaccctaggatgcggaaaatttcctttgtagctcattctttagggggccttgtagcaaggtatgctatcggaagtctgtataaatctgttccaaaatcagagccttcatgtataaatggaaatcacttaaatgaagaaaacgcaaacactttaatgcctagccttggccaatgccaaggtaaaattgctgggttggagcccatgaactttgtaaccgttgcaactccacatcttggttcaataggacacaaacaggtagattactaaatgtctccctttagttttacttgcattagtgaatgcgagcacatttaaatgtgcaaatgtgttacgatgcttgtgctgatgaatttcatgtatgcatttacattaacgtggttgaatgaaatactaaattttggggtagtttcgtggattataagctgtaagtattttaagctttattcctttctgatctaccatgagattggaatctttggatttaatttatcttaatcccttttcattttctctagctgtaggtgatatcttataatcttctgtaattttcctttttctaaattaaacaattctcttaaaataaaagaaaaaagacgtggtcggataaaaagagtaaaaggtgggcagtcacattgacatgtgtaatgaatttgtgctgcactgcactgtgtatgtgtcttttagtgaatgttgtgacatgagtgtgagtgcattgacatgaacacaaagaggtagttttattctattattatgattgttggggtaagcctttttcatcaatgatctttgaccattttgcaagcatataaaaacaactgattttggaactcagtagtgtttttttttctttcttacagctaccctttctttgtggtctttcttttcttgagaaaagtgctccacaaactgcacacttgattgttgggaggtcagggaagcatctcttccttacggataatgatgataaaaagccccttctactaagaatggttaatgactgcgatgacctaaagttcatgttagtggcagtatgagtttttcactttgtcaatttctgtaacatttgggtctgttatgtaattttgtgttatattattgtttgtttcagatcagcattacgtgtattcaaacgtcgtgtggcatatgcaaatgcaaattatgatcgtatcctggttcattgattctgttttcaacttgtgattgactgttttatgcactagtgtgatttggtctgtccttgcatttataactctatgtttttcttcactcatctaaagacatggttggttggagaacatcatccataaggcgtcaaagtgaacttccaaaggtaattccttttacagttgatggatgtaatgttccacatgcatataattccaagctaaacttattctttccacacttgtttccaggcagatcaacttgttgtgtctgatataacatatccacatattgtacgtattgagcgagagagctctcactatgagcataatggagtgccttcagaagtgatgcttggttgggaaggtttggggattcttctgctattctcttgctgcataattactgtagtagttgtttgatttttgtgcatcttcttgccattatgatttgctcaagtatggctagtacactgataagacctgattttccgttgtacaataacagtagctaaaacaagaacaatagagaaaaatagaggaaacttgtgtatatgttgatattagaaccagagaattagagacaatgtccctaggcaattcaagaggcttaggtcctctccatgatgcagagagtgcttcactccaatccttgcatactcactttattcccttgcacacctatttatactattttattctccactcaaaactatcctgaatacaattagtcatacaccctacaaatggtatttttggctgcaaatacaattttttttacttatataaacctatatcactatataattttctacttttgaattttgtgttattttaatgttctttgttcgtcaatcggtttattttggtatgtaatgagcacttgtctaatgtatatgtagaggagatgatcagaggtctcactcaagtatcttgggagcgcgtagatgttagcttccaaaagagcagacaaagattcattgctcacaatacaatccaggctagttctgtatactcttaatattatgcatgttttaatttgctttgctatttggactttcttttatctcttttacatctaatgatttcaatttgtaaagattagttatagtaacatgcttgcttcttgtgtatttctttactgaatgaaacttgtcaaaatgacctaaaagtcttgaaaagtaagaactgaagacacattgataagtgatatatttgtttgaactattaattgtgcttatacatattctctttcatgttacaggtgaagaggtattggttgaattccgatggtgttgacgtggttcgccatattatagataacttccttctatagtgtcgtttataagtttttttgtcttgtttttttttatccgataggtggctaatggcggttacagctgccgctttttccccctctaggaaacctttttttctttacgtatcttgtaatttgttatccagtgatgtagtatattaaaccttaacatagagacgtgagaatgtcttatattgcaacttattgcttaacacctctcatgtgcagatttttgtttgtattagcttttcagcctgtaacttttttgttactgaagtatcacacaacccttcagctgaattacatcttatgctgtttcattgtttgagttttgtatgcatttagttaatgcccataactcaactcagtcaaaagagaagaggagaaaggaaaataaaaagaagcttgtttacatgacagttttacttttaccaagttgtatggattttccttttcaaattcttgttcgtttagttagataatttgatcaaactgcgcatggagtagcatgtctattttgatatgaaaaagttgtgaagaaatttattatcttttcttccttatgttgttactttttgtttcattttcttcttgtggaatggaaatatagcagtgaaagaagaatgctccatcacatggggtgctgctgacaaccacccaaaattgatttaaaggtttctggatgtactttgaactgtttctttttccatttttttttttttttgagagagaggcctgaagatgttccagaaatgatatgcacatgtatatcttattttcaagttctttacttcactaaaattttgtgcaaagtatttgttgcaaagattttcatctttaaagcccttcaaattgctgaagattgtctaatcctgggaaactgcatctttatcaaggtaaagaaccttaagagctggtatcatatatttctgctcttttttttacatcttaatgtcatgaataattataaataaatgtggtactttagtaatccttcatattgataaagatgtgattgtagtcattgctctgatttgttgaccaaatgggtgattctattgataaagttgtttttcacttttgagagaaagccttgaagcatgcctataatagcttcctggacattttgattaaatcactgaaataggatttctataggtgccataactgtatattttgattctcaacatggaaatatgctgcaagatttattaattcaaactataaatgtagagaatgtcaatagcggtctagatgttaggaactgtgagttggtcctgaacaattgatctctctctctctccctcattaatgaaatgaagatgaatgcttttaatttagtttagtgtttgtttaaatacaattcggtgaaaatttatttctgcaatttttcaggattcatttggagccgggtatgacaaatgttgtagcaaaagaggcaaagacaaggtaatcactatgaagatgaataaccactacaatctttgctttcttttgaacttatgtccgggaagctggatgtaggaaaagagtaaaatagttagccagatatagggatgtttgaaaacattgttaggttgactctacaaagatgtgttgcctatcaccattctttttcttgtgtacttttgctgctactgttgactttgtctggctcttgtttttgtgatgattcgggtttatcagtcagcagacttgataaacttttgcaaaactgatcattagaatagaaacattgtgttacttacaaaagtacatagaagataatttcaaacacattaattaactttaatttctcatcatacttctctgtatactcctatttcccctgtagattttgatatttctataacacaattatttggagtaactgcaatcacctgaaactttccacattcaacagttagactgaagttacttgcatggtacaatacaagtttatcactaacatattacctctgctgatagttcaatatatgatctacaacatcttgtcattttcgtttttcgatgcattttcatctgataaatttggattaaaaaaagggttattgtctgctttatctattgaatttatatgtatatggacagagtgaagcattcatgactgaagagtatttgcaccttgaagttgttcattctttctactgataaactaacatctgttgcagcagcttctattttctttatggtttcatgaattgcatgctccgacccaaactttgtcttcttgttgttgtcatcctatatgtaatatcaaaaatggcctcatcattattcacttaagaaaaatgttattcatacaagcaatggggtgtttttttggtatggacttgccttttcctcaaaaagacctgacaaatcaagatcatttgacatggctatcaattggaaagcatttataaaacttgatgatttgagcgtattcgtctcagtgaaattctcctgaaaaaattcttcaggcattgatacaaaatttgtgttgctgcattgtcatgggaatgtactaatcattttacctcaattgagtcaaaagctgttttaacatcatctaagtcaatgtcctcgtaatgttcattgctgcaactaggaacataatccttctgaaaccattcatcttcaatgatctttggaattttaattctctgtggaatataagtaactcattttagtagtcattacaatctaaaacagtctatatatagaataggatgatctggagtgttaattacctttatggaatttggctcaagtagtctagagattagcttcttttgcctctctgtaaaccattgtggacattcatattgtgccctggttatctttgtatgcagagatatcagtttaagagttaatttatacaaaagtttaaattgtggatttatcattagagttaaattgtgtaccttcttatacaagtacaacaggttgcggtcgtcaaacgggagacaaccagctagtaattcaaatagtattactccgcaagaccaaatatctgctgcagcaccatcatagctcttattcgcaattagctgttgattaatagatgaaaacagtatccatgagaatgaacgacaaccaggtataacttttagctattataatttgcctaatttttatcacattctgttacaccttaatattagtctcatcagtatagttgattaacattttagtggctgagatgattgtttgtgtcaaatactagattgctattggttggctagttaggagtctttgttagtgtagcctattttctaagagggagtcttatggggtatgaagtttaatgtgaattatttagagtaaaatattgctctagggagaaaccaaactattcctttgatatcaataaattacttattctctaattctttcaagatttggtttggaacattagtgtatcacttttattcttgttcttaaaaattaactttgattattttgataacccaagaaaaacagaattgaatcatttcttacctcgggtgctacgtagcttggagagccacatgctgtagataacaggccacctggctattaagttgctaagaatttcagccaagtactcacatatttgattaaaactggtgatgaacagaacaaaattgtaagtttgcatatgctatgtaccttatgcattaatgcacttagtccaaaatccgatacttttatattccctttgctatccaaaagcaagttttctggctgaataagatgcttaattgttgtcattcattctatgtggctttcctgaatatatagagttaaaaaaaatacgaacttgttgtggtttacggacctttaaatctctgtgatacactcccttgttgtggcagtagtctaccacatcaatcaactgttgaaagagttttcttgcctcagattcgtttaacctcttggaatataactgcagatttagaaggattagaaacaaatgatgtttaagaaaagaaaagctttcgaaaaccttctcaccatcttgtccgagagttgtccaccggggacatattccatgacgatatagatttttgtctttgtgcctataacctgtttaacgaaaccaaactagaaaaatatagtaaagaataggcaaacacttaagttgattattacatatacatacctcatgtatacgtacaatgttggggtgatgtagaattttcattgttcttatttctctttgcacctaataaatttatttacatacatacatatacattaatactattcatttgtttattgttgacaatatatggatatattactataataaaacaaattacatgcctggtgcattagattagtgttttggaccatgagtttatcaatgaccttgagtgcaacatactccccagtagtgctatctacacccagcttaaccttggcaaatgtaccttc

SEQ ID NO: 15338 - DNA, 2748 bp, Cannabis sativa
gtttccatccacaccactcaacagtcaaacatgttttgtgtacctttagagcatggaaaggtggagttcttttgcatttaaaacagctgagtttcgctgaccctggataagtccttacaaggccacggatttgaacagcaacttttttatttccactcttaccaacttgttgttttatgatgttctcctcttcaaggacatccttatcatatgccggaatctgctcctctgatggaggtaaatccacgcaactacaaatgacgccttctacgaagagaaaaggaatataaaagcataagctctaaaaaccagcctactagaactggtactagctgaataccacatttaccttcatgttttttgccagcttttcctgtccagtaatgaggttttaaaaagtaaaaagcagatttccgtactccatattcatttgggataatgttatcaaagtaaattgccaaaccaagccagacaacaaatgtagttacaaaccaggtacgaatatcactctgcaaagcaaatgaaagaagatgtgagtaacagttaagaaaagagccgttgccaagatttgtagtttaagctttgaatttagtctcatacaattgttatgacacactcattatcatttggtgcacattctgcttgtctgctccagctgatcccaatatcttggggcgtggaagttgcatcagcaagcagatatacagctttgttgaaaagattaggtgggaagagtgaccaaaagattcgaaaaggttttgatattcttctattgtaggggatttggatcggtccaagtagctgcagagacaaaatgaagtgttttgttactagtgtactcatgaaaagttgtattgggaggaaatgagaccgtgcctggttaactgtggagataatgaatattgtgaaaccaatagatggagccgctgacgagtcgcttacaaagacagataacatgaaggcaaagccgagctgttatcaaatgttaattagtatcaatgagacttatggaacagtatagaaaggaaccatgaataagaagaaagactgataatcagagagaaaaatctcaccatattgatctggaataggaagaacacaagaaatataacagcagaactattgttcaagaaaaagtcaaatttgaaaatgttgccaaagagaagaatgagtaatgaagataaaaatgtaagaattccttcccatgtgagacatgacagcaagtaagccgaatcataaagacccatcattgtcattgcctgcaagataagaagaatactagattaaaagtgataattatttatctgatgattattgtttggctgagttagtgtacctgtcgaagttttagttctttctccaccaccaaagaactcatctgaagtacaaaaccaaacattgcagttgcaatgaaaaatggtggtcctacagtgatcattgcagagagactctccaccttagggtgtgcaaactccttaaatgaaatcacccagctaaagtttggatctgacaatgcaaaaagctcatcacacaaaacaagtaacacatgtacagttacagaccgaaccgaatgctttgaaagttaaagcttgttttagtttatgatcatgcaataacattggtacctccaatgagagacctggcaatttcacgctctgctgcaatctgaagtggtatttgaaacttgaatgtggggtcttcatagtttcctcttttctctaatggagttgaattagtctgtataccataactaattacagaagcatttagttcagaaaaatgcaaggctcccggggtcatcataggattagaaaacagccactcatctacttcagctgttgattcaaatgacataacctgcagaagcaaatgaaggttgtattatgtgacaaggaagctcagtactctttctagtacatgagatttttgtttttttcaagtaattatactaactttagtagaaggaattggccttccgggattgttctccatgatggagccaacgattctttgaattctggcgcttccattaccgctccagatgaagtcgaagcaaccattgttgatataaaacttatcctcacatggtgggattgaaggagcaaccaaaggctgaggatccatgagagtcctgtgagaggtggagtaagagaagcgagcatcgatagctttctgagtcacaaagatgaggaagataaagaagaatgaagcaaaaagctgaaagaatgttgcctttctgttcctccatgaaagcaaaatgttcttccagaacaaggccttgtattgttggaaaaacaagccaaatccactcctcagcttcatggctaataataataaaaatctcaaaaccactttttagctagaatgattgaaaatagaaaggttaaagtgttgtgatatcattgatatgcatcatgtgaagtattatgaaatcatgaaagtactcaaaatgtagtgtgatatttagtacaaaatagagtttgaaggataatgtaatgctcacgttaatttatatatacatgtaaatataatattagagtttggtgcgtataagattaggatacataagagacgttaatttctaaagaggtagagttactagctgtgttctattaatacttgtggccgaacaagatgcttttttttacattgttatagacagtgaaaagaaaaatcagcattcaactgtaccgaggagatagtgtattggattgggatatataccaaaaacttatacggctcctttta

SEQ ID NO: 15339 - DNA, 8043 bp, Cannabis sativa
  modified_base (1558)..(1563): a, c, t, g, unknown or other
  modified_base (7977)..(8003): a, c, t, g, unknown or other
atcttcggaagacaacctagcagctttaataccaaattgtaacaccctactagtttaggcatgttaacgtgatttttaactaacttggagctcgttgctaatcaaagagtttattaaaaatcgtgattaattaaaatttttcttaattaactataaatattaacataacatacttatataaaagcgaaatcccgtttataaaagtatttacaaaagtgtcactgtacatatacaaaagtttgtcacctagtgactatacaaaatcaaccctgatgtccctaagattgtatgctccagacctaactgccccgacatgtacaatctctatctgctcgttctcacggttgctcaaccttagctttgctgtttcctacacatgcaaacaataactgtgagttgacggacttagtaagaaacgcataaacaataacatagcaataacctagattataatcaggcacccataccaccaatcacaactctatcctcgtgtccaacacggtgctgagtctaaaatgttcatactgacagtactattgaccataatataagcctatactcagtacgctagtcatactctagtcgtatcgatgtgatactataaattagtacagtaatatcgaccataatatcaccctatactcggtacactagtcatactctagttgtactgatgtgatattgtcgaatagtacttaagcaaacatacatttcttatgtaatctaacaggcttaattaatatgcacaataaacatgtaaatagcataccattatactaatcttaccttgtttctgaattcatgtgtgttggccaacctgagtggaacagctgctcgacgaattataggcccctaaatcacatcattcgtaaaactggtgagtgacgcactaaatcactttttggtgtcttaaacttgaaactaaaagtatccttaataacatgtcaataccctaaatattgtaaaaatgggaaaagctaaggttcccaaaacgtccccaaccagtagatcggtttcccaaccgtaattcaagttctgtggggtttcttgaggaccaaccggtcgaccatttcctataggcccccctgaaccggtcgaccagttcagtgcatgatagtttaaaaaattcacaactcactaaaatcaaccccaaactcaaccaaaccttccagagctattcaatatatcacaaagaacatatccgaagcaataaaacaccacatcatgcacaaaatcaaaatataccattaaagagcaaagcttgagttgttaaactcaaagcttgctcaaatatgacaacaacccttaaatcctctataattaaacaaaactaaccttaattaaacttcagaaaataaactcaaacaactacaacacctaaactcacaaattcatgcataatttttaaatgaaagccttagaaaacttaaagagaaagatgctagtaactttaccttgaattgaatacacttaaaacttgtttcaatgactgattgcaacaaagaaaaatccccaacagctgctcgtccttgagggttcaaaagagagagagagagannnnnngagagagagagagagagaagatggtttttttcttaaatttccttttctttctaatttttttaattttctaaaaagatcaaataacccataacataattaaaccatttgtggccagctaccactctaaaaatcagccaccactccaaaggtgaaatgacaaaaaaacccctccccacaagcttaactaacaaaatggtctaggggtaaacttttcatttccaaccctcacctgacatttctaatgtctgactataatgccccgctatacttaaaatactaaaatgtgattctaatggccaaacgccgcgttccaatgttgtcgggcacaaaacatgcaaaaatataaattttcatatatggtatatataatgcattctgaattcaaataaatccccgtaaaataataattcataactaatatgcaagtttcataattaaaccctaattatctactaatttccaacttatggttaaacggtctttacagggacccataggtaattcctgcccctagtgacataagtcttccactatcatcaatgtctcttaccttggcggcatcgtagcttttaagctttcaccttgttgttacttcacattggcaagggaggaacattctaactatctagccttggcgacttagaattccttcttcaagtcatgtgagagtttgtcccatgaggtaatggagtgcctcttaaatttcttgaaccaagtcttggctgctctagtaagtgttacaggaaataacaaacattttaagtcaccaactacttggtgggcacacataagtgtgttgaagtcacttatgtgtactctgagatccgtactcccatcgttcttggttgtggtcgacatcttaaacccttaccgatatggtagggccaatatcctaggagagtaaggttttagctcctcattcgaatcatatgcaatgacattttggttatttgttaccattagttaatgtatcatttgttccaatacattgagcctagggtcattggctcgtccttcctaaccatggctagcttagggaatattgtttttatatccccaattgatattattgttgttatttgctactggtgaaattgggttctaccttctactcaaatgttcccttaaatcaattttctttgattgaggtgttgttgcaatgttcattattgtgaagtgaattattatgaacactaatggaacgacttttggagtcaggtcgaccactatcctcagcaaagctcactgttctttattgttgttgatgatgaagagagagtgggggatgctcaaagtatggcgtcaaaggagtgtctaatttacacacatagctattttcttgggtaggttggtgcctcaggggcatcctttattttttccaacaatatgttggcttctgacaagcacgatcttcatgaggagtggtgcgttgcttatgccccctaagtggttgagcatgtggcgcattaccatgggaggtggattgccttggtttttctagactactacaaattgacagatttggtaccttatagtttatggtggtgcttgaatcggagaaggatgcactctcttttcttctccacccatgttattattctcatagttaggccttggaggaacagtttgggtcccatgagcatcatgaccactcccatgtaatggtaatcgactcaaacatttggtcaaagtttgtggtccccctccttgttggattattcatgggggcatgttctctccttaggcgccctcttcttctcctaggtggagaaggatttcttggtacaggaggttggtccccatgtctttgggctagctattggagctctctattttggcgtaggctttctgccaacaagacacttagagtatcattttcttgaaacacttcatgcacatgtatggacctgactggtgggcactccctaaatggagatgaggaactctcacaatcttgtacatgtcccacatcttctggcataggtggcatgggatgcttttctcggtacctacaggttccctctccatgttattgtggagggactaaggttccttcacttcggggttagttaacttcccccgttgggacttcagcatcctcctcataatttttcctcctcgtactcaacaccattattgtaaaaaaaaggtaaattgatgagttttcaaaaggggaaaatagacaaattttcacctcaacactctcaatgaaagaaccaaactgtattaagagcactctctaatcctctcaatgaaagcaccaaactgttgttgcggttttttgttaacaaatctatgaagatcgtaaaaatatagaggattgcgatgaattaattttgactaataaaaccacaatcaatatatttgacatgagatatttatagtagttcgcccccatgtcacgatggtaatggggctacgtctacttttgtttttattaattagatctaaaacactagatttatgttctcaagagtgtgtggataaaaatacagtaaaggatttctaggtgaaatcttaaccgagacttatgaacattggactcatgggagactcaacattcataaatctgatcaaagttggtggttgtaaggttcttgggaacaataaaccaataaagtagaaaaaagggatatgtatcattgtgtttgaggtcttggtgtcgattgatgatggtggactcaatggaaagatgaaagagtaagtgtgatgttcttggccgccgtcaaggatgtccaagagagaaggttcagaagtgatagtctaaaacaaggtccataattcagcctcttactctcattatattggttgtagggttagttagtgatccccccatatgtcggggtgtctcactaacaaatcccgtatatcatcttttttaatgaataaaaaattataagagaataaatatctataaaaatctccttgtttctaggccaaaatcccacattggaaaaattgttacttttggttgaggatgcgccaacttgaaatgaagtgacaagggatgccacctctcggtttggaattcatgatattggtgacaagtgctaaaaacatgtgttttgggttattagtgttcgcatatgatgccacatgggttgtggcaatatcctccaacacccctcgcttaactacactactcaattcccgagtaaagtgtaccagtctatcttatgagccaattttggacacgataacctcagaattgggctatgactgacacacttagatctgtcttcaaattatctttccaatgcaagttaaactggatcatttagataaaaattgagagagttatgcctattttattgaaggtaattatgctatcttgtgctaattgcgagcactgacatggccaaatggcagtgctcagccatgcatgttgttggacccctcagggtgtgttttgacttatttttttatggtgagtcatattttgggggtcttgggagcccaaaacctcttttcaatgtttgaaaccctaacatgagaccactaccaccggttggggctggagagtggcaatagtcggccatggcttataggaagccatggattttgtttcttgcttatttcattcatatggatattagaaaattactttggtcacattggttcttgaccaattttttaggagagcactgccacccttttgccaaaacaagtagcagtggtcgcataagaggctcatgaagccttccgtaacttttctcacttgtgtttaatacattgatgttaaaaatacaacttggctaatgaaactcctccccttatgtagtggcggactactgccaccaattgtgccaaaattgtggcagtggtcggccaagtagtttccacaccactcggtggcttccttctctttgttttgacatattaattgtaaaaatgtaattttgacaaaaaatctcaatccccctcttcatggtcgaccactaccactcattgtgccacaaaaatggcagtggtccgctaggcatggttcttggtgagaaatggtttctttcacttgtgttgcactccttgtttcttggtgttgagagaacacatttggacgattttcccttgatgttttgtaagtagcgaccactgtcgttcccttgtggcactgctctccaaaaattggagagtattgccatttccatatggaagtgggcgcataggtcttattccataagagctttattcaaatttgactttatgcacaaatctaagtcatttcatgcctaaatgagtcaagttcttgttggtttccttggcggattgagatctctagggtgaaaacgctcgtgcgggcctaaccatcctaatttgagcacacttgggtgtgtgagtcccgacaccaaatgcttagttaatattttcgaatcctctagagttaccatgggaccctcaaaaaggatgtcttaactcatgcatttaacatttataaattttggtcaaagtcgcaagatcgacttttttaaaaaatttcgaaaatgaggtataataaatttatttttatttttgtgattgaaaaataaatatgtgaacaaacgccaccattaaataaaatagattttgcttttctattttcgttcacatgttaatttggcatatatataagttttaaattatttgcatgatttcataaattttatactgttatagatatataaatgttattgcaactgtatgagcatttagaatataatgtgtgactttctaaaaaaaataagcaatgtaatctgtgaaagctcatctgaaacccttctaagaatatcttttctttcttgttttaaatatgccctggaaaatgctttaataatcacatcaattatgcttgagttttttatttttgggatgcaagttatgcttatgattgagttaagaaattgtaaccaaattaagtatttggtttgacgttaatatgctgattgacatttatagattctcatgccaatcatatatagatatatatgtgatcatacatcgaacttcaaactatatatacgtgatcatatataccctccttccgggcaattacttccttttaatttatgtgatattatatgcgaatgtaccaaaatcagaataactttaattaaagctgtttgaagtgatccagatgcaaacaaaatgaaaaaagaaaaaagaaagaagaagaaaagaattattaataaatctggtcaatgaattattaagaactaaattatctttacattgctagtgatcaagctttttgtttaattataaaaacaattttttttaatacatgaaaaaaaaaattattagttcatataccactgatggagcaattcattaacataggggttgtagccctctcaaaaaaattatgtattttacatgtattatgtaaaaaaaaataaaggaaattttatttacaccgaaaaaaatttctaaatacatcccattttaataatttttattttatttaaaattaatatctttaattatactaaaattttttaactttttctttcaattcatattcttaaaaaatatacgtatcaaacaaaattaaattatattttaaatattatggcaaaaaaattaaaaaattatatgaaattttcttagaaaaaaataaaaacaaaatatacatgagttagaaaaattatgaaaatgaaatcaaaataagtagtgaaattaacataaaataatgtgaagaaaaaaatttaagaaaatattaagaatactttttaaaaattatttaagtttatattttttttttaataatggaatgtatttataagtttatggggtgtaaatagaactcccctaaaaaaaaattatatagttatctgtaattttccctcactaaattaattatatacaatttgccctttaatttgtaactcctccctccgcctcccggtgttactaaatattatactatctcaaatagttactaatttagtgtaaaatttatatcaattaagtatataatcttttacttcataagtctaataattcatatcacaatattctacaaataaatatattttacttaaacaatttcacattttatattatttatattaataactaaatataactaatttatgaaataattaataagaattatatcatagctactagtaagaatttaaaatcttaaaataatttaataaaataattattcattaaattaattaaacactaaacatattttttttaaaaaaaaaaaaatccttattgacactactataaatatgggctttagatgcactttttaagacctttcaatctcattttttacaaaattcgctactaatgcttttccagacaacactgtaaagttaaacataatcgatgttacagtgtacactatagcgtcaattattattaaataataaccgacggtatatgcacactatggcatcagttattgtaacaccctaactatcnnnnnnnnnnnnnnnnnnnnnnnnnnntactgtgcagctcgttgctagtcaacgaggtttatggaaa

SEQ ID NO: 15340 - DNA, 4851 bp, Cannabis sativa
ataaaatataaattatttttttttaaaaaaaaaaataagagattcaataatttttttttttttttttttaattagttttcttctctctaacaacgacctaagattcctctctctctctctctctctctctcagataccaatgatgactcactgagtcactgagttaccgagttgcttcactacctttcgtcttcatcctcttctcatgtgctaccattactacgatcctccaaaaatctctaaccaagggtttgcttctgagctctgcaaccatggcattttggtggcctctcatcgttctggccttcgcttacgctatttgtaggttcctcttcatgcttattccccccaatgtcccctccatcgaggtcgacgcttctgatggtacgcttttctctttgtatctactttcatatgtaaccttgacaatatgaatgaacttatttaatgattctattagttataagagtgactggtaatttactttcattgattcaatacagttatggatgatcgaaatcagatccaggagaacagtttcatttatgtaagttcttccatactaatcattcttgatttggtttctctttttgtggaatttaccatgtaatgagtacaaattgggtgtgaaatctttgaaaattccacttaatgagaaataattggattggtgtttttgtttgatccgtgtgaatactaagaggcaaattgacttgattttctttgattgatctgagttagattggctaacgaatgacttttttgtttctgttttagtccatttatagtacagttagctctctcaatctagcaaagtaatcaagctaataataaaaatattccagaaggataaattgagacttatttcagtctaatttatgatgctggtatcgaaattgatgctaagatgagggttttagtacagtatttttagttggatgaagcttttgtttctccatataatactttctcttcgtgcagatacctccaaggggaagggcccagcaatctgataccaaggttcagtgctatgaacctgcgacaatgaagtacctggggtatttccctgcattaacacctgacgaggttagtgaaaatgttgtgtgtattttgtgacttggataagtttgctcaacttgttctgctaattagtttttatcatatactattctctgttggattgcacagtttgactaaggaaaaagtgatatgggatatgacaacatcattattatgaactaaaatcaccatgtaattttgtttctcaggtaagggaccgtgtagcacaggcaaggaaagctcagaaaacatgggaaaagagtagctttaagcaaagacgccaatttctccgtatacttttgaagtatatcattgaacaccaagagcttatatgcgagtaagtttggatactggatatagaagaaacttcttctacttcttctccactcttttttctttgattggacctagaagatggaagtaaagattatcgtgtatacagtataattatttgtttgtaatttgctagaatttcttcacgtgatactggaaagacaatgattgatgcgtctttaggagaaataatgacaacttgtgagaagatcacttggcttctctcagagggtgagcggtggctgaagcccgaataccggtattttctccattagaaagcctgtatttatacctatcatcaagctactttttatttatttatttttattttggtcttatttgggttatctcaggaatcagtttcaataatattcaattatgttaatgactattttttgcttgatgctattcctattaatgaaatatcttggagacaaaatacatttcatcatgtagtgagccccctctaggccatttaattttctttttgtactcggcaaaataattgatagtttcgatcactttctgggctctgcttggttttacatgatatgaaactctatgtaagcacagtttgtgttgtttctccctgattacagatcttctggaagagccatgcttcacaagagatccagagtggaatttcacccacttggtgttatcggtgctattgtttcatggaactaccctttccataacatttttaatccgatgttagcagctgtcttttctggaaatagtattgtgattaaggtgcttattgttatgcaaatatgtaatttgtatttctttttatgtatatgttgtagctttaatggaaatttacaatggcacatctgtctagttcttctattgcctcttgtatcttgccactggtacatgtagttgctcctatctttcttcatcgatgtggataacttggtcatatagacatatataatgaaatttggtagaacttcaacttagaaatccttatttttcaagttcctattttctcgagtggtattgagctttgatccttgatttgacgcttgacagagaccatactgtcgtacttgtaggtttcagaacatgcaagttggtctggatgtttctactttagaataatccaatcagcccttgctgctgtaggagccccagaaaatttggttgaaattatcactgggtaatttttcgaaatagtatccttgtgtagtttgtttggtccttgactttgtcttttattttgctaacaaacatcttttgtcaggtttggtgaaacaggagaagctttggtgtcttcagttgacaaaattattttcgtggggtcacctggcgtgggtaagatggtatgatcttcttatggttgattttaaattttatccttgctttttaagaatttccatggttctgattactcatcttaatctacagctcccttaactgtcctcattttaaccctattagtattacctcccaacatgagcgtattagttaatttgtgttttgtagagcacaacactctagttttggtatttttaagactgcaaccattaatcgtaaagctctattatagtaaccatcattactaaagatgtgcctctagacagaacactatatgatgtcttgttcatttcatctttttgtgcattgctttcatttcaaactaatacccttttcagttaatacttgttttcgaggttgtgaattagttttttccaggctaatcatgctactcttgattattccttggctatctatgcagataatgagaaatgcttctgagacacttataccagttacacttgaacttggtggaaaagattcatttattgtatgcgaagatgcagatgtggatcatgtatggattcttccgaaccatactaatgttttgtgatgtaatccattgggtcaaatgtgcagtaagtatattctccattgtttttcagttttaatagtagatttatgcattcaatccaggttgcacaaattgctgttagaggtgttcttcaatcaagtggacagaattgtgctggagcagagagattttacgttcataaggacatttattcttcctttgttagtcaagtagccaaaattgtaaaatccgttgcagctgtaagttgttccctctgaaacttctgtagatgaattttattgttggctgtaaactttgttttaatacatggactagtatttcaggttcagttatattaatttgaaaaagaaaaagagaacaataaatttttacaagtttgaaataggatagttcgttattatgttttcctttttgtcttgtgaggaataagactgactttgttctttagcttgtattttgtttttttcttttcactttgttctttagcttgtattcattgcaacatggaattagtgtaaatgaatttggattgtgtctttgtagcggattataccttttaatgaatttctttagtcaagaagagcatgctcatgattgctgaacataaaagatgaagttaatttccaatataggagtggcgagtacctaaacattttcgctctttatacacatgatctgtcttatgtttcagggcccacctcttgctggaaggtatgatatgggagccatatgtttgcaagagcattctgaaaggcttcaaaaccttgtaaatgacgccttagacaaaggtgcagaaattattgctcgtggaagcttcggtcatattggtgagggtgcagtggatcagtttttccctcctaccgtacttgtaaatgtaaatcactcgatgaagttgatgcaggaagaggtactgcaaatggttttctttcatttggattataaatttctccagtgctctttaatttacacttcctgtcaattttattaatgatcgttatcagtatagtagcgcaagaattttcttttaatacctcccgacttcttggctgatggttttactccctgtttggttttccatttttaggctgtttctataaaattatgtatatgctgaaaataaaagatgactcttactgatagaatatagaatgtagctaaaaatgaacggtatcttacatctactcacataaagcaatatatttttttttaaatttttgtaggcatttggaccaattatgccaataatgaaatttagcaccgatgaagaggctgtcaagcttgctaatgactcaaaatatggtcttggctgtgccgttttctctggcagccagcgacgtgccagagagatatcatcccagatacgctgcggagtagttgcaattaatgattttgcatcaacttacatgtgccaggtagttttttttttccttcttttttggaatttactacattattcttgactttggttacttaaaaaagtcagccataaacaaagtagctacatttcccactaagaatggaagaataactgaccttttttctctatttgaaaccaatttagtcttttctattgtcggtgtttctttaaatgcactctcccc

SEQ ID NO: 15341 - DNA, 2446 bp, Cannabis sativa
gaaagtttgctctcacattgtctatggttcaattctttatagacactcacatgctggataatcttgattattatggtaacatgaatacctgtatttctcagagtatggaggtttttttttttttttggtttgttcttgtaaatttttcctttctgttagctgttctgcttctgctagtaactgttttctggtcagtctgcttgtatttattttttccactaaattgacacaagtccgttgtattgtttcaaaaaataaaaaatcatgattttcaacttttgaacctgaggtggccaattgttgtatggtattttagatatagaattctatgcttcacagctttatatgttaaattgttaatggtttagctctgaacaatttattatcttaaaaatatcttaggaatcttgggaacaatttaggcaaaatgataagtagcttttgaatgatgatctctacttcatatttgtcataatttattacatttattttcaggttggaacaaaggttgcagctgtttcccgcaagacacacaccaccactcatgaggtgttgggagttctaactaaaggagatacccaaattgtacgtattgtttctaattttatcaaaatcttatataatgtcactttgtgattatagtatactgtgtgcccttaaaaataagattcataacatttattaagaaaaagtatttataatcatagtatagcctaaccaaatcccttattccagttgagctacagtagattttatacgaacattaattaaatctgagaaatctgtggcatgtttttcaatcaaagtaggattgcctaaaaggattataagttcatatacatgagccaaattgcaaccccaaaactaactctatctgatcaaaagctattgtagctgagtcatctaataaaatgcatatttatatttacatgtttctactttcagtagcttcgttttattttgggcctgtaattaaatatttagctgtgtcaatgtggcaaatatatagttttatgatgagattttctgattaaatgggaactttttacatttcttttaaatgctagtattactctctatccattaattggaattgcagtttctgctgaaaactaattatgttatcgttgatatttctttcctataaatgcttccaaatagtgtacaaacttaacatgctgcatgtaatgttgatatttcatttggtctctctctttaatagcattttgaagattctcagcattgagataattggactaaatacaagataagaaaaatttattgactcctatacacttgcacagtgcttctttgataccccagggcttacgctaacgaacaacggacaattacacaaagatttaaaggtccgtgtagaaagtgcttggagctcaattcaattatatgatgtagtcatcgttatctttgatgttcaacgacatctaaccaggtatgtgtattcattgactgtcattattttcattctatgagaagcacatttatttctttgttttggcactttgtgcttaatgtgctacatctttagatttttgttagtttttattgtccctttagtgtctatatctatttatttattgtgtaggtaatcgattgaataaataatgctttagtttgatattggcagtgacacgctagaagaatgccttaaatttacactgaaagccgataagcttatcgaagatcattattctatctgattgtatagtagtttaaatggtttacttcatttgctagtactttatttgactcatattttttattatctatttattttagtaaactatattattattttttttggtaaagaaactgttgacgctgaaaagtagttaacaccaacttgctagattgacgagatgaataatgaatgtaagtatataatttagagagacaaaatttatagtagtttatttctcatatcgtatcgcgatggtaatggagctacgtctacttcgagtttttatttctcacaagatggtaattacaggaaaaggctaagtgtttaagctctggtttctagagagaaaaactagagagatgctctaacattgtggatagttttctgaatgtgaaaaatgagctaagagagctcttcttttatagttgaaggagacccacaaaaataggagaaaaatacaaatcagatgttttcgaccgtagatgatgatttaatgatgaaaattagcttctgacggtgatagtcatttttcggagcccggcgagacgcgctgcgggtaacccgaagcttattttataacttccttgggggctaaatttgaggtcgatagtttcagaattgcaattgaagtgtgagacatgacttgatagagcattaaattagctttgaaacgcaaattgaatcgcgtcaatcggatcaatattgagtgagtaatgactgttttgttgaagactgttcatgacccaa

SEQ ID NO: 15342 - DNA, 9417 bp, Cannabis sativa
ttaaaaagtaaaatggattcacttgaaaaacacaaattccattgatattaaaaattaatttagtttgacattcccattattatcaagtctgaatctcatatcaaacactccctaactgaacaactttgaatgatgagaaaatattgatcaactaaagcagcatcgtacgaaaactaagggaacttcgaagaagaacatgactcattcgtcaattgttcaaaactttcatattaatgtataatcgttacttgacaatatatattaatgagtgagactcagagtactttcagtaccacaattaatacaatgcccagtactgtctaatatagtaaataaaatcttacacgtttatataactgttatctcaactaatctaaggtatataaaaggatcatctcatgaagtataatatattataatctctaaagtaaaatgataaatttttttttttcttttttcttttaagtaaactaaaccatcggactgagagaaatacaaaagatataatctctactctagctagaaattaatcaacaattagccacaaattaaaattagagttgtactttgggtacgtaaaataggccttggctctaatatgtcatatatatttatatgtaacataggatatattcttcttcttatttgttgctagcttgttaattaggttaaaaaaccattcaaatatacaatagaaagagaagttcaaagacaaatttaaaaacaataatgaaagttttcccctattaattacttgggagttaatagtttcaaatgaaacttaagacatatatatatatttataaaggctgattacgtacgatgatggccaaggcggcctgtgggaacatctcatcatcatcatcatcatcatcatattcaatagtgcaacctttctttgcttgcgatgaagatgcccatcaatcatatccttattttacttattgatcttttgctttgcctggctttacctgtgtgcctttttcttacataaatgcctctttttttccaaaaccagactcatatataatacacataatagaccggcccatatataaacatattgggctagctttaatttcgcttttaagcgttagaaatcattatatgtatgtatatctatgaatataacttacattttattagtagtagacttttcagggcatattattatattattccctctctctctatatgtattgtagatatatgtcgtcacttaatgaaattaattcctggttgtaattatatgagtgcaactgcaagagacgctacagcatatatatatacccttaaaaaaaatctagcgcaatgtattggtgcagtaaatattagactagtagttgggtgagatgatgatgctcaatatttaaagaaaaataaattatttttaatggttatacaaatagtcacaaatatatacatattacagtagtaatagaagtgtagtactaatgctactgcactcatcacaggcaattaataaatggattcaatagggaccaagatcttgactttacataaagaatagagagagattggatatattattctcactgaagctagtcaacatgcaaataaatttgtcatggctggtgggttttgttctagctaaccactactatattatatttatttatatgtatttacatttttatttattgtcacttaacaagactgttggtgaatcataaaaacccattttccatatgccaatttctccttcctaatcacacccctctaagttaatacatacacgtgtcatcaaataatatggaataccatttggtatgttttagttgattaagaaaattagcatgttaggaatgtttttatcatatgaattaagtgtgaagattatattgtttcataaaaaccggcccacaacaaattaacgaacaaacaagtagggtacgataccatatacaacttaggataacgatatcttaagattagatatgacactttggtacaagttacattgggatgattatattcttctgtgttgaaattcaaatcgatcaatgatgataagaaataaggatgatgaacaggataaacaactcaaaaccgacaatcacaagatgcatttttattttgttttaaaaaaaaaaaaaagtgggtttccatcagctctcaagaagtttcttgtcctgcaagtggaggtgatgaagaagctgtgtctcaaaatattcaacgtgggaaatcattcccctttttgaataaatctatagaagagaagaaaagaaaaaacataataaatgaaataaggcaaatatttggtgaacttccactcaaaatatgtaattagcctttaagtcaaactataatggatgccttttaaatcctttttgcccatttcaaagtatgtaattaagttttaaggattacgagcaaaaaaaaaaatgaaattttaaggttagtgattctgaagatttataatggcatttgttcaactaagtaattattcaataattgaatgtaattgagaaatttcaattacactttccaattactacgactccagtgaaagttttttttttttgaaagaactccagtgaaagttaagtgtaaatatactatgattataaaatattactattattaaataattaatattttcttgtaatatataattacaaacatatttgtcaattgtaaaaattactaataaacatcaaaagcattttatttcaaatgcacctagaagaaaaaaagcactcctgtcaagaataaattcagcaaccaaacttcgattaaagaatgatgaattattcctaaacaacaaaattaagtggatggaaactaaattacttattcaatctcatgaaaatcattataaatataaaatatggctccaaatatgacttattttgaatgacagaatcattcattagatagcagagaccaactcaaaaataataaaaaaaaaaattggtattactttatgaaggaagcattcattattttattggtttcttttttcactgaagaaaaaggaaagggtaaaaattgcaggccgaagcagaataccatggccgcttacaggtcctgcttttatacattggattccactttttctcatataagttctccaaagccataaattatacctcactgaaacgatttcctaattgaacagagaagagtatgagtggtaatgacaccgaagaatgaatgagtgagcttgcagaaggaacagaaaggcatagaacatgaaaatttgaaagaaacaaaaaaggcacatcgcatactcaactattgtgagagttcaagattcatcaactccaatgtactgggaatgagaagcagcaagaagggcagctccgattcctgatccatcattagaatgctcaataacgatgctttccgagactttttctcctagcaattctgctatggtagtctccaggcagttgctgtatgcactataatgctcatacagtcctccatccaaggctatcactgtcttttggttctccccttccttggttgtttctcttcccaatttcttcagaatgcccaaaatcccagcagcagcaaggcgggccccccgagttgcaacaacgtcacagagttgaacaattaattttcttgctttcagagacgaattaggtatctgaatcaaataaaaagatatacaagcattttatataaaagccatttagcaaatacaagaagtaatcacattgatttttctccagcaaatattaaagtttgtcagatataaaataaatgcaaaatggcccccatgcaacagaacaaaaagttacaaactactgtgaaatttagtctgaaaatgaacaagactactccaacaatttagtgaaagattaagtaaaataaattgactctccccaccctggccaaggtagaatgagagaattacctccaaaatatccctcaatttttccgctacaaccttaagatcgggagaagtatcatggtgcattgcagacatgtgaggagtcctgcatgtttcatggttagctataagtacaaagtgagctcaacaaaattacgcaaagcatctcagatgtggaatattaaaatatcagacaatcacaagaattgtcttgagaatttcagaagttacatagacaaagaattatacaatatattaaggaaggggattcaaaattggactaatgtagtaccactaggctatgcagctaccaaaaaaaaaaagttatcctaatacgatcatgttagaatatttggattatattacatagcaaaaagaagaagaggaattatcaaattaatcattattaaatattaaactcgtgaagatgaaggattagataaaaataaaattatcctatttttttaatgagattaagttaacctaagggaattatatagattcttgaattaattttttcaatatcctcttcaacttcataataaattcacatgacaaaatagaaaatatcaatgtaaccaaaagactaaacatgcgttttgaatatagttaacaatcttacattttgaataataataataatagttaacaatcaagtactgttacgattaataaagtttgcttgtgctgcctctactctaaaattcttagcatagtggttcattaaataaactagccaaaggtattgttctgtcaaacacaataacaattaagtacaaactaaacttaacaccttcaaaactactacgagacaccaaaaaatgcatgacaattcatgaatgatgttgaatttgttctcaaatctcatacaaagacaccacacaatggaactaaccaggtaaagctgaaaatagttatgctgacaataagtgtagattctgcttaacaatatcaccactactacaagacacatacaatgcaaagttcacgaatgctatccagttttttctgtttgtggtctcatagcaaggcaatagacaagtgacttgaccaggcaaagctaagtacagttatttctaaagattgatgcggcattctaactaaacaatgcaagcaccataaaggtgtatcacatgcttgatggtatttctatgcaacaatacaaaccacaacaaaattataactaacaatagctagggagcaacatatacaacaaagactaatgaaacttagaggtgtaggtttaacctcaatataaatggaattcgtagttttggtggtacggtatcaccaaaaagagaaacttcttcggcaaccctacataaaaccctgcgaacaacttcacccaagtacatgccagaaatgagtttctcgaaaacctgagataaacaaatggaagcactaccaatgtaaaatcatgtttattaagaaaataaagcaaaattcatagatattatatttaaatggtaaatataacaagatcagaatacctgttcaccagggtttaaactctccgcatccaaggagtgatcatactcggttagcggtaggtgtgatgacctaaaattaccccactccatgttgataacctgcagtgaatttagcactggatttgagattttaccttcattgcaagcttggttccttaatattgctagcaggatccaattgaaaaactgaaatgcagaaaatacttcgcaataaaactgacatcaagtgaataacagccataaaacaacactgaccatctctcccgacttaggtagaagtccatgccattttggaatggcatgtgcgcattccacatatgctgcatttgttccagtgcctaaaataacagcagcaacaacatccttgttgctatatctgcctccagctagtgtcccaactgtatcattgacctggaaaaaacaaataaacaaaattaagaataactaaaacttgaatgaacattctcacaacaaaggagaaatcttggatatggactcaaaaacagaataaaatcaaaattattgcgtcaagtattcctaagaagctaccaatgtcaacctaccagagctgacacacgcatatcaagaccttgcctctccagagctcttgtcaactcagcaacaacatcttggccaacctattaatccagaaaaataaataagcaaatgagagaaggaaaaaaaatggtttcattattcccttagtaaaccaaaattagattgcaagtagctcccatgctcatgaaatttaactttccatctaagaatagcatttttatgttatcaacagtaaaatactcctggttctgaagtcatgaattttaacaatgctaactgaaatcgcatctgctcgttaataacacatcaatttccaaaagccatcatcactcaaaataacacagaaaaagtaaaacaaagaagtattaaaggtgtaaattgaaccaaagcaacgagaattaaccgcatcatctatagagaagccttttgtccacttaataagggtcccagaatcaattgatgattgcatcacagggaatgagaaggtaaaacctagttccctttgcctgcctggagggagttggaaatcctgaccttcttgagccacaaattttgaaagctctgccgcaatatagtcaaataatgcctggaatgatgattgcaattgaaagtcagaatgaatcttcaaaacaagcatatcaaacttttaaatacatttcttatctcaaagtacttacatctgaagtcccaaccatcagatcttgagggattgacacttcagcaaattcttgatgtgcaatcccaccatcttttccccccagctgcacacgcagcacacgaaaatttgttcctccaaggtcaagtgcataaaacagccctttttcattcctaaaaatgggaggaacaaagaggggatagtcaacataagcctcttcctaactatcaacacaaatacccaaataaacctggaaagagagaaaatgcaaacaaatttatgattcttatacacgagcattattttgcttagtagtagtggcgaaaagtggaactcgaccaagtattcgtattggttgacatgtacaaagtaggctccattttcccacaatacatacattcttaattacataaccaattttcaaaaaatccattttgatccaaaaatacattgacagaatcgctaaccaatcatatgattagtctcaccagcatttctacaatcacataaaagctagtagggattacaagttacaggtagcagttctacaaccaatcatatgattagtcttcccagcattgctaacaacctaaacctgcaaataccttggttcctgaactctaagctatggaagattttaaggacaattagccatgttcaggtgcatcaggcagacctgtttattgcaattatgtaggacacacaatacaaaatcatgtaccatacaccagaaaccaatataaaattgagtcctgatgagatacaatggcccagcttataggcatattacaaataaatgtataattggcgaaacccatatttccaataccaatagtaaatcggtgtacacttgtagattaacgacaagattcgcagtgtatcaagctttgacttttgagattgatctgaccagtgaggctaaaagaaacaattttgattgatacgataacgaataaagactgataaaattgacaagaaactggatcaaaatatggtaaacgaaaataaacataaatttgagtccaaacagatcgaatttcagaaacaaaacaaacacccatacgaaaaaaggaaaatcgagaaatacccagatatgtcataagccattatatgatatgataagatacgagtgcaaataatgattacccagttgggagattgtcgacatagctgattagcatcttaagcttgctgccgccttcggaagcaagcccagcgtgcatctccacagtcatggcatcggccacctgcttcagtctcgcaaggggggtcccacacctctcctcgaaatccttaatgatcgccatcgctcttgcccatttcgcagagctccgcatgcggtgtcggactaccaaggccgccgcggcacacacagtggccgcgcaaatgaccgccgctccgactgccacctttcccattccggctagattttagcgaaatctgaagaataagccaatcagggagatctccgggttgcagagtgagagaggagaaggtgcattgagaaagatacaatacaattgggtttgtgtaaatactatcaaacaagggttgttttgtttgctttaacactactgattagtaatagtatagtattagtataccaaaataaaattggtaatagaatttatttagatgaaaaaaaaaaaaaaatacgacaaaattgaaaattgtatgtttctttaaattgttacccaaaaaagaaattggtaaattacccctttcttaccttacttactcccttttgtattctttactttctaattttattttattttctatttcctatcaacattcttttctttgcttgtgtattttaagagtaattgttttttttaaaaaaaaaaaaaaaattctttgttggcacgcatttcttacattaaatcctatacattacaaattttcaaaaaaaaaaaaaacattatacatactttttattatgtattttattattgagtttaaaaaattggtacataggtatgtgtattgtttaagtgaaaaatacatgcaccgatcttttttttttttttttgagattatgaagtttttttttttttaatattattttgatttttgtaaatgtgtaatatttacatgttccaccaataaattcataccacatcctacaaaaaatcttaacatgattaattagaatcaaattgttttttaataggcttgatttagaatctatgacattaccaaacttggaagagcattttggtatattaatttaaattttaatatattttctaaacttaccttacgtggtcttatcctttggtatataaatataaatatgacatttggtttttaaagaatataaaaaatgaaagaatcaatatcacattttcttgtggaattaggtactggggggcctaaaaccaagcaaatatagcccaaacccacacaacaaaatatttattacaaatacgtccaaagattattcactagttaaattgtatctttcaatagaaaaaaaaatagagtaagtagggtctatgttgcagtatctacaattttctttatccaactacgaaatatgtaaaaagagtagatgatggtgttgttgttcgtgcttttattggaaaagaatcaaaggttttggttagatggacccaagtgaaagcgatcaatgagccaaaaataggacagttaggacagttgatgggttttgattgtgataaaacaagcacaccaaacaaaggggtcgacagcacaagcctcgactgctcacatgaccatcccaacaaaattttccatgccatgcactctctctctctctctctctaaaaacaaaaaccaaagaaaacttataacaattttttctttttttctttttgcatcaaaat

SEQ ID NO: 15343 - DNA, 5140 bp, Cannabis sativa
  modified_base (4486)..(4491): a, c, t, g, unknown or other
  modified_base (5090)..(5115): a, c, t, g, unknown or other
tgagggagaaggagccggggattgtgcgaaggtggagactactagcattgctgccattgctgcaaccaaagcaaagcttacacgagccatttttagagagagaaaaattgagagtttagagagagaaactgaatcttgcaaaaatgctctgagagagagaagagaagtgtagtgttattgtgttgtttgatgactttctgagtttgtggaattgtttagactttagaggttatttatagaaaatggtgagggactaaagggtcaaaataggtaaagctgaaacgaccgttggatttcgagaagtttcctttacggatgatctggctaaaatcaatggtacagatttaatttgctttacagtccattacttggcatgacctatacgaaaacgagtgaccgactcggtctggaaagacaagacacgctaagggcaatgagccgtttccagttttaagcaatatattaattaacctacacctggcggaatatgaaccgtcgatgaaatgaagacagtgcaatttgaagctagataatttttttttttccatgaagaaaagaaaaagtatacataaggtagatattacccaatagagatcttccatgacagcatcactagtgctacactattctatagagagaaatgctaaatacgtgtttagtatttttatttgttgttaatattaggtgtatttattttggtttaataaaaattatacaaaagtataattaattataagacgttaaagcatagtaatgcaatgctcttcttatgtagaattttatactattttacttgaagtatacattatatagtgtgcactaaattttacaccattagtagtatttgattttaaatctatattaaattagtgcataattttttgttttcattttcacgattcttttaatttattttaaaatataattagttaatttttttttgttgaaaatatgtgtaattatatcataaattaattattgttagttattgtttactaaaatttttaaaaatcgaattaaaataagattgagctaaagaaaataaaaataaaagattaataatgtaagatttttaggtgaatgaggcattaataaatcttagttcacaagtcaatattattaagctctttggctatggagtattcattattttttttacaaatgaaattgctaactctttgcatgaagagatgaagccatatttataggcctttcgactaacgagtcgagcagacccgatccattagggttttattcatgatccaaacccagtgatgtagtaaatacaattaaatgttggctattgggtcgggtaaattagatttgggttgtgagtaatttttgtccttacggggacacacactgttgaaagtagggatgcatattttcaccatgggaatgggccccatgaggacccacccctaatggggtggggtattagaatcagtgaagttagttatgttggttactcaagttagttactacatttcagctggagttagtaaatcctataactaactcaactctatatcttggggccttgggctatatataaatgtacctagtatattctaattgattaatacaagcataatagaaagcattccagcttcagattcttcactttgttttactcatatggtatctaacgaaattcttcgtactgcatccatggcgagaccatccacgaggtcctaagatagtgttcctctatcaacaaacgatccacctccattagagtctcaatcagatgctacttccgctcctattcctcattcttcaattgctccaagaagaccacacaattcaagaatgagatctcaaaccaatctcgatacaccaggtcctgtccaatcagttacagatgctccaattgaagatgcaccacaatctgtcatgcctaccagacgatcttcttctcacgatcatctcgcccacgaggatgtttccagtccattttttctcagcacatcaataggttgtatttcatatcctctaatacctcaaaggaactctaggtcaaggattgttcttccctgccaactcctcccttagacattcagcctatgcagaaaccagtttgtctacagctaatgttcaattatctttctttgctgatgttgactggggaggttgctaggacacaagacgatccatatctggatactgtgtcttccttggccaatctctcatatcctggaagtcaaagaaacaacaagttgtttctcgatcctatgttgaagatgagtatagagccatggaaaatgcaacttctgaagtaacatggatccttgctctcctcactgatttcgacatcacccacaacaaaccttcatacctatactgtgacaacacggctgcaattcacatatcatgaacgcacaaaacatatcgagatcgattgtcacttcatcagagagaaaatacagcaaggagccattaaactacttcatgtctcctcccaacataatctatctgatatttttacaaaagctcttctcccttctccatttaataacattgtatccaagatgaatgtctctaatatatatactttatcttaagggggcctattagaatcagttaagttggttatattggttactcgggttagttactacatttcagctagagttagttaatcccataactaacttagctctatgtcttcgcctacatataaatgtaccctatatattctaattgattaaaacaagcatagcagaaagcatttcaactttagattcttcactctgatttcctcatatggggatttcccgactaaatggagaacgggacgaggacgagaattattttttgtccctgaatgttaaacggggcgggaatgaatggagatgacactacctgttctaatggggacccgtttagtattttattttttatttttaataatattttataatttataatttttagtatattaatatccttttatgaattttaagttgtattttggataataattagtttattgaataattattaatgggtaatgttttaactttttatgtagtttaatatttttatatatttgaatttttattataaactttaattttttttattaggaaattctccgccccgtccctgcccccatggggggatttatagtcccatcgctgatggtgaataagtgaggatgagaattaaaatttttaacgaggatggggatgggggcagcactccccgctaatttctcacttcgtgtgcatccctagttgacagtgacagtcctatgtgtgtcaccggtattgagaaggagaatgttagagtagtggatgttggataagaaaggcgattacctttagctatgagccattctgtggtgttacacaggggacaaactgcttgatttctatagatcgtgccaaaatagtgccacgtgggttggcttccgtgatcttaggttctgaaacgccctttcgtatcctattcctagatgtctcttgggaacatctttcttctattttccacttgttctcttgtcaagtatttgtcaattgttccggcttcacgtctccaattttctttttggcaaacaatcttgatggatccgaacgtagagtccgaatttggccatttagatggacgagctacccaagggatattcttgggcccgaggaatgggcttcacttccacattgggcattcgttgcggcccacttacaaactatctaaaaacacagataagagttattaatttaaataatataaaatatgaaatcttttaaacaaaatatttatatttggtatcatctttggtattcaattattagagttattataataaaagtaataaaatttacattaaaatagtaaaaatacacactaaaataatacaaccattagaaatggtctgaagcaccaattgaatatgctcctcaacaaatatggagggcaatttcttgggtttaattttaagtttttaatgatagtcattattttttattttcatatttaaatttattggattattttaatcttgtataataaggttaatttttttttttgactcaaaatatgatttgagtttaatctactatcattttggaatttctattctatcataattaagaattttaaatttttgtgataaattatttttataatttaaaccattaaaattatgatgatcactcaaaaaatatatacttaaaagtttggaaaattttaccactaaaaaaattaatttagagaattaagggtccattctacttttgaaaaagctaaaaactattttttgaaaaaactgtgataaaattgtgtttttggtaagtaatcaaaaaacaactttttggagaatttttggagaaacaactaaaaattgaagctgctccaatttaatttttgtactaaaaccatatttacttatttattatatattaaaaaatatataaatatttaatatattaattatataataaaataaataattattaaatcttttatttttttttaaaaaaannnnnntatattttattttaatattaacaattaatattaacttaaaatttttcttatatacttaatttctatttttttttagatttgataaaacataatataaaaataatataaattatttttatcaaatacatttaaatttatatttacaaaataaaaaatatattagaaaataaaatattatatcaaataaattttttatatatttgtgattataataaatttaattataactttatcattatcattaaaataaatctcttaacaatttaaaatttataatttaccagttcaactttttctatagtcctattacagcacaactttttcccacaagtgccattgtggccctaactatcacaaatcttatagttatgagaaaatatactaaatgtacatttgaaatgtatgcatacataaaccaaaaaaaaaattaagaaaagcatttatgttaaaatttatataaaaatctcctgcatagtgtgcacagagatggtctattttttttaatagaaaatatcattttttatataaagaaattattacagacaaacaaaatacatattttgagaataaatttgttagtgttataaaataatataaannnnnnnnnnnnnnnnnnnnnnnnnnaagaagaagatgaagagagaaagag

SEQ ID NO: 15344 - DNA, 5304 bp, Cannabis sativa
aaagtgcacccatatatatatattcacttcttattttgtaaatgcacaataacaatattgaatcttcccacttatattaggacaaataactaatcgtccaaagaataaaatattattctctcatcaatttttaatttaatttataacattattaattattcaaacattttgattcatattcatatcccaacactctctaccatgagagtgttgggatacccaacggaggaaaagccttttattctttaactcactggtgctttctttgttaggggattgtgggtcatacttgctatagagtttccttcttgattctctttaagatttctagtcttttcagcttaaaggttccttttgtctgtgtatttattgaaggtggtttaaaaagtggttgacttggatagctttgatggaagaagtgcatagttcggtaagtgaagttaatgaggccaaccaggagggaatccaaagggatggtggaggtataaatgtaactggccataccccacctacggtagatgtagcagccctggaagatacagtgaatacagatccctaagcatcagatggggaaaagagagagggagagttgaaagttttacgtcaaaatttttggatacaatgtctctcgaactggaactggattttgaacttaatgcagaggttactagaactggtgtcttggctagtttttttggaggcaggggagtgtcgagaaccgaactgaaagaaattctccctgacatttggaagaaactcaatgggaattggaagttcaaaaccttgaaaccagacctatgggggattttcttcgacttggaggaggattgttttgaagtccttgagagtagaccttggctgattaatggaaaaatgcatatcattcaagaatggccagaggatggtatttggaacaatgtggatatgtgaaaagcagttttttgggtctaagcgataggactccctggtccctatctgaaaattgtccacactcctactattgtagccaaggcaggcgagtacaaaggttacgatatggctgatcaaagaaccattcaacgcaggggttttttgaagtttcaggtagagatcgcaacttactatcaactatctcgaggcttttatctcaatatcaaaagggggaggaaagaatagattcaacttaggtactataaactgcctaaaatttgttatcattgtggatatttgggatatgataagaaggtttgtaagagacccttggccctagcataccccccaaaggtgaagcagttgcagcattcgggccgtggatcaaagttgagtcggttgtctacagttgcttcaacacgagaaaccaactggattgtctctgtgcggctaatggtgttaaccccatacgtcccatagctccgctgtcttccggtaacgtatcgggagaacctgtgtttaatctgaaggataaagggaagagtcttctggggaactccaactcacgcatggaaacaaccttttctccttgtttaccgaaaaagaaagtcataacggttcagactaatcaaccaggtactagtatttctagaaaaaaatttgaaagtggtggaggtttgtccaaaacaacctaaggataaagatgctactgggcctgatgcaaactcaaattgtgaagagaagtttattcaggatagaaggaccaagtccatttctcctagtttgttgcgttttcactctttgggaaagaaggcctctgatattgataatgagatcaataagaagtatacttcccgccctatccctaatccacgtgatgagagggttttgacagctattatggctaatgttgggcctacttataagcaaatgatagaaagcccacatagtgatttatgcaaatcaagacaaccccacaaacaccctgagcccactcatttcccttggcccatttatgctattgagattgggttgactgaagagttaatggggcctccacctattgagaaatatgagccattccccaccatcttccatgatcccgtggatgtatctgagttagttcacccttgccccaaccacgaaaaaggaaagcatgtctttctttagttccttatgtgcaaagaacccctgataattctcgtgactttgattcggctatcccaacccttccaccattctatccaaatcctttcgatttaaccttgccctttgacttcgtcacaaggcaaggaagataaaaaaagaaagcaatacacaaaatcccattcttctaatagatggccgaaatcgtcgaagctgggagaagctggtgaggttcacattgccaggaacttatcagatgacttgaatctggtagatgttcaaattgaccacattccaaattttcgggcgaggaggcggcccttaccatgccctcccattcccaatgaggctcttatcttggaatttctagggcctccttagggaatcggcaatgcaggccttgagggcttgggttcaaaaatgcaacccggattgcatttttcttatggaaactaaagtttatgatgaaagaatggctatatgtgcaagaaaattgggttatagaaattgtgcgtgtattgcttctagaggcattgctggtggttttggtctgatatggaacgaatcagtgatgattggtaatttgtatcttgataactccatcattgattcggtacttcgggatccaaattcaggcagagaatggagacttattgctacttacggaactccttataatgttgagaaggagcggttctggagttcctttcaagacagattcatcaattgtggtttaccatgattggtggtggggaacttgaattgtattagcttgatggaggaaaagtcttggggaagacaaagtagttcgtttgaccggagacatttgaatgagtttatggatgtaacaaaaggcgttgaccttcggttcaggggctgcaaatacacttggcagaataatagattcacgggggatcttcctcgagagagattagacagagcaattggatcctttgattgggtgtcttggtatccaaaagctggggtgcggaatttcccaatcacggctttggaccatgcttgcatcttattggatacgcagatgttttgtgcaaaaaatttcatcccttttaaattttttgaagcttggacattggtggactcgtgcaaggaggtgttgtctgaatcttggaggatcgttggttccgaccctgcaaccacttttgttgctaatctgaacaaagttagaacccctttatagagttggaaaaaattgaattacgacaacagtgattcgattatctcagaattggagaatcgtcttggttggatccaaaaccagccgatcactaagtctttggtacatgaggaagttatattcaggataagttgaaagaaatttggcaaaagaaagaaatggaatggagacagaaatcaagagaagggctctctctaggccatagaaacacaagatttttccatgcttcaacaatcattcgtagaagaagaaaccaaatttgggtgcttaaagataactccggtgcaccctgtgaagggaagagacacttgactacgatcataaacgggtatttcactaagctctactctaccagtatgtcccaaatttcctcagatttagaggatcttttctctaataaaattaactcggaggacaatgtgttattcatcagcattcccacgtccgaggaaataagggcaactattttcgagctacatcctctgaaggtcccaggccctaatgggttttcgggatgttttttccatatgttctggattgtggtgggtgataatgtttatgaggtagtgcaaaagtttttctaaacaggggtcttggaaaaacaaatgaattctacattcatctgtctaatccctaaggtggatcatcctgatcatatcgaccaattcaggcccattagccttcgcaatttctcctataaaatcattgctaagatccttacggataggctaacacgggtcatggatgatttgatctctcctatccaatcgaccttcattctaggaagatggatcgtaaaatcctctattcttactcaagagctggttcacaagatcaaacataagagaggaaatggtggtctgatggctcttaaattagatatgcccaaagcttaagacaagatggaatgggggtttattaagcgtgttcttcttgccttcagtttcagcacaaggagctgtgacatgattatggaatgtgtcacaactaagaaggaggcaggggaattactcaactgtttagccacttatgagaagtggtcgggccaaacttctagcaagtagaaatctttagtgctcttttcaaacaacttaagccaacacagaaagtcctccattcttaatcgattgcaaaattgcatggttaatggtgaggagaaacacttgggtaatccatttgttttcaaaagaaggaaaaagaaagactatgccattttaaatgagagaatgttcaaatgtctggctggttggaaaatgagatttctttcttaggtgggacatttaacgattatcaaattggttgctgcctaaattgcggtatatgctatgtccactaataaaatccccatctctatttgtagagatcttgatgctatggtcagaacattttggtggacgcgccaagtggagaaagatagatatctagcctttaaatcttgggactttttatgtcagcataaacactcggggtggctgggagttagaagatttgaggatgtgaacaaagctctcttatcaaaactttcctggagtattgtaaggagagagccgaaacattgggtgaactgcttgttatccaaatactgcagatacgaaattttttttaatggttaatgctaaaggcaatgattctgttatgtggaaatatattttggatagtcgtgatatcatcaagaaggtattgatgtccttagccgcaagtggatctttaatagacttctagcgtcaaccatggattccctggttggaggctagagaactcagtgatcttatggagaacatgcgatcaagaaaattattagtgcggacattggcagacatttcgattggaaatgactggaacgaggaacttgtattgcagatttttggtgatcaattagggaatcttgttatggctatcccaagattgaactctcctcattagtatatgatcatttggaaggggaaagcttgtaaagaccgcttagcttaaatttgaaaattagcagataattgagatttaattatgaaaattctttatagatatttaaataattatttatgttattatat

SEQ ID NO: 15345 - DNA, 5390 bp, Cannabis sativa
ctctttgagtgtagtatacatcactatttcgaagaggggaagcacattctgtcccatcatcaattcagggcgcagcatctattacttcttcagcatcgcttgacaactctctagctgacatgtatcgttctcctccaagacccttgccttatgatgctgacccaagatacttccgtttgcagcgggatggactgatttcaaggcgtgataaaggctcaagtcattcacatgaagaggcggaacccctcagaagtgatactgatgcagattcagaatctctgagtacagcagacaaatggagtgaatctgtttgtgaagatgggtcaaaagagcaccgttccaagtcttccaactccttaaagctctcagtgactaaacctacaactggagttgggaatatctatacatcttcagaagaagaggatgtctgtcctacttgtctcgaaggtatttgtttgacttcaaagttatctcatcttgttattactaactgaatgatctgttacctgctagtattaatctgtttggttgtcatggatacatatttctttcacgagctgagacgaagtcaggcacttgtataggcttttgcagaagagctattacttgtgacattttatgatacacaggtcacatcaacgcgcatctcttgtacaaattcttgaacgttccattattcttgttttgcattacatatttcacacattttgctttaatagtttagggcatgttgtatataggttataattcttaacaataaggaattaaagtagcttggctggttcaccatttgaataaattcaattgccagactggttcttcagtttgtggcttcatcatgcttattgctttcaaacaacaatgttaaggaaacatacaccaaaatgttaggaaaacatacaccaatgctccagataaatgctaccaacaatgttattccattgttccagatgaatgccaacagtatacacaacaatgttagagaaacatacactaaaatattgtggataaatgctaacgaacttattctactctttttaatgcagaatatactccagaaaaccccaaaataatgacaaaatgctctcatcattttcaccttggttgtatctatgagtggatggagagaagtgaaagctgtccggtttgtggcaaggtaatgtttcttcttagcttcattgggtataattaaattgttgttattcattttgatgttgatttgggtttctcaatcgagatcgagtgtggggttagagggtcctgcttttaaatttttaatatattttgaactattgtttcattgtgttgcctcatcatgctcaaactggttcaaaattatttacttttatgctatacttgaataggaatgtcatagcttagtaacattcattttttagttattattctctggagcttattcttatatacagtgtaggattaaagatgtccgaaactcttagataaccatctttacttaacattttccttttctttgcatttctctaggtgatggtattcaatgaaacgccttaaatcttgatcgaaaagtttaagtcgtggatggagtcttgcaacatcaggaggagaaacaacaccaaaatatagtcttgttactgtgaatagtccaacgttaaagaagtgtgatgtatggtacatataaactataaatatttttctgcaatgattgctgcaagtaacatttgatttccatccggtatctttcccttttgtttttcattttttgcaatttcactcaaaacttggccagtgaatcactggaaaagaaatgtacatggcaaaaaaagaaaagaaaaaaagaaagcatgtgaatagaccttgttgagttttgtgacaaaaatgcatatggcccctatagcatgattggggtatatctttatgtgccaattttcttcttttaactagtgttaagctggtcccaatatctactatgcacaaaaagaagtgcttgaattatgatgaaaatccagctttgtcaagtactttgtgtggtaggttatgtagtaacttgtgtcattattggcagtaaccccatcaatcaaccaagaatgctactctactccactccacttggtatttatttagctagtgggtgaaattgtttgtttatatgcaaaataatgaggttattttccaccaactcttggtcggtttaaatgtcaaatctattaggcgtggacatgattgcttggatgtaaagttcctttttagctaatccaattgagctttataatgaaacaatgcctaatgtgaagatggatttttccttttgtatgtttctctggacaaaaattatctcactcagttcattatggctatttcctggtgtccttttattgtttgtttagtcttggtcgtggcgtaagaaaaagtattctcaagataaacaaaaataaagttttggttttttttttttggaagcaaaagcaacttctctaagatgagaacatatacaactcttaacctgactactaagaactttagcagaactacacacataattaaagatacatctatttctattacactaaatgcaatatattaatgcagcaatagtagtgttcatgatagctgccaacaccaggtcttccagctttgcacatcttgaatcaccatcttagtaatagtcaaagaaaatatgttgatgagtttcatctatggtctcacaaacagggcagtagctagaataaaagtccacggtctttccaagatggtcctttgtgagcaagtgattattatcacttgccaaataatgaagggatgcttgaaaaaacaaagtctatgccagataactttagaataaaacaccatttcacaagcaagaagaaacagatagaagtgttttactttaaaccattcttgtctatcatcctccagcaaaaaacgacgatcaataaaatttttcagtttgagaagttttttaaaataccaactgtaattattttctggactaagattccagaaatcttggtcttcctttagagcatctccgatggttaaattttagagaatatttactgaggtagacaacttagttgataaaatatgagggtgctataccattgaaaataaatagatgtcattttaggaattcgcattgatgctatacaatgacattggtgctatattttttaataaaaaattaaagtaaataaagatacaatttataattaaaacaaataatatatttaaatagtattcttgaagggtgttgttatttttagaagtaagagtgtcaaaaaatgatgtgaaaaagagataaaataaaatattatatttttagatgatgtggaagttttagcaccattaaagaatactaccattggagttggagatgctcttaagtagacagattaagtccatctcacccaaagagagtcttgctttgctgagataacccaaatgtactttgccataagagctatattctacttttttttccttctctaaaaccaatacctccaaattttttaggttagcaaacatgctcctaagaagtaagatgaagcttagtacgattacctttagcacccaaaagataatctctacagagtttttcaatatcagtagttactttttcaggaaggagaaaaatgctcatctagtaatttctaatttccagcagcactaaaatggataagttgagctattcaagcaaacgagagattcctgctagcccaattatggaggagcttcttttgaatcttatcaataatatctccacagtcagctgctctccacttggttggtctaaaattaacgccaaggtaccacaaaggaaatgtaccttccttcatttgaaggatattcaagacctagagcttgactatcgctattaatttcaccatggttttatttgtagctaaaccaatggtggcacagaaacaatcaataacatcaatttgaagagacttcaaattacccttgcaaaaaatcaccagatcacaaatatataaatatatatatatatatatatacataaagatttatataaaacattttataactaaagtttcggcagagtaaagttataataataataagccaaaggatctctcctctaattcatgtcaaaccaacacataactttaaaagagaaacagatgctgctgatgtcaagttgaggctatttcaaaagctctcaagaagccttcagggggttgggctccattcagtttctgttttcccttattaatctgccaaattaaataaaaatatttctcagaattttccatttaattaagaaacacacacacacacacaccctgattcctcctaaagttttgagtaactgagatttttcagtactcaccaggaaaaatgggactcctgaaatatttgttgagtacatctccagctcttctttaacctttagttcaccatagaaaccagggttagtacttaataaacaagagtttggctttgctttatttacttattttccatagcttcttgatcacaaaaggtctattactacagagaaaacaagttttaagaaagtagtcaagaaaaagacctcattaacaccattgttggggtcttgaagaaattctactgccccctctaccccagctttatcagcacactgcacaagaaattccctgtatccaaatccacaatcttttggaattaatatgcataagtaaaaggtctgctaattgtgactaaattatgcttatttaccagtccccaatgtattttgcctgagtgaagtatccgaggaacagttcctccataagcttatgttgcttctcagaaccttgtttcccagcaaaattaacaagcctgtgactgtctagagtgtttcccctgtgcatgtacaagatcacattaatgataataacaaacaaagataaagatgacaaagaagataactcatccatgaaaacttacgttaatccagacatgttatattccagcccaagtttcttgtaaacctgcatttgtgaaaataaaagcaacccaattgatataacgagtgttaaaagaatgtttaaacaccacatcctgataatataaactctacacttgtatgaaagtgtgaaaaatttattaatgttaggcgtggttataataataataataataataataatacaattagcatgattaaagagattcaaaaaatgagaattagacctcagtcatcctagcttgcatcctatcactttgaggcccaaacttttccctgtaaaactctctcttatcaactccttctttaggggcattaggctcaagttgaaatggatgccatctaatctgcaaattcaattttgacaacatacaagacaggaacaacaaaattttaaggaagagagagagagagagtggtcggccaaggtagagagagagactcaggtttttctgaatga

SEQ ID NO: 15346 - DNA, 4340 bp, Cannabis sativa
aaaaaataaaagaaaaataactataataaaattaacgaaagaattaaatgaaatataataagaaaaacaaaaattgacattaaagaaagccgcgtagaaaatgtcttcccaaaataaccaaatataaagctataaattacgaaagatagccaaacaattataattaaaatccttttctctttctttttttcagaaataattaaaatccttctctttttcttttttcagaaataattaaaatccttctctttttcttttttcagaaataattaaaatttcttatatctctcaaaaaaaaattccttatatataataaaaatcccaagagcaataaattgtaataaaacagcataatactataaacataaattgtaataaatcagcataaatcagcataaattgtaatattccctaatattaatgcgtataattcaaaatcagcattgattaggtaataaattactataaacatatagtgaagtcaataaactaatactgaaatcatataaaattaagttaataatcccatgggataatctattttcaaaagtacactagataaaaactaacaaatttgaatattgttatgagccactcttttttataagttagagcattttcaacagtaatatttttttttaaaaaaaaaggtaacctaaaaaaaactaacacactacaaaggaataggcttgtcaaaatccacaagatatcaaacgattaaaggaacacccctattccaactagccgaagttttggacttcaaagccaacttagctaaactatgagcgagaagattcgcatctctaagctcaaaacgaaactcaaccaaatcaaagttacaactcaaaccagtaatttcttctagcaagttatcaacatcactaatgctcctacttgggttgtttataagattgatagcatttaaacaatccgaagctacctgatttttctttacaccagcagcaagagcaagcttcagaccactaatgacagcaaccgattccgcaggcaaggcactcaaaggacgggaagaaaacccagatgaagagcagagcacctgcccagagtggtccctaataaccacaccagaactacagcttccattcatattgtagacccctgcatccacattcactttccagacccccacctggggcggactccacctgctcttttccttagtttttccttgaatagtgtactgatcttggagatccacatcaactaaaatacaccaatccaccaccccacaagcaggcatacaaaagcctgtcgtgcatccaagcattcctttcattccaacattgccaagacaagattgcaaacaatgagaagtctgacggagataactggttcatacagctttccacaaactcccaagggtcctgagttctaacttgtttaaagattttccaaaaatcgcttcttttccagattgggaagaccgcttcacatctccaaagagcgtgaataattctttcattatggagatcaccacacctattgtagctgggattagaagaagttttcctgcaaaacaaaacactattagcgggaagccaagagtggctaactctccaaagaaaatgtttgactttttgaggcacacgtaatttccaaatatgattccaatacgactcaattcctttcatgttcgatgcttcagctttaagaattaaattagatgctaactagtacccactcttgatactatactccccattcttagagtagtgccacatgatttcatcgtccacctccttattactagtggccaaagaaaggataagattaacatcatctgaatggaagttggattggataaatttctcatcccaatccccatcccaattcttcaagtcaatgacctgcattccttcgggaatatttggcttttcaatcaatttaaggttcacaagcctcggaatccaaggatcatcaaccactcgaatgtcattaccactcccaactctctatcgaaatccttttaggataatttctcttccccataaaagacttgtccacacccacgaggctttggaacctttggccgcatcaagaatagaataattgggaaaatatgaggccttgagcacacgactacaaagggaaaagagattccgaatgattctccagacttgcttagcgaggagagctttattgaacagccccaaactcctaaatcctaaaccatccatttcctttggaagacaaagtctgtcttacgtacaccaatgaatcttattattcttttcactagaaccccataaaaactgagccagcattttatgaaaactattaaaagtattttttgggagtctaaagcacatcatacagtaattcgaaattgactgggtcaccgctttaataaggacctccttacccgccaccgagaaaaaggacattttccaatcttttaacttgttccaaactctgttcttgatatactcaaacacttctttcttctttcttcccacaaacgaagggagaccaagataaaaaccttgattgtccaccattttgactcccaaaatcctagccaagaccaatcttctttctctaggcacattcttaccaaaagataggtcaaacttttggaaattaaccaattgcccaaaagcctccatatattggaataaaatagtcttgaagcattgacaaaactcttctttggcctccataaaaataagactatcatccgcgaagaataagtgagaaacactaatcccatttctcccaaaattaaggccctggatattaccaacactctattcattttggataaggctagaaaaagcctcaacacaaaacaaaaaaatgaaaggagataaaggatttccttaccttaaacctctctcaagataaactttgccttaaatttccccataatcgaaaaagagtaagagatcaacgaaatgcaattcataatcttctccacccatcttctatcatagcccatcttcaacattacttcctcaatgaaaatacactccactctatcataagcctttgccatatcaagtttcaagaccatcttggatccatttctaaaattgttcttacgcatacagtaaagcccctcgaaaccaataatagcattatcatgtatcaatatattattcacaaaagcactttgggagtcagaaattacctctgggagtgtcaatctcagtctattggcgagacattttgaaatgatcttgtaagcaacattgcaaagacttataggcatgtactcctccatcttctttggcctctccactttaggaataagggcaattggtctctcattgatacttttgacaggaaagtttctatttagcaccttcaaacaagtcttagtcacatccttttccacaatgtgccaatatttctagtacaaaagacctgggggcccatccaaaccatgggctttagatgggttcagatctttaacagcttccttcacctcatcttcagagcaatttgctagcaacatctcattcatattacttgaaatcttagcttgtattgcaccaatagccaactcaataatttcctttattggcctcatagaggagaagagttttttaaaataattttcaactatctgctccaccaatcgattatcatcttgccacactcccaggccatcttgtaaccccaaaatctcattcttttaccttctagctgaggccttatgatgaaaatatttgtatttttatctccccacttaagtcaatcagctctactcctctttttccagtattttttgtccttctccattaaacggttcaggcgcttctcctctcttttaatgtcctgccacatctcttgatcatttagctctgacaacaattttaacctctctttagaattagtcaactccttctttaaccttttcttctttgccttattctaactatggagattatacccacatctactaaacttgactttcagattttctgtagaaccatctgaaaggatagagttccaacttgttgtcacaatatctttacactcatcatcatcacaccatgcttcctcaaaatgaaatctcaaatttctcttaatcttaccacatttgttgtcattaataacgactccacaatccacaaccggggctctatggtctgaactacaccaatcaagaactttaatcgaagccttgggaaaggagaggttccaatctttattgcaaagtcctctatcaagtctctccattactgtgcctttctcatgaccattactccaagtaagttctccttttacattgccaaaatctaataaatcacaatcatcaatacaccttctaaatctctccatggctgcccaacacctcgcttcccccccccccc

SEQ ID NO: 15347 - DNA, 3633 bp, Cannabis sativa
  modified_base (2510)..(2522): a, c, t, g, unknown or other
aggtaaatttgattaattgatgaataaaagaggcatttttcaacttaccccaagatggggcttctcttcttgattgttcagttgcttggcaatgtcgcttgtcgctccttttggcttgtaggtcgttggtgtgatcacgtggtgacgatcccttctccattcctttagtttagaaaatctcgaggactacacactagctatatgaaactcatacctcatcctcccttaaatttagtcattggcaatataccttcaaaggtttccattctattaaggatgacactgctacaacaagctagcctcctaaaagtgttgctccccattcttccaccttgttaggttgccacctcacattagctccaacattagtatgatattgtctactaatagagtaggtggaagactcgccgcctgaccatcaactttgtcaggaagacttttgacatagatctccattttgtatcgcttgtaatcatcaatgggacacactatttgaccacccgtcaatattaggtagattttttatacaagtcactatagatcttcaatcccgaggtcatcacttgttgcgccccattcttctgggcttagaccctcacaattttgtttttttggcacattcccaaaaggtcccataccaatggagtatgtggaacacttatatctaatgtaattattacctattctttcgatgtgggacttgagttgataccccaacaaaaatgccaaacattctaagagagattgtggtgcgattcgaacccttgattgaagcaaaaaatacaaaaaaaaaaaaaaaatctctactattacatcacacaacacgtgattactccctgttagcgtacgtgtagttttgttttgttttttttttttttgaagggagttgttgttttgttttcactgtttgtgttttactttatggtagtttttttttgttataataatggtttttagtatttgttttgttatgtaattttggttgtgatttgtgtgatctgactttgttatgcttctattagtgaagtgcgagtgtgtttatttatttgtaaaatttctcagacaagtttgtatactttggtttgttgctagggtcatatacgaaccttggtcctttttctatgttgttcctttgttggatgtagtttttcatagcatgatttcttttcgattaacatgtaagattattgaaaaaaattatcaggagaattaatattaatgtataatatttcatcacttcaaaaactaatacgatcttgaactttgtatggatatattagggagcttttacaccggtgtgccccacaaaaagggtattaatatacgtattcagaaataataatatattatgtaaaatttaaaataatttataatataaaaattagtgttcacatgtatataaaataaaagagtataatatactgtttgaactatatttttcacgtcttaataacaaaataactacaacatatacaatcataataaaaatatatgtggattctgcacattaaattttcctacaatattttaggtatcaatatgacaactatgctcatattctctaactacttctcaaaatgaatattttatttgtctcttgtgacaattgatcatagaatataaaagtaatgataatgtttagttgtaggaagttcattttgatccaaagtataatcctccctaaagagatatttttatttttattcttattcaatagagtattggatgacgcatgactttggtggcacatttcatatatattcactagactacggaacaacttgtaaaagcagttacatagaaaaagcagagatagaattagataccccacacgtgagatgccaaattgccatttatttatttatttttatatttatgaccaggcctaattatccaactcattttcttcctataaatacagcttaataattttaacaatgaaacatatatatgtatgtatagaaaacagttggagcctggaggataatcacaaatcactacacataatttttttttggtaaggtaaaaaaaaatcacattaatactagaagtttgaaatgagggggtgtttggtcaactcctggacccaattaggaaggaagagtgttatactataaaatattacaggaatttattagtaattttttttttgaaatgtattagtaatttaatagtaatatgaaatacttaagaatatataatataattctcaccaaagaattatcaatgaaatgaaagaattatcaatgaaatgtatgagaattagagtatgtctaatacagtttgatactaactcgaaaaatgtggcattctaattaggcatacacacgtagtagagaattggcgaagagtaatcccctatcaatttaagaattttaattcctattctcatttataacccataaagaacagaataaaaaatcccttaatgggacatgcacgagacaagaaatctcctaatgcgaaaataaagtttgtaaatgtacaaaatattaaattacataaaaatnnnnnnnnnnnnnattatttattattcaatatacttattagagatattggcgacaatattgcccaaactctacatttagttacacttaacctcaaaaacccaatttttaatggtaaagccttctaaactcccattttattttgctctccactattccgttaatgagtaagtgttgaatgctaccttgtactactgatgcgttttattagtacacatcatatatattatttaaaactataaaaataattcacaaatacaaaaaataataatttaaaaaattaaaaaaaaaataaaaattacaaaaccatattttccttttttttttttgaacaaaacgtatttgattaaacaacaagttagacctctcggtcattacataaaatatttgaggggatagaagatagcgtaatatcaccaaacaacttgtgggtaaacacccacttagtcatattaggagcgacaaaattacaagttctgctgatattagagaaaatacaactagaaaaacaagaagaatgactatcacaaaaggagacatagttaccaatgacccaacgagactccatgccattgagcgcattaataactaccctcgattcgctctccacaataactaaacgggctttcacttccagcgctgcagaaatagccaaacagcaaggcgccgcttccccacagagcgcgtcagcaaaatccatcctagatgtgtgaacccgaaccacctcacctaaatggttcctagcaacagctgccacgcacatgctatcaagatccactttaacatcacaattaactttaatccaatcatgaggagggggagaccaggtctccttcaggcaaggagcggagggagggaaaatagtagcatataaatctgcaaaagaaaatcgaatagagtcaatacaattcaacaaatccacggtaatattattatggaccttttcatttcgagtgcgccataaattgtcgaccacaattgacgcatacaggaaaacctcatccactgcaattcccttatggttcagattccaaatgaatttgacccagtcccacattctgattccagtatcactaattggaaaaatgccccaaggggacgagcgccaggcatgaagggccaaatc

SEQ ID NO: 15348 - DNA, 3846 bp, Cannabis sativa
cattttactaaaatgcacccgattgatttatattttactaaaatatggagttggtaagtgattttctttttaggaggtttcttcacttttgtaataacttaataagtttaagttgctcttgctcaattatttgggagatttgtatttgtttttgttggggtatcaactcaaattctatattggaagaatagacaagagttgtcttggatataagtgttccacctactccattagtataaggctttttaggaaggtacccaaaaataaaactgttaaggattagaccaaagcagacaatatcatactaatgtgggagttaaggtgaggtagcagcccgacaaggtggaagaacaggtgctaacaagtggtattagagccaaaggtttaagagcactaggatagtgggctacatttgcaatgtgtgggagaagctctcattgtgatgacctcgcggttgaagatctatatggtgtcttgtatcgaaagtctacctgatattgtggtggtcaagcggcctctctcattgatgattatggcggtacaagatggagatcggtattaggacctgtgttgaaagttttcctgacgaaggtgatggttaggcagcgagttccgttggtgatagaggtgacataaagtggttttgttggaggggaggccacgagtatgtggtccttggtttgaggagaggattgttgggttatcaatccaaataccacattggaagaatagacaagagttgtattagatataagtatttcacctactccattagtataagactttttggaaaagtacccgacaaggtgaaagaaggagacccaacaatttttgcagcaattcaaaccaatattggacttgtttctttttacgtaattttgtttatcttttaaaaataattgtatgaagaatttatgtttttagttaaagtaattagttttataagcttttcttcaaaactaaagatgaaaaacaagtgttacaattacaaaattaaaatatttaaatggaaattttaaattaataattttatattttaaaaatataaaaaaaaagttgggggactcgctattttctttaggacttaacatttccaatcttgatagagaccttgacaattgtcttcctggttacaaaattatttggttgttatctttaatgaataatttctcctaaaatatagtataataaagtgctcaacgacacacaatgtttgaatgattattaaagacataaacttgttaattatttgcctcttgaattgattcctctttaggtttagtgctttaagaaaaattaaagacataatttatgtataattttattttgaattgtctaagattatgattcttacatatgacttatgtccttgattatgttcttacaaatgagagatgattccatccttctcactgactccatatctcaaccgtttttcaaatttttcgaccgttggagtctggaactccaccataagagaggctgtgaatcaaggccattcccacaaagcacttattctatatcgccaaatgaaacaaaatggtgtggagcctaacaatttcacttttcccttcgtagccaaagcttgttcgaagctatcctatgtcagaatatcccagatggttcatacccacgtcgtgaaatcttcatttcagtttggtgtctttgtgcaaacagctgtggttgatatgtatgtcaagtgcggtcagttaggtgttgcctacactgtgttcgagaaaatgaccgtgagagatttggctgcttggaattcaatgattctgggatttgctcactcaggttttcttgatagagttctatgtctattttgtcagatgatgttttctgggattcggcctgatacggtgaccgttttggggttgactcaagtgagctcacactcaaagaacgtcaaattactgaaagctattcaatcgcttggaattcaactcggattagatgctgatatttctctagctaacacttggattggtgcctatgccaaatgcggtgatcttcatttagcaaaggtcgtatttgatgggattgacttgggtgtgagatcagttgtctcttggaattcaatgatagcagcttactcaaacttcgaaaagtttcgtgatgctctaaattgctacaaactgatgtcgtgtgatggatatagagccgattctagcactgttgtcagcttgctctcatcgtgtgcacaaccagaagctatgcttcaaggtactttgattcattgtcatggaattcaactgggttgtgattatgatatttctgttgttaacactcttatatccatgtattctaagagtggtgacattgtttctgcaaggcttctatttgacaacatgccttgtagaacatgtgtttcgtggactgttataattagcggctatgctgagaaaggggatttagatgaggcattgagattgtttcatgctatagaagcagccggtgagaaacctgattcagttaccgtgctttctcttatttcgggctttggccaaacaggagcacttgagctaggtaaatggatccacagctatgcattttcaaacggattaagacacaacacggtggtttccaatgctttaattgacatgtatgcaaagtgtggaagtatgaatgatgcgcgagacctctttagcatcatgcccgaaaaaactcttgtctcctggacaacaatgattgcagggtgcgctttgaatggtgaagttaaagaagctttcgatcatttcaattcaatggtgagctcagacatgaagccaaaccacatcacatttcttgctgttcttcaagcttgtactcactctggtatcctagagaaaggtatggagtactttaatatgatgacatgtgaatatttcatagatcctggcttagaccattattcttgtatggtggatctctttggtcgtaaaggaaaaataaaagaagccttggagctagttcaaaacatgccagttaaacctgatattggtatttggagctcgttgcttagttcttgtaagattcatagaaacgtagaaattggcaagtatgtatccgatcgtctgttcgagctagaccctttggttgcagtcccatatgttgagatggctaacatatatgcatcagatcaaaggtgggatgatgttgcggcaataagaaaaatgatgaaaagtaataaagtgaagaaattcccagggcaaagcattgtccaagtgaatggtaatcgtcatgtttttggagttgaagataggggtcattctgagaatttgtttatatatgaggtgttagatagtttatttttgcaactgaaagaagaagaagaagaatactcagttcagttaaaccaggaatatgctctccattgaagtttttctttatatatttattatatatatatatatatattattgacagtgatcgatcaacttatatatttatatgacaagctaattattaataagcacagcaacaacgttgttgatcgacacattgataagtagccacatatgagcccattttcaattgacaatttcggaggcattcttcggtgttgcaattcggaatgtgaaaaactatgttgcaacgcccctttagatcttcatcaccattttcatgtacttcattacctgtacatccaaaataaaacttctttattagataatataaggtattacatcaaaaaatctatatatatatatatacgaaattatgtgtatgacaaaatcattaagattatttctcattacctgcagacgtatggacgagaagaagaacaaaaactataaaacgaacatatgaagctttcatgatgatttgaaagtgtaggttatggaaaaacaaaatatatgatgt

SEQ ID NO: 15349 - DNA, 2625 bp, Cannabis sativa
  modified_base (143)..(149): a, c, t, g, unknown or other
tttatttaatctctttgttgatccttgtattatattgcaatagtgttgtaatgtcttgattttcttccattgtaataaaatctctaacattaaaccatacccctcagactttgatatataccaaatcatgtccctcgaacttnnnnnnntactaaatcatgctctctaaactttcatccatgttagacttttttactaaaattagacaaaagtctttaaatccaacaatctcaataattcaaaaaacatttttaacgaccttaaaaattcgagataaaaatcctaattagcttataatttaaaccacaataacaatatgcatctgaaattaattatctatatcctttatgacctaaacatagtaatttcagatgctctgtttagacatgacagctaatgatgatgatattaataaataatgaaattaaagcagtattatattgaagtgaatgtagacttggtttaatgcagataggtactaatttcaatttatttagtctttatcaccatcatatattcatatatatcaatgttagtatttcttttcttgataagtgtaatgtgggtctgaattggtattatatatatttgtatgtagagccccaagagtaatgatatgaagaagaagaacaagctagctagctgtatgtgaagataaatgaccatttagagtctggcttcttgtctttctgcctaccaaattaaaatgaaattcaaatcattaagagggcacatacagtttcctaataattgttcttagtattatacattatatgtatacatgggcttcaattattatttttaaattacaattgattttagatactatatcttgtttaggaaattttcagatacacctgtatccagaccacatctaatcatcccttgctatggagaaagccataatcagtcattgcctcctaacaagacacatgaagaattaaaatctcataattgtcattatatgatgtaatttatttttaaatttttaaaaccaagaaaatattttagaacatgggatgtctctaacttgtgcccctaccaccatgtgattattgttcatgaaaaatcgacaatgtcatgttatatattgttcttgctaaccaaaaattgaatctcaattagatatttatgtaaaaatttaatctcggagcacatagaaataaaatctaataatttgacttctgaatcaatttggaagaaaaactagagctcaaacgatctgattatgttgtgacccaatattatgacaggttagatccctttaattgtgtgggaatactaaatttataatgttaaaagatattatcacgtggaagatgcacaaaaatagttggggaaagaggagacttttacaatttcgaacgtattgaattaatataatcttcgaataaaagagagagagagagaggaattataatttgtggatatattaaagtgaaaatatgttcatatacatgcagagagttgttattaaaaaaataaagaccagagagtacatcgatccgtacaattgtgaagagggatggacataaaaaggactcctcatcagagaaagttgtttcggtctctattcatagtgagtcaatggagacaaaaggcacactttttggattaataatgttcacaattgaagattttcttttttaaaaaagaaaaaaattcactcaagattctcttcttacttctttaatatttaaaataataatagatgttttttcgagaaaaatagacaataccaaaatgtgtaagtattcaattttaagcgaagtaagaatactcacaataaaaacaacaattatttacttagaacaacgattactcaaataaacgtaaacaatgactatgcaaagaataagtaaaaaaacacagagaaacatagtggtttagcaagagttcggtctacctagtccactttagaaagtttgtgattaggttcttcatgaagcagatcaatcatctatataaaaagcaggtgtccttttaattacataattgatcatcaagtgaccatttttacattccatgcattaaattaaataacaaacgttcatgaaataaatgattaagaccattctgactatttacatttaagtatggaacatctgcgaaaactttagtcgcatattgattgtttgtatactatccttagttgcatattgactgttcgtatacggacaacttaaaacccgtaggccatatgggttgtcgcgtataatagtcttcggactaatcgaagtgaagatgcgatcttcacatatggcgagtgaagaaagggcagaaggtttggctcagctcaattagagactgagggcagatattgtatttaaagaacaggggagcataacggctccaatgattacacacagagaaatatgccagctggcattacaattgcataatagaaaaggaaaaagcaaatcaaataaagtaaaggacaaaatagaataacagaaagagaatctccaacaatgcaggagtattaggcagtgaatgattaggtgattaattagatgactgattaaccaatgaattactctgtcttaacactacccctcaaacgcaagggtgaacttgtcacaccaagtttgctcacaaagtactggaacttaggatgagtgaggc

SEQ ID NO: 15350 - DNA, 2846 bp, Cannabis sativa
  modified_base (2198)..(2205): a, c, t, g, unknown or other
  modified_base (2460)..(2462): a, c, t, g, unknown or other
ggtttctgtttgtttaactagttttcttatgtttgatgtagtttcaaaggtgttggattgattcttaatgctataaaagcatttctattttacattccactgtatagaaaatggggtctgaagggcctcctgcagtcactattcatgtgaccgggtttaagaaattccatggagttccagagaacccgactgagaccattgtgaccgggatcaaagactacttgaagaagaatggctttccaaaaggcctaatccttgggagttgcagcattcttgacactgcaggagaaggtgcacttgattccctaaacaagaccttgcaatcttcaatcactgctaaggattcagaaacttcgaatccggggagagttgtttgggttagtttttgcttattggaattagtatgtttggttgttcctttgggaaacccctttatatggattgtttttaaacaacttacactcttgagttagctttgatttccttgtgttttttttttcttcatttgaatgaagaagcattgttgcacatattagaaaaaaaaaaatgttagaatgggagaattaagaaagtgatggttagaagattttaatgacattatagactagtcttgttctggtatgagagtaaattattaataatgtcatcttagtttctgggaagttacttgtcatgtgtcttaaacaacattctaaattcaagttatatttctttaggtgcattttggagttaacagtggtgcaacaaggtttgctattgagcatcaagctgtcaatgaagctactttccgttgtcccgacgagatgggatggaaacctcaggttagatatagatcctaagtgattgtatttttttcccttttctggatttagcttttatactcttctcacttatatttagttgtttcgcagaaagtaccgataattccagaggatggtgcaatttcaaacaaaagagaggtaattgtcgaaatctagattgtattcatagttaagatggtgcagattttcttattgcgtctcttgaaacgcttttcggttcaatttttacagacttctgttccagttgaggagttaactagtgcccttgtatctaagggttacgaggtgatgacttcagatgacgctgggcgttttgtatgcaactacgtttactatcattcgcttcggttttctgagcagaacaaaacgaaatcgctgtttgtgcatgtcccgctcttctccactatcaacgaggagacccagatgcgatttgctgcttctttgttagaggtacttgctactttatactagtagtagcctgttatcgtcgaacgcagcagcttatacttggttgcatgaacacttccatgtttgtaaaaaggtggatggatatgcttgttaaatgttaattgatatgctttcaaaaattaataaagtaagtggtatttcaagggggaaaatatgtgtccgcgaaacttgcatctaatgtatttttcgtagatgttatgaaaaggtttccggcaactcgccgagtttgctaaggtttagtaggtttatctctattaccaggaagctgcacactttgttattctctgctttttcctgtgaatgaaaatattaaggtctctttttcacttttgtttctcaacaatttttcattgtggttttgctatattctttgtcccattaatgtgctcaaaattatagataaaacagtttataacataggtatcatattcaagaaaaaacaatattatccaacgaaaataatagttactttataaaagaaccacattcatacaagctttcattgccaattgccaagtcttcaattctaaacgacttgtgagttgggaattttaaacgtacgacactatatatcaagggttgttaatgttgagtagggatgcacatttctttcacggggatgggctatgcggggacccgtctcttatggggtagggatttcccgtctaaatgggaaacagggcggggatagggattactttttgtccttgaatgttaaacgggacggggacggagatcacacttctcgccctgacagggacccgtttagtattttattttttatttttaataatattttataatttataatgtatatttgtattttttagtatattagtattctttttatgaattttaaattgtattttggataataattagtttattgaataataattaatgtgtaannnnnnnntttttatgtagtttaatattttttatatatttaaaatttttattgtaaattttatttttgccctatctccgatggagaataaacagagatggagattaaaattcttaacggggatgggaacggagggagcacttaccgccaatttttcgccccgtgtgcatccctaattacgagttagggctagggtcggttcaagggtggggcagcaagggcctatgtctaaagcccctcccaagcctaaaatacccttcaacnnntaaaaagacaatttgttttttttttttaaaatactattttttgtatttttattattatttattaaaaaaaaatataattattttctaaaaaaaataccctatctcttaagatactatatttgatattttattgagaaaaaaatttaaatatattttcaaaatactatattttaaatttttaccattatatatatataaaaaaaaacataaaaacttccatataaaaatacccaagacttccaattggcttgagacaagcatgtcgtgagccttgccattttggctcaacgttatcgtcgtcgttcataaattatatgaataaaaaagatagggattatatcacaaatacataaaaataacagtaaaattataaaaaaaaaaaaa

SEQ ID NO: 15351 - DNA, 6190 bp, Cannabis sativa
  modified_base (5572)..(5575): a, c, t, g, unknown or other
  modified_base (5618)..(5624): a, c, t, g, unknown or other
taaaacttctcaaatatttcagatttcttttgcattagttaaagaaaactatatcttgagaaaatatcaatgaaagtgacaaagtactcattacctcctctatcttttacatttagaggtgcacaaccatctgaatgcactaaccctaggggttctttggcacgctctccctttgcagagaaagaacatttagttatttttccttctaggcaagattcacaaactggtaattcacccaagatgacagttttcaatggaccatctttggttaaactgcgaagtccatcatagcctatatgacctagtcgtaaatgccatagatatgtttcgtcattattatcaatctttttccttttatggtttctaagtttagctatgttattaagtgcaattgatatatccggtcttaaaacagaaagcccttgttccatgtgagcaacacataattgaaatccattatgagaaatagtgtaaatagaactcaaaaaattcaattgataaaattgtgtttgtaaacatgaaacactaatcgtttctacaaaaattcagaataaacaaaacattgtctaaaactaagaatttcttctgtaacttgaggcgagcttttcccttagcttggcctaatactaattttccattcctaactttgagcttcaactccgctagatttaaataatcccatgtttcaagcagctggaatgaagaacaaacatgtttagttgatccagaatcaacaatccaaatggatttgtcattctctaaaacacatgattcaaaaagaaaagtgttaccttcgttccaatggtccagaagtttgggacatctttcttccgaatgtccattctttacacaatatgaacatagaagaatacgtctgctcattggttttctaattgtttcagttcttggtttaatttcgattctagccctcaaaattgaacttgaagaagcaacattgtcagaagcatcattctcaattactacaactttcctttcgcgcatgtctgcataactggagggaggcctccttgcaggcaaagtctgttcataagcacgcaattctgcgtccaccttgtctatgtcatatgagttaaaattattgatcatgtaagatacaacaaatccattatacttaggtggaatgctgttgaggataaattgaacccattactcttttgataaatcaattttcagtagatttgctttctagaacctcagattcatcatgattaagtaagaattaatgctcttaccaggagacattttcacacaatagagttcatttataaaggcatgtcaaagatgtgggttgagtttggattattcattttgatactacaaatatcaataagcaaaaataaatcatttggttcaattaaattcatacacatgttcagaaaataactagtaagtaaacatgtttgcaaaaatacgaagataaaacatattcaattattttccaagattttcaacaaactgatacaatgctttgttatagtcgagagtcaaagataacatccattgaatggagtagtcaactcatctaatatggaaactattctagcaaccttatattcgatcgaaaagagaatttgacgttgtttcattttagtcgagagtcaaagtcattcctattttatgagcttctgccattatttcataccttgtaagattatctccttattgagattagccaaaaattataccaaagttagcaaaattctcatcaattttgttcatcactttgacttttaaaaactgaaaattgtttctccatttttttttatcttttcacatgtttaaatctaccatgattcacttttatttgagtttaaaagtacttttctaattttatggctcatttcacaagtttggattcacttttgatccatctcacaaattttaaaaattgaactctcataagttaatctttgtttatctcatccaaattgagatgtttatctctttaattcccaaaattttaaaataaaagatgtaactctcaaagtcatcttttttctaatctcatattatgagatgttcaacactataagaaaaataaattttaaaattttgtttatcatccaaaagatgacaataataagtacatttttgttcatcaccattattgttatcaaacactaaacatgataagttacatatatattactatgcaactataatatatataagtctcatgcattaattgtaactctcaaattttatgttaattagtatattatgtatgttactatcatctcacatataacatacatataatatattaattatttacacaattatatattacatacctcatacatatataacatatatatacatgtattatatataatatatattatatgtatgtctcatataaacacatagaaaatatttatttctacatatttaatctcacgaatatattatatcacatgctttacacatatataatatatattactcatatacgcatgtgatatattggatatatctcacatatatacatatactagcatgctataaattcaaatatgatattatatatcactatatattaatatgatatatacacatatatatgtcacatacacatatatatatttttctcttgtaaaagtttcctatctcaacaaaggaaatatgttaatacatagattactattatttaaaataggaaaatacaaaatcaataactaccatactcatcatggataattttcacataaaatctcttactcttgtattctcaaaatcttaatttctctcctcctatattgaaaagaaataaattttttattgttagagatatttcacatcaatggaagaaaataaagatgtattgtaactctattgtaatatgaaatacaaagaccaacaaaaacatttaataaatattaaaatacatatatatatactatatatatatattgtatatgtataagaaaggtaagagaagagataacacattacaatatataacatttataatataatatatgaagaagaagaatatccctcactcataatcttgtgggtaaattagtagggatcaccatgacttgaacaaggtataaatacttttttccaaaagcttatacccctatatctaagcactaagggaaatctctaagaaatgacattggggattatcaaaacttgtgttttctaataggtttttgtcaatagaaaattaggttactaactgagcaccaaagacatcttttatagtaattaggttatcacacttcaaatttaaacacaccacacctcttgcctgttataagcacataaataggtgtaaaatgggttaatagtgaagatttggatgttacataagagctagaatcaaaacactagtgtttagaaagtttctcaaaactgtacctagcgacactaggcaacaggttacctagtgtaattccaggttctgtttttcgagtttaagaactcccactcaaaccaaatcaatctcaaacgttttctaacttatttttcttacataaatgagtattagtccattttgtaacaactatatcatcatattttttaatttcttaaatcaaattgtgtaacaacccttttattacactaattatattttatcaacaaaagagttacaagtgagttacaagtgacacaaaattgtaactccactccatgttacaatatgtaggttacaacgaatttatcgagattttttaaaactaattgaaatagagctcgagaaataataaatgtaataagtaatatagacaagtgttttttatgtggttcgagtaataatgattcctagtccatcagtcaatatattagccttttacgcctgtataatgtattacaagtagttcttacaataaattctaatgctggttcgtctagagaagaagaaagttcagagagatttttcagtagagtttcggctattaattttctaatccccattttgtatgagaaactaggggtatttataggctgaattgttgatatagaccgcctagggttattgtaaaaagcccactattacggtaaaatacatgtaaataactgactgttgggccctcaagagggcttttgagagcgtggagagacaactagataataaggaccattgttggtacaagacacgtatcgccaaaaggtttcaccataaaaagaaggtgcctaaacaaaccgttaggaaaaaaaggtatatgcagaggtgggatgcgcaccgtatgatggtctaacacaagggacaagatctgatcctatgctaaaaaaggtctaaccattgctagaaggattcaggtctttcttcatggtagacgtctagcttcctctaggcgattggtgttcatgttcagctctttgagtgtcctccaggtgtctcctagacatatgttgtgcttggtcttctttgggtttcagagagatgataatgcctttgggacttggatggaggtatgctgtgggacaagtctctgagtagatcttgagcttagttttcctagacttgtatggcttctccacgaccctagacaattgagggaacttaatttgttattgtttaatcatgtactcctaattatgccatgtgtcctttattcagaaacacagataacatgtacccccaagcttctggaactcttgagtggagaaagcttgcaatcttcttccaaatcattgaggcatattcgtgacatgttagggaattttgagaacacagcagcattcttcttgtttggccttcaacaagtgaagggtctaatatcctttactgggtacaactggcgatgcatgtgtgtcatgtctttaatgagtctgtaggtaacacgcgcctatcaatggcaaattttccatggggggttattcaggtgaaaactctttaatgcacattgggtcggaggcaggtaatgatgaaaaataaattcttatttagatgaatggaattaaatgatatattttcaactccctagccaatagattgacctgtgctttttgaggggacaatctaggccattaattttgaagtacatggttagcctcagctataaataggctcagagtaagccattgtcttctttttactagttcaaactttcagaattccctcattctttaaactttcaaaccagagccttttcctttctaaaaagttagaccgagtgacttcaaaatttttccaaacctttaccaatgaatgcaagatatttttgctactctcataaactacctgctaaaaattagaacgtagtaattcccaacttctttgcagctcgacctcagcacaactctccctcagccagacgaagggttcatcgcaaaagcgggcttcgatagcatcatcaactgggttcaagaattttgaatcaccatcaacatttattgtcctcttttaagtcacatcacaagtaagtattttagaacttgtcaatgtttttggatttttgtaaggataaaaatcatgttttcgagctttgttctaagtttctttgcatgcaactacttagaggaaaaacctatgatgttgttgttggaatatattttaacaggatctaaatttattaacaagtatgttgattaacannnnaaatatgaattctctaaaataatagaatttaaacacatataannnnnnnaaaccttacattgattgcagtgaaataataagtctccacccactaatatctctaactattgttcctttctatcgtagagtattatcaagatctgagcccagttctctttcaggtgttggattcttcacattcttacacactatgattaagtactagacttgctatgggtgggcatgcactcattcactataggctcaaaatttatgaagaacaatagagagggattcaaaatagaagaagaagaaggaatggaggctctaaaaaaactctaggtgtttgacagaatgtaaactaggttaaatgagtagttggataatgagaaaatcctattatttttatactatttcacctagggttaggatttaaattacatggactaaaaaatgataaaataatagaaaaaaataagcaatagtggttggccatatagatgggccccctagttataattttgccattttttcaatcattcatcttttatttcacaaatgccatattttctaattttaatcctataaatgcaaaaattttttatttaataattataattagttatcaaataaaat

SEQ ID NO: 15352 - DNA, 3189 bp, Cannabis sativa
  modified_base (2040)..(2047): a, c, t, g, unknown or other
atcagcattcctagttgtaggattttgtatttttggatggtgggaagtggtgccctgatcttcagttttttcaaacctcttgagaggaggaaaatgtgtatcataatcaatgaatgggctagaggtgatcatgtttgtgtcaggaaatgattgaactgattgttgaacagctactattgaatttccatacaaatatgttaatcatacacaaaaaattcatttatacatttgctttattttcgagctttttgctcaataatgttcagcagtatgcttataataatgctctgataattgaattgtaattcatatattaatgtatagatagagagagaagcaaaaagagtattagttagacgttgctataactagtgaccccattttcttgtttttttttttccttaaaaaaaaggagtattttcttgcctcaataataaagattatgtcagaaaaaaacaaatgccttgtggcttgtgctcgatagccagctcttaattacgatgtattggtcagtaaatcatcttttatcaattagttttgtgttcctatatacttttgagttgttggggactctttattatcaatttattagtgttcatacatatagagattgactttcaaccatttatttcattacccaagttaatagagttatatatttatatgtataaagaaagcttgagtagtaaatatgatttctttttcacgtagaattttgtacgtacgtaaaagaaaccaactatacggtggatttacccaagatatattaagaaaaatgaataattgtcagataatatatatattgtttataaatagtttggtagaagtgaatttaattagttaatgtagttgatgaaagtaattaatagtaacatggagtcacgtagggaaacctgatcaaaatatatcatgaaattggaaacccttaaactgtcgacagggaagggctccttaattcctcctcaaagaggaacctagctagccatatatatatttattaaatgatagctcactatatatatgacacactcccacgctgagttgcctcctatacactatttaacttattaattaataaagaaaaaaaatcaagggagaagggtttttcatgaacagcccatgtctttaaatatttgggtcacatttaatttaattatgataactgcagctacgtaccttgctttaattgcttttgatggcaacccttcaaaaatcaagtaataaataattaagcattaatacatgcatgtgtcaatacatatttaataatttttttttttgaaagggattacatatttaattattggagagagaggaggctttaatttggatatttagttggataatatatatataaatagattcattatttagaatatgttacatttcattgggcaattattaattgatacaacaagatcaaagtacgtaagtcatcatatatatatatatatatgtacataattctaaaattccctaacaaaacctatgtattatgtaacttttcaaatagctatggaaaccctgccaaaaattaaagaataaataaatagaaactaataataaagtggaataacaagcatatacatagctagtagctagttaggttgcagatggagatggtgatggtgatatatatataaaaagttatgtgttgtgtgagtttgtagtgcatacattacattgtatgcatttaattttgaaaaaatacacacatgcctcgagatcattgggtacctacgtacatatatatagtgacccataacacctaattaacataaatacatatgctgtatatataatgcttgagagtgaagatgatggtacgtatatatatatgtgtgtgtgtgtgtggagtagaaggttataagatcaaatgcctccgtgtcacatggagtactatatagtaatggtagttgatgattacgaccacttttctcaaagattgtacattttaaacgttttcctgcagggatattaattcatcattgatcaaacatattgaacatgaaaaatcaattaattatatatatatatatnnnnnnnnatatatatatttttttaaaaaaaggatcgtatttctggctatagctgaagtataatatgtagaaataaataaaactcatccaattcccaatccagtgaacatttttcttcacaattcaacattaatcgtttggatatactgttttttttttctttctttttttaagacaatctccaatggtttgcaccgttttagtgtacatttttcactaatttgattataactctaatgatttataaacaccacttgccatcaaaaatgatacctaataataaaaatattttgctcaaaaaatcttacatcttatattatttatattaataattaataataacaaatttatggtattatatattgtcaacaaagaattactgattatattttaaaataaattaaaaatggttaaaatgtgatgaaaaagttgtgaatcaatttagtgtagattcaacatctaatactattaatggtgtaaaatttggtatacactaattcagtgtaaaatttagtatagtcttcaagtaaagtaatatgaaaattatacgccaatttggtggaatgatacaccatttgagatgcttttggagtgcattctagcatagaaagtatatatagagtgaaatgtatatggtaagtatatatggttctatcaaaatgaattgaatttttacacttacaaatattgaactcttgtctttttttttttttttttggtttcgctttaatataaaattattgaaaaataaaatattaagaatttatactatcatagttcattattcttaatcataagtcaaattaaatatcaaatgacaaatttggtagatctcctattctgtttattatttgtggtgaaattttgttaattgatcatgagaaaagaattgagcatgcaagtttatggtttcaaagtttgtaggaatagctcccaatctcccatctcttatatgtagataatacttttattttttgtaaggtgtgtttggaagggactagtattgtgtattagtgtatatattagcatggttacttaaaaaaaataattattcttagtgaattttttagtcacaatataaattttttgtgattaaatataacttttagtcacaataaaaaagttacttatgactaaaacataacattta

SEQ ID NO: 15353 - DNA, 7227 bp, Cannabis sativa
aatgtagtattatataaaaatatgatatataatccaattcaatataatacaacacaatacaatacgacttaatacgacgttccaaacgagcccttagatattaaccagtgtctccgaaaataaataattaaagaatgtagaaggaaatttagagaaaatttattcagtgagtctcagatttaaactaaagaaaaggtcattttcctcgagccaataatagcaaatgaaaacagcaaattttgtttgaaaggaaactgcttttgatgttatgagatcaaacatctcttctgtacaggtttgtaaaccaaatgcttctgaaacttcaaaccatctatacacaagttttctctataaaactaaattaaactatccacattcaacaccaactattaaccaacctcaaccagttatagtcagtaaagaaaaagatcctatcttcttcagtcatcaccggccaccatttctttatctacatcaaaccagcaatcacatctgcccctcctactctaatacttacaaattcacagttctaagctgagcaagttgtcgcctacgaaagatggaaggatccttgtccttctgttatcgcatacaatagcttctctttcatcctctcctgaacaaagaaaaacagagataattagtgttggtcaacacagaacaaagaatagagtttagttgttacttttgacgagtagggtggcagtttaagatagttggcacacgtcatgacgcttgggaggtctgcatctacatagccgttacaatgctgcagattacataagaaaagacgattaagtgtgatgggacaaaatccacagaggagcggttataaatgaataatgataacactataatgtgcgtacctttcgaacaatagtcaactttggattaagagatgccaaacctcctggaggtaaacggggtgctccagtcacaaattgcaagaaagctcgctgttgtttcttgttgaactcttgtattatctctaacaactgaaaatttcaacatgaaaattttgatagctggaaggcatgcaatgtaattaaataaaatagacagaaaggcgcaacaaatactaacattaaccacaggaggactgctagcagtgtatccatgatcaaacttcacttgatcaacaagctcgtcagcctattgccaaagtaaaataataaaaataaacttagggaggctcgttcatataaattctcattgtctaatttgatgaatgaaagtgaaataaataacatacagcccaagaattgtgttctccgcatagtaagcgttctaattcctcttcagtaaagatctgaagttgctctatagggaaaacctgaagaatcaacgatcatttaaattttcctgaaaatatatggtaatagacttctctaacagaagaagaaaaagaacttgagaaaaagaaaaatccaaacacatattccatgtcagggtttatatgctacaatgaagggaagttctgtttcagatttggccagtacaccaggtaaggaacaaatgtattaacgttcaccctactctggtaaagtgagagattgcacatacctgattaaagcctaatttaaaagcttccatttgtcttgaaattccaccatttaaagttgcatctacaacaagtgaaacataattttccaagtttctcatagttacctaagagaacatagacaaaggtgaggatttcagtcagcgtagctaaaaggaataaaaagagtgaactcatactaagtcgaaacttacaacatagacaaaagtaaagattacagtcagtctagcgaaaagaggggaaaaaaaagtgagctcatactaagtggaaacttacagtgtcataatcaggcccagaagcaagacaaaaatcaggatacccaggaagtgtaaaatcgagggaaagatcctcgattctggtattccggaagaatgtatcaatattagaagtggaaacaactccaccagtggaatccagaaagagttttctatctgcaagagctttgaactctagcaatgtccttccaagctcaggatcaaatgacatgatatcaaacaaaccaagttcctatagaacaataaacataagcattcaatagaaggtaaattacgaaacagaagcaaaaaaaaaaaacaatgaactggtaggctaaaagaaaactagctcactacctgtccaagaataagcttatagaaagcttttgagaagtgaagatccaaaactcgtccattatgaagagcctttgctaaaatttgtcccaggagttcaaagtttttcattacgccactaaattgagttccatcagatacatcggtagaagatgaccatgggcgaggaaatagacccaaggggcacatcacaaactctttattctcaagctgccaactagtatcagaagcagatccatgatcatctctccacatgcccagtccagtcttctgaaattcatggctaaccaaggtaaagaattccaatgttggaccaataccggtgccaacttcatcattaaacactacctcaagtagtcctttatggcgggcatgctgttccatcatttgtttagcagattccagaatgctatcacgggaaaccaaaaactttttacgagacaggccaccagatcttactcgtctgtcaattgtggtggctgcatcactatgagatagcggcgactgaccaaatgctcccaaacgaaagtacatgcatcttgcctcaaaactaaacagaaagggacatgaggccattatctgactgcaccatgaaggcataccaccaacagacacagccattcggtcacgcatctgctgttctagtttttctgtcagtttactacttacaaactcattctgcggcactgaaggtattgctgctacgtttaaactatccaaatcatcaagttttccttctgcaaaagcacccattctttcctgagatatcagatgaaaacaaaacctgttcatcctttccaagcatttcagcagatacattatatcataagtagggctcggtttctccaagtcatcaacaagatcagaagtgaacatgctggaggcaaatgaagttggctgcacatacatcttgattgtgtcagatagaccacactttttaactgcacaagagcattccttaatagtataaggtttatttacagattttctgtatgttaaggtgtaaacttgactccacaatctcgtgctggcaacagtttcacgctctctaatttttttttgaataattgcctggtataaagtcaagtccctctctagcagttgcccgtcaaggaaaaataacaggttcggcaaagcatctgtaccactcctagatgcagacaattccctttccatatcaatatctgccttcggataaaactgtacttcctctgcagattcctgagacattgctccaggggttaccacactagaagtggctgcttgttcatgggaagcctgtgacaaagcagcatgagtctcctgcagaaagtgtaactaaagtcaaagaaatgcacccaacattaacttaaatgcaaacaataaacaaccccaacccctgacaataaaagcaacatctacttcgatccattcaagagaaggaaaggaagaaacttgaagtaatttaaaaatatagacaaagaaagtcattgttcagttatggtgagaaaatatacaagagatacctgcatctcagccaaatctgtcaacatgctgtctgatcccctgtcatccagacttccatctgggctagaacttgaaggtgctaatgattgaagtggcagctcttgtaattggcctgaaccttgcatcagtggctttgtcacttcactactgactttaggccacagaaacccttcaatggcacccactgaggaaaaggggtcagctgtcagataatcttcactgtagtcactgaggcctgtctctccttcacctcttacaaaacgaactgttagagatggatacattatgcaacggccacttggaacagcagcaaatgagctcctcatcttggcattattcaaaacaacaggaaatgtttccaaagaagatagtccattttgtaatttaagtatgaatgctgataggggcgagtcctgagaaagtgggtctgatgaaagcaaatacacttttgcaaatgcttcaaatcttttctccatggcatggatattactgtgattaacacagcactctctttcttttctcaaatactgaccatctgacaagtaattaaccaatgatttgacaagtccactttcaataaactcaaatgtggagatgggctcacttccattaagcttcgcgatcacttgatataatatatcatagaacctctcctcatgttgatcaaaggcctcattgttcatggggatgttcaacaaatcatttagtgccaaagaataacttttgagctcttgaagaacatcagttaatgttatattggagtcaaataaatcagctgagaaataacttgttcttatatgcatagcaatattgtaaacagaatccttttcaagcttgcagctattactttccactgttgaagctgtgctgccagtagcaaaagtgtaacataagcatgtccgagcctccctgaaaacagacttttgactcgaatcagatgagacctgtgtcgtacaaaacacagggaccattaattgtgaatatttatcttgctttaaatcaggacacttttctgatgttaacagggcatcaatggcaaaaagaacgccttctttcacaaaagagtccaagaaaatatctgaaagcttttggagaaccagttcagctattttcagggccaagatcaaaacatgaggatccattctagtaaatacaccagccaagaaactgccgcataaaaacagaacagtgagcattggtaattttggtttaaaaacattggtagtttaagaataagagaataccgattaccttgaaaagttggcattcttgagcacttcaacaagcaagtcagcagtgctcaaatgaatcatcttgttgattacaaaaaggcaaccaaaggaaatatataaatttgccccagaattaaccacctacaaaaaaaaattaagcaggcattagcatgcggtataatattcagaatttaacagtaatctatcagataaaaacctggatcatggagggaagaatatccatcccaaattttttcaaaaggtcaggctggtttttgagaaatgattctttatccaataattctggtgcatcttgatctccggttgaagcaggaagaagcgcgtttattaagtttaaaacttcatatacctgtggcgaaaattataggaattaatttccatacatgatttttgcttcaataatcattttttatatctaaaggaaactaggacaagtaagggagcggataaatgaatgaaaatagtaggcaccatatcagtgaatccaaacccaatactgttgcaagaatgaatactaaggtgaatccagtggtcatacccttagcaagatacatatcaggaaaactagataacaataccatctcgtccaaatatgtatatatatatatatatatataaatgaatatcatatatttatatgtctggatgatatcatacattttttccatataatgtagtcaaagccaaaacatatttaatatgctcaagataacaaagttgatattcaactcagtgaccattgccatagaaggaaaagcaccagcagtttaagatgtgaacctgatttccctgcccatcaattgtacgtggagaggaaactccatgtgacatgtcataattagacaaggtatccttcaatatgctacttatattaagctcaaacaaagtcttgaatgctacagttgaaccagagcaaagtttgactagtacccctagtaacccctgccatccaaagcagaatatgcagacattcactcaatgtcagcaatgcaagacataaagctaatgccaaaagacacaagtaacaataagtaccgtacattataaactggtagtgacatagtagttcggctacttgagtttatgaaatgagtggtctgctcaattaacccatgcttgcaaagttcatccagcatctcagaagacttcctaactctgtctgtaattctaatcaagcagagagccacattttcaacaagctgaaaataaaccagaagcatgagcatgatggtcaataatatgcctcaaaacaagaaaatctgagacaaagtcctgaaaaaccctgaacagttcaagtacctgcttatcttcataatgaagaagattgcataatatcggaacagcctccataaaaggggagggacattcagaaggaagtttcttgcatatgttcatcacagtggaaagagcaactctctgatacagaataaataaatagcttaaataaatgccaggcctcgaaaaaaataagtaaatcaatctgagcattgaataggaatacataactaaaaaggcgctgcagtgcagtaaacgtgacacaaaaaatttcagagctcacatacatattagatgctatcttacctgaatgcttgttgagaagaaatcgataaaactcaggacagccattattgcaccagcctgcaaacaagcgagtggttgctcccgcgatattttctccaatgcttgcaaacacttaatgtagataagcaatgtattaagacacacacaaaaaacatatattcctagtataaacacaaaggaaaacatcaagtttacctgctctgccacatccaagtattcaattgccatcagtctttgacaaagagcaggaatagcatcatgtcggaccagaaaacccgatgatcggggataaacatcgcaaagataagttatagctcttatagccaatagcataatttctgggttagtctcatgtcttgagagccttacaagataaggagataaggagtcagctgtcatgctagaaagtgaattctctgtgcaaaatgacagcacttcacatagctctgtaagcacgactagctgaccagactcgtctgtttcttcattcagaactgataagatcctcttgaattttccatgatcaccagaagatctccgcctctgatagtctctaagctcagagtgtctttgctctgcatcatcagagtcacaagacccatatgttgaatccttttctggttctccctctgaccggctagaggccgaagcagaagatgaggtatccatatcatggtcaccggtttcagcagttgaattagtagaattcatatgagtt

SEQ ID NO: 15354 - DNA, 5721 bp, Cannabis sativa
  modified_base (27)..(40): a, c, t, g, unknown or other
aggatgttaatgaaacatacatggtannnnnnnnnnnnnntggtaaaataattccaacatgaataactgcactagaatatagaaactagctaagtgatgtcaaatatcatttaggcctcaaaatatatatccttaacacgtttttctcttggcccagcttctaggttgacatatgatatcaacctgggtgctagtattaaagcagtcttaagtaaaatagccataacccactcattattgatctgattgatgcgatttgacttgcgtttcaaatttatttcaattctctatcaagtcatggttcacactccaattgaaatttaagatttcaagtccaaatattgtcctcaagggaattacaaatttcaactacaacttacccgaagtgggtcctgcggatgcgattcaagctctgaaaattgatgactaacctctagagtaaatttcactgttagatcatcatcaacaattaaaaatagcttaaatgtatttttttcattttttttttttttgaatatttctttattattttaacatgacatccttctctataaaatgagagttcctttatttcatttttcacattcagaaaagtacccatatgattgcaacctctctatagcttctctctctagaaattaaagctttcaaacttagctatttttcttataactattcttgtgagcataagaacttgaagtagatgtagcttcattattgtcgctacacagggagtgaactactataaattcttctgtgtgctctctattttacattgttacttctaactttcatctcatctatacatacgagggagttggcaagatatttgcatcaacagcagggggcaacttttatttcattcttttgttttgttttattttaagatatcggaatgtcattccgaatctaactatattttcattccttccaacaaaatgccacttaatgaggattttttaatgtgagtttgaattagagagagtagagttggagggaatatagaaacccaagttgtggaaggaattaacattactaccatttaattcaaaaagtgagacccacttaataacataaacccattggtcattaaaatttaatttaagtttgatattctcatttcctaaagtctaaacctcatactaaactccacataaaagaactacaagtggtgatataagtaaaattggtgactattaagtcctacttacctgtctaagtagttagttaagtcaggtttaccaagttggttaattagtgttgttagttcaatttgtagagaagttagtttctattacaggttactacttcttgtaattagttactagatgctaatataaaaggaatatgcatattgtaattcaatttctaattcaatccataaaattcttattctttttcttttattctctttcgcaccttacaaactgatatggtatcaaagccatcattgttgtgagctcaagtttgttttgttggcactcatggtatgtagtggaggtgttcagacacgtagtgactcgaattgagaagataattccaacagttcaaacaaatattttgttcttggtgaacaaggtagattgatttaaaatgaggctttgaatccatattttctatccaatggagacaatcatggagaaaacttagttcccaagatcctcactggaagcgagaactacaactgatggatgtgttttatgatggtggcattgatcgaaggaaacaatgtaaaatttatcaatggaaaattttctacatcagacgaagatcatgagaattatgatagcatggtgtaaatggaatatcatggtaatttcctagattttacatgttgtatctagtcaaagagttgatagtatcatgtgccatgagaatgttggtgagatttggtctgatctttatgaaaaattcaaccaaaaaaatgctcccagagtttttgaggtgaaaaaggttatgcaatttcttacacgaggtttagatagtgtaacaacttacttctccaagcttaaatccctttatgatcttataagccaatatagagcacaatatttgcacttgtggcaatatgaaggtaattcaaaaatactaggggaccaaattcttgaatttttggttagtttgaatctctttaatgatcgatcacaatcttcatgcaagaaccacttccatgtataaacaaggtttatgctttgtttattcaagaaaaaagacaaagaaacatctcaagtactcacactaagactaataagttgggtcaagttccactagccagtttgttgggagcattcaatcatatcgactaagaacctcatgtactcattgtggcatctctagacacaccatgaaaaagtgttacaaacttcatggatcgcataaacatcgtagaaaatttccatctcaaaatgttaaagggcctcaaaggaaagtagctgctaatttctatggtgcttaagatgataaacctattgaaaccttgggtcatgattaagagcttgtgtccaattaatccagctttcaatgtcaaattttgatggctcttctagcttagaaagttggagacaattcacatccccatgtctcatctaaataatctttgatatctcacttttttagtaaggaattcttactcaaaattctcattaaatcattgaaataggggccacacatcatgtgtgccctgacgtttccttatttcatcatacccataatgatctttctttttcatcagttttattaccaaatggtgttgatgcaaaatttcttgtattagttcaatcacttaacccttgatcttattttggacaatgtcttaaatgtgcttacattcaaatataatttgttatcggtaacttccttaaccaaatttgaatatattgtacttaccttgttttatgataaatgtgtcacataggacaccattaagagcatgcagattgggatgggtgaaaggattggcaacttatactatcttaccaacccaagtctggttccttcaattttttcttcaataatagattgaaaaatttcacatgaaattgtatgacataataaattacgccatccatcttgtataaaagctcattctttgtaatttcaatatgatgattttcctttgttttgttgttctatatgccactatgccaagcaaataaaacttccttttgtttgccatcataacattactaaaaattattttgatttgattcatattaaaatttggggcccatttaatactttaatcattaaaggctacaaatatttcattatcatagttgatgattgttcaagatttacttgaattcatctcattaaatatatatcagatgcccaaataatcattcctcaattcattttgcttatcaaaactcaattcaatgcacaaaggggttaggtttgacaattcaaaagaactacaatttattgacttgtttagttcactagggatagttcactaccattcttgtgtctaaagaccacaacaacatttagttgtagaaagataatatcaacacttgctcaatgcggcccgtgaactcttattccaatcctttattcctctatgtttttggggcaactgtgtcactacagttgcataccttatcaataggacaaccgctcaaaatctcaaacacaagtcactctttgaaattctcatatctaaacgaccaggatatgccagttaaaagcctttggttgcttaacctatacttctactctaagcttatcattgcagatcaaaattttcccccaaatttacttcttgcatcttcttagagtactctctaggcattaaggcttataagttactcttaactcaaatagagttttctattctaaaaatgtacagtttcatgaacacgttttttcatttgttgacaatggtggattaactcctaaacatgaaaaaaaattctgtcattcctggttccaggtgtgatttttttgtgtctgatgtgcctactgaacacatctcatcctcaccagatcaatcttctatatcaactagacctattagaacatctaaaatacaatactatctcaatgattatcattattttgtagcttctaattataattatgatttttctccaagtacatgatcaagttacttctcaccttttatcagaagtggctacttatgacaggttgtcttcgtatagctactattttagttatatcaagtctgaacatgagaggaatcaagctatggctactaaattagagacacttgaagctaacaatacatgggctatagtgagtttgcctcctgatcaacatgtgattggctcaaaatgagtttctaaaatgatgtatcatattgattgcatcattgaaaaaatacaaggcataacgttgtcaaagggtacaatcataaaaaggggtggattttaatacttttgcaccagtcaccaaactagttattgtgaagcttgtctgggctcttgcaactataaatgaatggcacttacaccagctcaatgtaaacaacgcatttttgcatgaaaatgtgtatgtccatagctcaaaggaaaagacctgagggggaaatactatgcaataatgcagtttacaaagtaaagaagatcctatatggattaaaacaaccttttagggaatggtttgaaaaaatttcgcatgccttagttgaggaaggcttcatgcattcagacattgatcattccttgtttatgaagcactatggaaccaattttatattcttattggtgtatgttcaacacattgtagccaatccaattttccatgtgagaactaaacacttgacacttgattagagaacaagttgaagagagaatcacaaaaatagctcatgtttcaacaaaaatacaacttgctgatttctctaccaagcctttgtttacagctcagtactaagtgttcaaagacaaaatgggttacagaggacatataacacatcttaagtgggagtattaagtccagcttagccgtctaagtagttagtcaagtcaggtttagccagttaattagttggtagttagcttctgctacaggctgctacttctagtaattagttactagctgctactatataaggaatatacacattataattcaatcaataagaattctcattctttttcttctcttccgcaccttacaaactaatagtgactttaggctaacactgtcaactttattttgtaaaacctttatagaaacagagtgcaattggtaaacatatttcatcgaaaagaaaggaaaggaaaaagcacaactagttttcctctattcctggccaaatctattccacagaatagttcgtacatatgtgaaggtggtgtgggggataggggagaggtataacaactaaaataaattcagctcaagattgggccttataagttgataaagaagaaacaaaccaaaagatcaacaagaacatgagcatacaaaaagaatctaataaacaatacagctgactccaacagtaatcttctttaatcaaatatcagctgcaacattatgtactttgtagcaatgatgaaacggatgctacatgtgctttctcttctcatggctagccatatatatctgtacgaacattatcatagcagtagttaggcatcaatattgaaacatgtcaaactatcaaatgttcaattttaagatataaaattctgccaggaaattgctgaagaaaaacaaaaccagacaatgaaacataattatatatatata

SEQ ID NO: 15355 - DNA, 5793 bp, Cannabis sativa
attttatataaaataaaaattatcaaaatgggatgcctttagaactttttggggtgtaaataaaattttcttttttaaagtctattatgtttacctgttttttttaaacattgtaccaatttgtcacttaaaaagaagtatgtttcaaataaatataaaattagaagtaaatttgattaattgattaataaaagcggtatttttcaacttaccctaaaaattttataaattatattctcttggtttgtttcttacatgtttgtttggtttgttgattgtattcattatgaaagaaaaaaaaaatctatttatatcacattgtatactccattttcacttggcaaaaaaaaaaacaaaacgaaattgtataccatttcattcatattatctttctgaagaaagtgaataaccacaggcaataggcaaagcctgcacatataaaaatctaatacaatacaatcatgattaaaatcaagaaaaaatgaaactgtttgtccagtaagaaaaagtaaatcgcattctctgttttacaagtcatgtaaatataataaagtttaagctggcagttttaaatccattaaaagtgatgccgagtcaaaatttgaaaaatacattaaaggaaaacaaaaagggtaagttgtctctacttgggtaaaacatatttggactgactaagctaccacccagcattatgagtttagagtccatcctaacaggatgtaaagaacgataataactgaaaactaactatgaccagacaccttaccaagcagaaagaatggctcacattatttctacttgattatacttcttgctagccaccatctttacataagatagtagtatccaagcaatagaagcaccacaactaccgctgcagcagcaggacctgcccatagccaatagttggccgattttttcctctttaggatggctttcgggatggactcgggtcctctccctcgaggtcgtgatctgatacttgtctctcttggaaccctctcctttgctgtagctggagcttcaacgttttcatctgccttttctggctctgcatcctctgcaactgtttctacaatttcttcagaagtgccctcagacgtggctccagccttcttctttaatttcttttcacgttcctgtggtaaagccaaacaaattgcatcagatcgtaacttaaagctcgggctttgtaaccaagagcatgaaaaatgaaatactaatttaccttattcttcttttcagcctccttttgagctcttatagctgctttggctgcatttttctcagccaattttttcttccgttccatggccatcttagcttttgcgatttcctcttctctttttatctccttcaatttcgcagcatcaacttccttttcctttttaggagtttcgactggcaatttttcagacactgcgatctccttctccaccacatcagtatggtccacagcaggtttcaaatttgctggtttatttttttcctctttctgaaccttctgagtgggtacagcatctacttgaggaggtttcacatcttcttttgcacgtttcgaattagcttttgccactgtctccacttcaacgggtgcagattcttccaccactaccaatggtttttcatcagggtttctcatccttccatccttactcagttgccgactatcaagagatggcaataatcttttcaaataatcatccctaaatgatttgttactgttccagagggacataaatttctcagcctgaaataatttggaggtcggggtcgttaatgcacatacacaagtacaaaatttttaattaaaaattacagaataataaaacaaacctctgaatgacaatgctcgtcgagacccttaacatctttcttagcagccagatctctggctctattcaagattgaacggctttggtagaagtgggtattctgaaaaggagaatttgttaattagtgccagatcaaagctacacattaataatttagataataacacaatcttttactcgagttcattgaagctcttaacaatcatctcaacgtataaatactaacaatcatctttcagtaacatgcaaccctactaatgaagctcttaacaattgcaattctgtagagaatattatacctaccagtattgagacctacaattatacaatatgcagaacaatgtcattaggccagaccatatatatcacaaatctagaaatgttggtattgctgaaagaaggcttcagtttattacccatctcaaaatgagcatggcttatttttctgaactctatgttgaaaccaagctaatgcacatgtaaagcgagggaaagaaagacaacgtgatgtgcattttttctagaatccagacacaaaagaggaaattacactgaaattagatcaacttacaaccctaaattatttagtaaaattatgagttttgaatcgaatgactacggtgataaaactcccaatgcaagtttatggccatcagaaatttcatgccaccttaaatcatgtggtatcctatcaacacttctaaagaaaaggtgtttattattaatagcaatgttttgaaaggcggaaacgggcgttttgccatagtaccgcgaggcgtaagcctcatgacgctccgaggcataagcctcaacaataagaataaaaaattcatacacatgatatatatcataaaattcataacaaaaaacacataatttcataataaagtcatgaaattcatgaaattactagctataagtcttaaaatataactaaaggcatacaaataggaatgaatatataaaacaatgagaacatcagactgctcagagttcgaaaaatatacaaatatataaaagcgagcaagagatcattaaacattgaaccaaaaaaataaaaaacatataagcaataaaatctctttgacaataacaaccaatagaagtttttcttacctttcatctgtcatgaaatatctaacaaagaccatattcattcctaggtcgaccaaagaaacaccatgcataaaaactagaactttaaaaagagtagatgtaactacacaaataaaacataccccatcatcgcgcagttttctgaaatgctgaacattttcacgtgctttatctcttttctcagttaaagctgtcagttcatcttgcagtgaagcaatctctttgtcaaaagcctttgctgcatcatcaagctgcttgatttttgccctaaccacttgctgctcctttctcaccccatccaaatcaccacctataagctacaattgcataatttagaatattatcacctcgcaaattacatacacaaaaggttttgaatacattacagaggagagtaataaaattcaaaatcccttactttaacctggtcttgaaggacttctttctgaaccatggaatcctgaattttggctctcatagcatcattagcagcaactctctccctagtgctctcaagttgcttgatctctcgaaggatttgcttctcctcagtcaatggaatgctctcatgttgaatacgatattgcaagctatgtatctgttttcaccaaaccaatatcagaaggtatgaataacaattaaaaaaaatacaacaggtcaacaataagatgtagaatttacagcagtgaaagattggatttagacataccacactattaagctcttgctcagatgaacaaacaccccgatttgcactgtttgcattgcgaagctttcccaaagcctgatgcagtggttcaatctctttgattttctcatctactaacgacctaaactgtctgttgtcatctttcagagctctaatctgtgaaatcacctccgatcgatcagcctgcaagaaaagaaaaaatgcagtcagatatcttttcggaggataaatacataaaaagaataataactaaacaactctatcaaattaagagtctttgaaagatggtattgaactgcctttgacattcaacctttgcctagatcatttcataggaaaggcaggctattcaactactttcatattgttctacagcacaataatgacatccagactataatctacttcagaatctacaacgtaataatgtatttgataagtgaaacattcaaaatccttaggtgctaatcttcagctgtagaaaactggttcgaataatttttcttgtaaaaccaaaagcttaccctttttgcctttaattgttccataatcctcaatcgggcttgattttttttctcaatatcaatagcagcctggtcaattttgactctgattttgggatcatcatatgacctgtgcctgataaaataaaaagaatgaatctgcttaggcgcaggccattcttcaacagcatcctgtggaaagttggcatttgaaacaccattcacatcttctttgacaggttcttcgccatgtgagccaaattgaatggattcaccagacttaggcccttgatcttgtttcccattctccttctcgtggagaacagaattgtctcctccagctacaacctccaatggaccatcgaccatctcaaatcccacaacttcaacacccatagctcccacaaaagaacaaacttcacaaggcaatcctgccgtaaaaagcaaaatcaattcattgcaacaaaaacagatgaacaaaacccaagataaccaacaaatatttatgcttaaaccagcaaaataaaaccactagaacctaaccccttataacgcaggcatagaacacgatacttcagaatctacaattctctgaattcaatacagatcttccaatcgaaaccccaacagcccaaaaaatgtggagaaataaaatccaacaaattctataggttatatttcaaagcataagccaaattcttggatcctttattaccaacagtagaaaaaactcaaacccagattcaataaaaacaaaaaaatcgaaattaaatatgaaaaccatcaagtataaaatcgagtaaattgtgctcgttacatgcatcgaatcgaagaaaatcatcaaagaagtagcaaatagacacatgcagattaataaatgagagaaataaatcgaaacattagaatctccatccaaaatccatgatttcaaaattaaaaagaaaaaattgcacataagaaacaaggaaaaacaaacccaatctgtgattaatgatctatatcggtacagagatcaattaaccagacccgagaagaaaaaaaaaactccaaaaacaacgaaaaactatcaaatagaatgtgaatggcggatcgtagaaagaagagagaataaaaaaaatacccttttgttatgaaggaaagaaacctcaatttcgagctcaaggcagagaggatggccgaaaacgaaagaggagatatcgaaagagagtcagatctccttcttcaaagtctcccttctctggtttctttccccactgatttgtgtatttatatataaaaatatatatacttacatttaattatttataaaaaaaaaaaagatacatttaattatttccgaaaaaagatatgttcaaaaaaaaaataagaattggtttgaaaagaacaaaaaatagagagagagagagagagagcgagagagagagataaaaattaattttttttgcatagagcttttttaatttttttgaagggctcatagaaaaaatatgagagggatcattctctaagggctcgtttgtaacgtcatattaaatcgtagtatattttattgtattatattgaattggattataatattatattttttatataatactatattaaactttaatttatactaaaatattat

SEQ ID NO: 15356 - DNA, 8122 bp, Cannabis sativa
  modified_base (3847)..(3850): a, c, t, g, unknown or other
aaattatttcggatgctaaaacagataaggatctatcaatatatccattttaagggggtgcattgtagaattttctaaaacttttttaagaaataacgaaaaaaatacagcagaaaattaacattaaaaacaaatccaaaatacaataatgtaaaataataaatttctaagaaaatatataattattcacttacttagaataaatattaactagagctagaatctttcaacaagtggatccgtggcgcaatggtagcgcgtctgactccagatcagaaggttgcgtgttcgattcacgtcgggttcaaagtcccaccacttgaatacttttttcctcctcctgagaaaatgagggtattttcgtcatttgattcccaaactcttatctctttgctctacggcggcctcagaagtcagaactcaaaaaacttagaagcctaaagttatttacccatttaccctcaaatccacttcgaatttaccaaacccaccactatgcacttcttctatctgaacttccaactatagctacccacacccattaacgccataatgtccctaagcttttcacaatctcttcaaccttccaatttccccttcacccattcttacgctcagaattacagcttctcccagttatggtttccaagcacctctcttccggacagacccatatcgacaatctcgtgcgtatcgactcgacccagaagaaaagccaccgtaagaaacgataactcggagactttggagttggttcgcatactcatcaggagtttcagtgacaaggagccattggtgaagacgcttaacaagtatgtcaaaattgttagaacggaacactgttttcttctttttgaagaacttgggaagagcgataagtggcttcagtgccttgaggtttgattatcttatcttcttaccattcctttgagcctttgtgtatgtatgtagttgagtatagctttacatttgatgtcaatagatataaagtggaatagcacatttttattacctgaaatatactgttgattttaatgagcttcgaagagtggattcattgccttgaggtttcatcatcttatctttatactttttttctgttctttttctcagtgatcctttagaagaagttttagcttgtggggttctgataaatgttgaatttaagtaataatgtctatgtagttgtgtgtatttttatcattttgaaagaaaataaaaacatagttgaatttatgctgttatggtttctggttattagtctggaagttttaggaaggaaatatagttaatggcttgacttaatcatcctggcaattcaggtgtttagatggatgcagaaacagcgatggtatatagctgataatggtgtgtattcgaaacttatatcagttatgggaagaaaagggcaaacgagaatggccatgtggctcttctccgagatgcgaaacagcggctgcaggcctgatacttctgtttacaactctgtgataacagcccatctccactccagggacaaatcaaaggctttggcgaaagctattggctattttgagaagatgaaaggtatggaaaggtgtcaacccaacattgtcacatacaacattcttttgagagcttttgctcaatctcgaaaggtgcagcaagttaatgccttgtttaaagatcttgatgagagcattgtttcccctgatatctacacctacaacggtgtgatggatgcatatgggaaaaatgggatgatcagagaaatggaatctgttctagctatgatgaaaagcaatcagaccaaacctgatataatcacatttaacttacttatcgattcgtatgggaagaaacaggaatttgagaagatggatcaggtgtttaagagcttactgcgctccagggaaagcccaacattgcctacattcaattcaatgatcataaactatggaaaggcacgccaattggaaaaggcagaagatgtatatgcgaagatgactgatatgaagtacacgccgagtttcatcacatatgagagtcttataatgatgtatgggctgtgtgactgtgtttcccgggctcaggaaatctttgacaagttgtgtgaatctaagaaggagattaagccttcaacattgaatgcgatgctcgatgtttattgcatgaatggcttgccaacagaagctcataagctttttgagagtgcaaagagtaaaggcgttgccccaaacgcgtctacatataagcttctttacaaagcttacactaaagccaacatgaaggagcttgtggagaacctgttgaagcatatggagagagatggcattgttcctaataagaggttcttcttagacgcattaggagcatttttctcttcaaaaccaatatcaggctctacaaattccacagctgcagagacagagaaagatgtaaaagcttaagtttttcatttacgaggatggattagtttattctttaaacagttattattgcattaacattggattgagaggaaattctgcaaattcatgggggcagtagagagatacatacgtactggtagtctggtaccatctctttagtttttcagtgccctgcctatgtacttgcttttagtacttgtttgttattatcatgtaaatagtttgatccatctaattcttattacatatattatgccatatagatttagcttaatatatacagcattgttatcttcaattttaaggcttatttatggttttatctatgatatactcgacaccttgagatgagagatattcaatgtacaatggtgcatgattgattatttgattagaaatttcaagtgaagaaaaacttttatctatggaggtgtctttggaaggcgatatatcagtacataataatttggatggtaacgtaatgttacttttaaacaaacttgtaagtctctaaattgactgaatgatgagaaagtgagtaggaatgataattatacccacgggtacttctcccttggggcggggggtcgaatttcgagggcggatataggtttaaatgttcatacttgagagtcgaggcaggggaatagatacccgccccgatataatatatatatttaaattttaaaatcttaactattacaattaaaataactacatgctttaggttttttattgattacattaataagacattttaatttttatgaaaatacatgcagtgatacatattaataatcacacttaactgctcaaaaaaatgacacttaattacttattttttattgtcagttttgtatttattaatttcatatattatacacactaatttcacttatatttgtttttttttaatgagttttttatgatattttttaaattttatttgagatattatttttttaagaaaaaatataaatgtaacgggtatccgatagaaatctttccctcgtcgggtaattctccctctgttcccgctttaatttaaatgagtattggggtgggtatggtgatttagaaagtagatataggggtaagggaacaatccccgtccccgccttgtttacatccctaaaagtgagcattttattttaatgtaattataaagaattatggaaagaaatatgaaattattacatagaaaatataaattgacactttatttatgaaaatactttcataaagtatggataatatttatactttttatgtgattttaattaccaaaataactcttacactatcacttacacaatcagacgatagttgcatggtggttgctgcgtggttgcatcatacgaaacagacgatggttgtagggtggttggccgaaggttgcattagacgaagatttcaatcagacgaaataactgttnnnnaaatatttatgcaactgttatgaaacattaaaaactaacaatgtttccatgtatgtaactctatctgcatgtctctttatggtttaatatgaacaaattcactattaaaaatttaaacaacaaaaatacaccaggataaatattttactacagtagtgatgaaactttttttggattatacttcagttgaattgtttgggaactccagttcaactttttgagatctgcctttcatggatctgaaaattgaagtcaggacattagttttatgcaaattaaacgggatttgcagttgaattttattctcgtagtagtttttctacactttttttttcatgaatttgaaacagcccatgttttgattgattctaatcgtcttctcaagtgaagtcgccggaattaacagtggttctctttctggttgaattttcgtttcggttgcgttgggttgctgcgtgattgcgcaatagttgcttgatagttgcgtaggaagcatggggttgaatgtgtatgtaagtggtatttgtgtaatttttttatatagactgtatatttatttatttgaccagttgtaagttattgttatttttttttttggttaaaattgaaaaaaaccctttaatttattagtaagttgcaaataactcccccacatccttttgttatttttcctagcgcgggagaaattccaatttgagcgggaaaactatgtgcatttctccatcatattactgaaactttcagaacaccccttagtttatcagagactatcttatttatttttcttagctaccttagggttttcaaattcaaacatgttctccgccacccagtccgacaatccctctcccttctccggcggtggcttcatgtcctcacagtcatctcagttggccgatgctggtccctctccggcaaaggttcgtaattccatattttactaccttctttcaatattgcctaatgaatcttctgtttgtggatttcgatagagttggggaaggaaatcctgtaaaataatggagatgacctaatcttatattgtctcaattttcaaagatctagattagatagctcgattttttttatttattttttttttcttttctaagttgttcaacttcaaggttgatatataagtgtgtttttttttttttttgggtatgatttttgtatgatctcttcacagcttgattttatattcctctttccgttgctgttacagagtcgtgatagtcacgggttgattccagtgactgtgaagcagattagtgaggctcatcattctggtgatgaaaaatcgaattttgtgatcaatggtgttgaagctgcgaatgtacaacctatcctttgctgttttcaaatgcttttggttttgtaatccatcattttatggaaattttgacatgatctaatgctttaggttactctagttggaatggtctctgacaaaactgaaagaaataccgatgtcagtctttttctagacgatggaacaggacgaatcaaatgcagaagatggtactttctttctttgtttctttttatctcttttaatattcaaactcaatttgtacaataaggatcgttaaaaaattgataagggatctaatctgtgcaagcccgatttcatgaactaaacaaatgcttccaaattccaatatgtaaagcaaaccatttacacagatttatgttgtaaaagacgagacataataattaatacttacactatttgaacggctagatttaatgttccatctacaatctatattgtttataaatagtttaattaattagtatgtgtttgtattatcagggtgaatgagaactttgatgcaaaggaaatggaaggaattgagtaagtttcaaccacttttctgaataatacatgctgatacttaattatggaaaacttctgatctgtttgtttctttatcttcgtttgttcaggaatggcatgtatgtacgagttaatgggcacgtgaaaatatttcaaggtacccgacaattggttgccttctctgtgaggtatggattgattggctcttagtacagtgttcttttgggcatatgattgtttttaataggaacaactgtaatcttattatcttgttattatgaattgtgatacgcttcatattttattttctaattttgggaaaccttatccttgcattggctattagaacaatttagtgtccattgtttcaagtatggcctatcgttgatagttcatagaaaacaaatataagtgtaatggaagcaagagttttgagctagagtagggtcatgcttctgtaacctatgttcctttctctgcgcattgatgaattgtcagatatgtaatgtcactgtctattgtgagaaatgttcagttctgtaaataccatttccaaatatgtggaagaaattttaaaaagtcttttgtatgttaatgcgtgcaaaagctcaaatatttattgaaataagtattatatcttggaatggagtgatggttatgtgaattttgacactacttttaatgttgtaaataaactttgtgtggtccttactatttcttctgtgaatcgtactttctttttcatcttttttatgtatatttgaagttgaacaggtgaatttgaaaataatcagttgtttcatgtgtttcaggcctgtgtcaaacttcgatgaagtttcattccactttattgaatgcatacacaattacttgcagagttccaagtctcgggtaaatataatttctgacatttcattttgaatatgtcaatgtgttatcttgatggcgaatatgcaaatcttacaactattctttatgtgttgatgtttgttatgcttattgaagcagccaggaaatgctgatactcagcctcagtctgcagactctgcctttagcactcctgtgaaaagtgtagcaaatggatttcagatagcaccatccagtcaggtctgagttcatgctaaccagatttcttttcagaatgtggtttttgatgggtaggtttgacatgtttgtgtttttttccttgcagttatctgggcaaattagttttgatgcacaaaagggttgcgatcagttagtacttgactatctgcagctgccttcaagcatgtgagttgtgcactaagattgtctttgtatcatgctttttttttttttgttctttaccaatgtcacccttttcatttttctgatgttgtgaattctgatattgtaagctacaacaattcttgtcacaattttgaattttctcattccaacttgtaatcacttgtttgcctaatcttgattgcagtgggaaggaaaaggggatacatagagatgaactttcccaacagcttaagattcctgtggataaaattatgtactcattctcacctgtgcctatatatttacacatatatataactataaacatgtttagagcaatgtatggttcttcatgcagtttgtgaccaatctaatgtttctcaaatcacatttttgttaattttgccagggaatctattagatctcttgaagatgaaggattgatatattcaactattgatgaatttcacttcaaatcagctgcgtagtgttggtttatcttctgcttggagtacctatctatcagagtctcattacttactgtacatttcgttccctcttcataggaaatctctggagttcttaattattaggacgatctaattctaatggtagagtttcgttacaatggaacatattatatgctctgttttggtgaacttaatgttgtagtgcattgtaaaatgttttctacgttccatccttctcctgagatttgcagtgcaccaaagttagtttgattcggttataaatatcttagttctttccttttaattgaagctaatgactacacaaatactagtacgaaagcatatggtcaaagatgttaaaagtgttaatgattggttattgaatgaatggcttcccaaaacaagctcatgtgctttatgagattgcaaaaagtaagggctttagcccaagttcatctacatatatgcttttttaaaaagtttacactaaagtcaattatattttgaatccaatctagtgtgtaatagttattttaaaggggaagttaggaatgcacatttttctcatgggggtggggctcgtggggacttgttcctaatggggcaaggattctctgtctaaatggggaacgaggtagggacggggattaaattttgtctccgaatgttaaacggggcagggacggggatgacacttcctgtcctaacggg

SEQ ID NO: 15357 - DNA, 5399 bp, Cannabis sativa
  modified_base (4064)..(4077): a, c, t, g, unknown or other
agataaaaatacttaaatctaataatgtcaataacttatgaaaaaattttaacagtaaaaaaagttcagagaacacaacaaaaatactaattagacaattttaaatctttgaattgtattccaagttccaactaggcgccttgtggcacttaaacccaaatttcccaatgagaaatgtcactaataatattgcatttgcacgtggtaggtccatgctctcttacgttgacaaattaaaagaaaaaaaaaatgttatctttatatccaaaaactataaagatcagatttttaagcttaacaactaacaatggccgctgctgctgtgatttccgtggtggttcagctgttgggttctcttcctctagaaatgataatcaaagaagtaagcttgcttaacaatgtccaaacccgagttgaaaattccaagagaaaactaaggtccattaaagctgtactccaagacgccgagaacagaagatggagtactaacagtagtcaaagtgtcaaactttggctcgagatgcttgaagatgactctcaagagattcttaacgtgctcgatagatggaacactctaattctcagatcccaaatcgagaaagatatcgaattgttggaatttggaaagcagagcaacaaggttagtcgattcatctcttcttcttcttcttcttgcttttgttatttccctaaagttgaaaaactgatttcacaccgtgagattgttcgtcaaattgaggaaattgaagagaaattaactattgctgctagtcaaattggttcattaggtctaatagagaacataacaagagtcaataatactagtcgtgggagattagagactacttcctttgttgatgagattgaaattcatggtcgagatatggatgagaaggccttattagaaatgttaatgttggattttggaccactagaggtgatttctgtggtgggtatgggtggacttggcaagactactcttgctcaattagcatttaataatgaggaagttaagaatcactttcccaagaaaatttgggtaagtgtttctgagccatttgatctactcaacattgcatcagcaattattgaaaaccttcttaaagattatgatcatcagtctccaataataactgaggagaaagatgaggaaatgagtagtagtagtagtaatgtggccccgaaatttcaaaccttacaagcagcgcttaattggatcactagtcgtctaggtagaactcgatttcttctagtgctagacgatgtatggaatgaagagtatagtaaatgggagccattagagataagtttgaagaagttagaacgagttgggagtcgagtacttgttaccacgcgaaaggagagtgtagcgcgtttgatgggaaccaaactttcccaaattattaagttgaaagagttgagccagaaagagtgtcaattgatatttgaaagacatgcctttaaggatagaagaagtgaagaaattgaagaagtgagggatataggtgctcaaattgtgagcaagtgtaaaggattacctcttgcagcaaagactttgggtggtcttatgcgtttcaagggaagtagacaagaatgggaggatgttttgtgtagtcatttgtgggagttaaatgttcgtgaagttgagcaatatctctttggtccattgctattaagttatattgacttatcttctttagaaaaacgttgtttgttacattgtgccatatatccaaaagatcatttcattgataagacacaactgattcaattgtggatgtcagaagggtatctaaattcagaagaagaaggttcgaatgtctttcagaatttaagtatgcgatctttttttcaagattttcaagaggtagaagaagatgtattcgatgatggtaatgtggtttgtaagatgcatgacatattacatgactttattcaatatttgacaaaaagagagtatgagattgtagaagcttttatcattaatttagatggtaatcagaggaggaggctcaggagattcgaacttggtgatcaaagaatccgacatttgaccataacattagaatctgaagctcaatttcttaatttgaaattgagtagtgacaataaaaagtttttgcacacctttcttattttaaggcagggaaagagcagtgctgtatgtgttgatagctctgtgtttatgagtttaaaacatcttcgcagtttaaacttgtcgaattgtgggctcaagagtttgccagagaatattgggagcttgatacatttgagatatcttgaggttacaaacaatcctttggtgaaattaccagacacaatttgtgacttatgcaacttgcaaacatttagattggagcatggctgtccatcactgctagagctacccgaaggcattgggaagttagtgaacttaaggtttttgtatcttggaggctgcagccgttatgatttcaaaggattaccaaaaggtctttcgaagcttacttcgctgagaattctagattggtttcagaatcccaaaaacagcacaaagtacttaactctcagagagttgacgacaatggcgaattccaacaatctcaaaattaatctgatggctcttcgttcgcatgatgctgctgctgctgcttctgatgagggtcataacaagatggatctaaccactttgggaagcatttatgaacttgtcatatacccaaacatgatgacagatgatgatcctcatgatgttggattatttgagtttatcaaacctcatccaaagttgaaagttttaatactaagaaaatgtagcagaatccaaacattctctccaaaatggttaaagtccttaactttattgcgtgagattgaattctatcgttgctattccttagagacattaactccagctattggaaaactaccttctctagagacactccatttctggggcttacacatcaaaaacatggggcctgaaattctggggatagcagaagaacaagttactcctctataccccaggcttaaagtgctcaaatttacaagcgcggaaaattggttggagtggaaaacagatgcaccttgttgcgatgtaacgatcatgccttgtctccaatccttacattttagctattgcaaaagacttcaagtactacctggcttccttcataatgtgcctttacagtttatttacataacagaagcagaaattcttgagaagcattgtcgagttagggacaagaatgagtggcccaaaatttctcacaccaaaaatatcctcctcaatgacatccatgtacaaaaggatggttgttactttggagattgaattggtttccactaccccatcttgagtcttcactacttcaggtatttattgatataaatttcagtatctttttcatgcataacaaagaaaaaaaagacagttatttagctaattaacaatgctaattaaactttatgtgtaccttcattttagattctaaggtagttacttgtttgtattggaacctagccattggtagaaatggttcatctcaacacttagttaaaacagataaagcaatggcttattgcacaacttggattgagcctcaccaacacttatatataggtctcaacgctctcaagtctctcgaatgctcatactgcagaattcagagataacttagcaagagattgtccgagatttactgagtgtatgtgtggagggttataatgggcgtatcattcttgaagtgatttccctcgacgtgagaaactttgtaatagttgattgtgagtgtaatcttttagacataattaagtgtgtaatgctaactataaattaataaagattcaatttgactctttatcgagctaaattttaatcttttgtctttgattctgtttagtttaatttattttatttttgtaaaaacattagacatcatttctgtaatttttgtttatgtaatttacggcattaatacctttaataatatttaaattttattttcgaaattccaaatatttaattattaaatgtcaagtcaataatcgtgtaatcataggtcattaaatttttatttttnnnnnnnnnnnnnntttaaatatactaataaaaaaaatgacacataaataataacttgacattcaaaaattacagaattataacttaacgtattattacagtaaaaaattaaacttaaatatttatctacaatcaaaaattaaaatttaaatagttactcggcaaattactctttctagtttttacaaccactctccaattctcatcaaagccacctggaatccaacaaccccttcctcatgacagatagctagcctcataataagcccaaatcatataatataatcccaaattgaacattgactgaatattaataacaacatattataaacaaaaataaaccaaattaggcatgaaaatattataaaacgacttataaggttaattaacatgagtcttcaaactcatgcgctgtatatatatatcatcatctagtgtcatataaaatattattatgacacgttagattatgtgttgtataatccatcttaatattaatattaatattaatattaataaaccaccttcgacgaatctctaatcatgattatcaataatacaactatataacaccatcttctttaccttcaatcttaataatcacatagaaagatccaaattagtaacaaaaaaaaaagtgagacaaagaaaaaaatggatgagaaaaatggagaggtggtcgagccagaatcagctacaacgcaaccacccaacaatgagcacaaattcaagagaagaatggtggtattgggcctcattatcgccatgattgcgtgtttactactattcattggtttgattttcgggcttgtaattcttagagccaaggctcctattctaaccctaaacaaaaagaattttaattttcaaagtttcaattcttcatcttcttctacttctttcgatataacctttgcaactcaaataagagttcgtaaccctaatttcgggccctatagattcgaaaacaccaccgccaccttctccaaccgcggggccaccgtgggacatgttatcattcccaaggctaaggttaaaggtataacaaccaaaaagattgatgtgattgtgagtttgagttcgtctcaattgccaaataatgttgatcgtactaaagagttgactgcagggtcgttgactttagttgctagggcaacaatgagtgggaaacttaaagttatgggattggtgaagaggaagagagtgagtaatttgaattgcaatcttgttattgatatcaataaaaagaagatcaaatctttaaaatgtaaaatcccatttagagataggagatataggtcccatgtctaggacattaattttatgatgattttag

SEQ ID NO: 15358 - DNA, 6657 bp, Cannabis sativa
  modified_base (2290)..(2309): a, c, t, g, unknown or other
accaaaattgtaacgccctaatgcttaggcacgctatagtgactttctaattaccgtgcacacatatgttaatcaaaggttttcttgaaaattgtgaccaatttaaaatttttgtttaaccttaaacatttataaatatatacatatatccaaaaaaaaagtcaagatcctgcttttaaaacttatattcatattcaaaataaactttacaaacatgtcacacaacgaatgcaaaatgaagccccagtcgtcccgagaccgaagtctccacgacaaatcatcttgacatctccaatcatccttgacccctagactcacttgtaatgaccgattaacattaatatgacaattagtagatagataaggtttagtttcataagtgaacttttaattattattttatgattttggagatatatttgaattttaggtgtgctaattatattatatgtgagatttcatgtttttccatattttatgcctggtgacagtagaacgtgatgtttggccagtagagtcacttttcttatgatttagtattttacaaatagtgggggaaatttagatagacttgtgaatgtctggaatatttgaggttttagatttgaccaaaatgcccttaggagtcaaggtgacttctagatgaagcaaggggtaaattggtcattttaccctacttttctattatggatttactaggaattttaagtaattccaagcttattctttgtgtaataggtttgatgtatgggtttattagttatttattccttaggctttaattgattaaattagaaaaataattaaaaattcaacctctttctctctctcttcttgagttggtaaccaagaaccaaagggggaaaatcagtgttcctcttcattttggatcaattctagaggaattcagcagccttgattatagtattttggtgaggtaagatcttcttctcttcttccttaggtttttaagtagaaaggtgttgtttgttcatgtaattttgagttagggttctgtttatgcgagttgagattaattttttgctctgaggttaaattgatgttgattgagctaatttaagttgggtgtagtgcttgttgttgtgattggacaaagtttgagcctaagagctcaaacattgccctttaatgggagtttttgtttctggggtttgtatctagttttgttgcttgaaatatgttctttgaggcttgaatatgtactctggaaggtttgagacaatttgggtttgaaatgagttgtttgtgaagtttttagagatttttgcattgaaccgatcaactggttcagtttggtcctgtagaatcggtctatcggttccttctaggcagaccccatagaaccagttttccggttaggaaccagtttaccggccagtttagggtaccctaaattttcatgtttttgcaatatttagggtattaccatgttatccatcgatagggaaactttagttttgattctttttgtctcggaaaagtgatttagcatatctctcatcagttttacgaatattatgatttaggggcctataaatcgtctagcagtagttccactcaggttgaccatcacacctgaattcagaatcgaggtaagattagtgtaatgatatgcatatgtgattacacatttagtatacatatttatgattgcttgttagattacattagaatagcagtatctgtatacacagggttatactggatactaattaatatatgtttggcataagtactgattgatgctatcacattggtacaattagagtaccgagtataggttgatattatggtcaatagtattgtcgtatgaacgttctagacttagtatagcatgggacgtggggatagggttataattgggtgtatggggacctaattgttatctggtttacatttatgttatgtttatgctttttagattgattccattgactcatagttaatatttccacgtgtaggtaagggaaaatctaaggctgaacaacactgagtgtgagcagatgaagattgtacatgtcgaggcaattagacctggagcgtacgatctttgggaaaacaggctatattttgaatagtctctaggcggcaacttttgtatcgaatgttttatattacaattataaatattttaatacgaaatcccaacttatgtaaaagttatttactttcaatataagagtaattaaataaagatttaattaaccatgattttcaactaacccgttgattagcaacggattgcacagttaatataaaatcacgatannnnnnnnnnnnnnnnnnnntgttacaatttggtatcaaagctgccacgttgtcttctgaacatcgtcacgacatgtttaatcatcaacagagataagctcgactcacagtttagtaagcctttattgctttagtagtttgttttattagaatgttataagaaaagcctgataggaagcatgttactagcctaatagcttaataggtgcatgttttaatttcttaagtaaggggtaattagtgatttattcttgatcatgatctaactaggttagttcttcgttttggtggctgttttattagattggatgccaagaagaacacgagaagccaaggtaattcggttggatctagtggcagtcatggagtttagtttccctcaaaaatttatggccgaggtagaggccgaagaggccgggcacccagtccgggaaatgttaactcaccgcaggctgcccaggattgggaaaacaggtttgtaacaatgcaagccagaattaatgaacaagacaaagatatcaaatgtttgaggtagcatggtgctcctgcaatacctgctcttgtggtctaaatggcttatgcccctattttgcaggcagggccggttgcagttgtgaactggatggaaccattgtatgaaaggttccataagtaggcacctccagtccttctgggaggtccagatgttatgaaagccgaacaatggcttaccgttattacttggattttgaattttatgggagtcattgacaacgacagagtggcttgtgccacattccaatttcaggaggatgccttggtatggtgggatatggtggctcttacttgggctgtcactactattacctgggtagagtttcaagagtttcttaatgaaaagtactacaacgaggtagtccgtagtgcaaaaagaaaagaatttagtcagctaactcagaaagagaatatgtcgtttacgaattatacaacccaatttgataggttggttaggttggccacgggaattgtgccaacaaaatttagcaagaaagaaaagtatatggatgggttgaatcccaagattaaacatgacctgatgattacgatagatgataacaccacctatgctcatatggtgggaaaagcactgcgagctaacaacgaagttgagtgcattcagaagtcctaggggactcaaattgttggtggagttacccctcctcctacctatcgttattgtaggggtggtagtgacacaaccactgatgagaagagaaaggcaccatctacatcatgtggctcaagtcagaacaaaaggtttcaaaccaaggtcgtggtaaccgttagggtggttatgaaacccgatacacttactcaaaatttcccaattgtaagaaggatcatctgggtgagtgtaaagggcgaggattttttcagtgtggtttgccaggacattacaaaagagattgcctacatttaaagaaagaagaacagaagacgaaagcaaaacccattccagcaacggtgtttgctcttactcagactgatgcagaagctagcccctcagttgatacaggtcagctctcggtcaacaactcttatttttatgttttattgactttggggaaactcactcgtatgtggtagctagaattattgataaatttggtagattatttgatagaaatgataaagggtttggaaccatattgcctggcagagaattagtgatctccaaaaggtgagttaggtttatgccaatgagaatttaggatagagagttgagttctgatttagtggaattgggcttagaagattgtgatatcatacttcgaatggatctcttgtcaaagtaatctactagtattgactgtaaacggaggatggtgatcttccaacaccagggcgagcaggcatttgtgtttttgggatcagttcagggattccaaattctagtaatctcggtattgaaagtaaaatatttgttacaagatcggtgtctagggtttttgggagtggtattggataacacacatcctgaattagttcggctagaagacattaaagtggtttaagaatgtttagatgtgtttcctgattaacttttgggcttacaattgtagcgggaaatagattttataattggcttagcacctacagcggatccaatttctatagcaccttatagaatggctccggcagaacttaaagaattgaagattcaatttcaagggatgattgacttagggttttcttcacctagtgtgtcaccctagagagctctagtgtagtttgttaagaagaaagacagatccctacgcatgtgtattggttatcaggaattgaacatgttaactatcaagaataagtatcctttacctaggatcaatgacttgttcgatcatgttcaagggaagacattattttctaagattgatctctgatcaggctatcatcagttgagaatataagaggaggacattccaaagattactttccgtactaggtatgggcattatgagtttttggttatgttttctggactaactaatgctctcccagcctttatgaatctgatgaatagggtattttaggatttcctcaatatatgtgtgttaaagtgtttatcgatgacatccttgtgtacttttaattagaagtggagcatgaacaacacctttggatggttttgcagagattacgagaacacaagctttatgccatgtttaaaaagtgtgaattttggctgtttcaagtgtcttttctcgaacacattgtcagtaagaatgtgatcatggttaatccagggaagattgaatccgtaaaggattggccaagacttaagacagttacagaagttagaagttttctgggtttagcttgtgattatggtcagtttgttgagggattttctaagatgtcaatgcccttaacagaactaaccaaaaagaattagcagtttttatgcatagacaagtgtgatgcaagttttcaagagtttaaatagcgtttaattacagctctagtgttagcactaccatcgaataaagaaagtttatggtttactatgatgcatcgagatagggtttggggtatgttttgatgcaagtttattgggtaatcgcttatgcctcccatcagttaaaggaatatgaacagcaataccaaactcatgacttagagcttgctgcagtggtttttgccttgaagatctggcgacattttctctacgaagaaaaatgtgagatttacaccgataacaagagccttaagtatttcattatccagaacgatttgaatatgagactgagggggttgttgcagctggttatggattatgattgtgagatccattatcatcctagaaaggccaatgtggtggcagatgccctaagtaggaagggactcgggcaagtatttaacatgatcatgatttcagccctactagcaagtgacatggtcagattaggtaatgagtttgttgtgggcaaacataataatttgacactacaattagatatgtttgacagaattaaagctgctcagctagctcatcccgaattggtaaagatcttagaagatgtttttactggtcaagctaaggacttcgcagtgtcaggtaacgagatgatgttgtataaaactagagtttgtgttccgaacagtgtagaacttaaaaatgagatttttgaggaggctcataccactccttattcattgcatccttacactaccaaaatgtattaggacttaaaacccttttactggtggtgcaggatgaagaaggatgtggtagaatttgtatcctagtgtttgacttgtcaatagattaaggctgaacaccagagacctgtagggttattatagccttcgactcttcctaagtggaaatgggaggacattacagtggatttcgtggttgggttacctagaaccacaagattattttattcagtatggggttttgtggatcgatttactaagtccgcacattttctaattctaccaatgaaagcaacctttatagtcgatcattatgcaaatttgtatgttaaacaaataatgaggttacgtggggctccgaagtccatcatatcgaatagagatgcgaagtttaccttaaaattttgacaaagtatctagcgagccatgggtacctagctgaagttcagtatggctttccatccttagactgacggatagtccgagagaacaatccaaatattaaaagatatgctgcgatcgtgtgtgatggattttgaaggctcttagagtgagtacttaccactaatagaattttcatacaacataaactatcaaaatactatagagatggctccctatgagatgttttatggcaggaagtgcagatctccaattcactgggat

SEQ ID NO: 15359 - DNA, 8112 bp, Cannabis sativa
taatttaatataatagcttttaagaagtatcgctagccaatcgcaacgtgacatgtcgagaaggtgctaggcaccactggtattatattatttatttaattaaaatatacgagactcgataataaattacatcaatttatgaaaaaatatattattagttgaatgagactccttattaattgtgtttgtttttatttttcttaggagacattcttctatagatgaacaacttccatttttatgtatagtctatatggcattatttttttttttttgaacaatgaactaaattttattaaaaaaaatcagccttcagtacatcgataagataaggaaagaaagaaaatccttcatccaaaccagctcaccatctactctaagtgcgtgcacagctaattcatgagcttaataaaatagagagggagactaattccaagcgaccaatccaacgccatatatatatataataagataaatatgcaaaaacaaaagtcttccaagtgtagtagtagagtgttatttgacgttagtaaagatacatttgatttggagaggaaattacaaagtagaaagcgacactacgactaagacagtcactttatgtcgtttcgtttggacccaacaacaacaacaaaaactactcggtagagcttctttttgtgtttgtttctatgtggagatattttaatgcaatgcattcattacaactcccccccatgtggcctcactcatctatttgttttattagtatttataattgttggtgatttctactaataaacaagtgccacattataacacttatcctaatctcacaacaaaaaacatgtgttgatcactttagcctcacaaataaaagaaaaattagacataaaacaaataaagagtgtattaaaactacttttttcaagagttgtattataaaaagttgtttggttgtattttcagttttcagtttttataattatgttttcaaaagtgataataaaaacagttttgttattttaaaaatttaatggtgtgacacaaattttctaaaattatttttaaatttgttcttactaaaaaaatttaatattttacaccatagcatgacatgaactcatcctactctgaacctaacccgaacctggaccctagtctggacccagacctggactcggacccgaccccgaccccggattcgaactcgggctcggaccccaaatcccaaacctggagtcagacctcgaatccggacacgacaaaggaccttgagcctagcctcgggttttggatccgggttcgggtcgtggttcgaactggggtctagcatccgggtcggggtttgaggtctggggtctgcgtcaaagttcgggtcgaggtcgggatccgggtctgaggttcggagcttggggttcaggtccggtattcgggtctagggtcgggtgtagggtctagggtctgggtctgtgtttgggttcggttaggttccaagtctagaatccaagtatgtgaaaaaaatacaaaatataatatattagataaagaaaaaatgttttgaaaattgaaaataagaatttgatattttttgttttttaattttttaaaactaattttttaaaaaattcaaaagacgaagaggataatgctttgctagggtttattttacttgtgccgtgtgtgtgtttaaatgctaaagataatatatataaatatatatatatatatagagcattgttattaggtaccagtggtgcctagcattttcttaaaatgtcgttgcgattggctagcgatactctctaaaaactattatattaaattatatgggatccgatatttagttggaccaatagcgttattaacacgtaggaaggtgctagccttcagcatttctcatacatatatatatctaaggtgtttagggtttcttcgaatagtatatacgacaagaggttaatgacaatgggctgtcattttggggttttgaaccattgatagtcaacatagggtttgactgggtaaaaggactaaattgaccttgcttttgaatggttttcctttggtgtggtgtaaggcattaattcctacacaatcctaagtttttccacacttatacataccaattatgttgtgttgcaatactcatatttttggcgtgatgatgtggcaataatgacagtgatcatattaaaagaaaagggtagaatgatattaatggaaactcttaattctttattttgatgttaatattggtcaaatgagaatatgccagtactccccacatgttaatgtgtagcaaaaatggtcatttgattaattaattacataaattaagtccaactacaatttggttaattattatatatgacatgatttcaatttcttactcaatcaaatgactgtgaccatctttgttccagcttgttgttcttgctcggcaaattgtgttcccaaacccaagtgattcattatgagccatgtgaaagtcaagagctctcctcctttgctaagttgttgtgcatgaatgaatggtctgcaattaatagcagcatatgacaacatttccacccaaacttggctcataatcttccactgtgattcctcattctgtaattggtgtgcaagaatacacgcatcaaacaacacagacttgcttctctcaccctttacagctctcgatctaactttcggtttcactgacagaaccttcttacaagctttcccatgacttgaaagcttgtgcttttcgaaaaatttattggcctctgcacaagtatctctaaacactatgttccagttccccaaaactggtgccaacatcactggcttgttcaccagaagatagaacatgtaattcgaaatcaccttgcaaatattcctattatcacttccacttgattggtcatcatctttgtggccttgacaaacacatgttctacaacaacgttgagcaaagagttgccaaatgtttcctcctcctattttttggtcttcttcaacacttgaattggcctgatcattatagcatagctctgtagctaagtgccaaagaagaaggctctcagcatattggaactcacctatgctccatttcagttttatatagcttgaagaattctgtaacagagcagcctctcctctttctgaacatgtctctattgcatctctcaaattaattgccttcttggatttattcttcagctcttggaaaacaaaatgcttgagatgattatccactgttttccagtaagaaagtttacataacatcatttccattgtctttaaaatcccatgcttatcgacataactagccaagtcttggggtgccatcttaggtgctagacaatgactaattatgtccttttgagaaactgaccctgaccatctttttcttcttaatatagcttctggaacatgcctaatgatttgattatctttcattgccatgaaaacccaatctgaaaagattagtttaacaacagaaatggtatcaaggaggacagctccaatgaaaagggcataagtgacatcaatttcaaacttaccaaaaccatgtttttgagtgaaaagaaaaagcaaaaaggccaaaagtgtggagcaaatagtaatgaagcgaagaaagtaaccaagttttccatgtatgacaactgccttggtgtggagaacttggtacatgaagctgagctcgtactcaaccaatctaaacgcgcgagtagctgtttcgtggagaaaataacttcgacttgactctctatctttggagctgagaaggaagccaacaatgagtcccttaaaagttccaaagaaggaatatgatacttcaagtagtttcatctcatctaaattcttctgaggtggtccttcaatagcagagatggggtcagtactaccaaagttgctaacaccaccaggcacggtcgataccatcatctctgctatggaactttgaacctgaacagaccttgttgtagagtagactagctcagcttcttggtaatcaggaccaggatttggatctggcaatgtagtggctccaaatcggtccaagcttgctagacgcaaagccaaagttctttctacaaacttgatgttccctccaataaaaactaagatatttatagaccatagtttgttgttagatagtgtcaagtagaggctataagcagctgacataacttgcaagaagagtccaaagaggtgtctgatccatagctcattgtcttccaaagacagagaagtaatgccatcagggccgccaagatgcatcaaaagaaaagatgcccacaaggcgaaaaggtcatcgttgccttcggggtcagttttgttgccaaggcttttggtgattagtcctatggccacagcagcaatccagtcagctaacaagtaagatgcccaaacagaccttgagagaaggttgcttcttgatctttggcgtgaaggtgctaataatagcaagaaggcttggagtaagaggcttgtggtgatgcacactctcaggtcccatatttcccatatctttctcaccttacttggaataactggtaccatcaaataatctggtgtagagtgatgatgatgaagataagttggctagtaacaaattcaatcagtcttctggtataattggcataggggacaagtctttctcttttcttttctggtgggctcccttaattttttggacttaggctaagttttttggttcccacaaataaaggtaagaaaatattttgttggctaattccaaaagcttttttaagtaagattattaaagaacaaactaatcagaaccagtactgtagaaccaatcagaatcagaaagctcattgagtggacttagttaccaaggggaaaaagcatcataaaataatcatatgctgaaaaaaccccaaggcactatccatacattcattcatcaaaccatgaaatcataatacaataatgtctcagaaataaaaaacacaaaacaaacaaagccaacacagcaaaatcatttttgagctataggcatgttttatcatccaagaaccattacaaaaatgattgttttccaatatccatggttaccaagcaagtgacttcaagtttgcttatcataaaaacaattatttagctcaaagatttcttcatgcatgcttcaagagaatctgtaataatgataaataagttttcttcttcttcttcttcttcttgcaagttattaaaatattaaagtgtgttttttcttcaggcaataataagagatctccaatattattttctctctccatccattaaaagttaacactgaatatattcagacaagttgttaatgaaaatatcataagcaagagaacaacatttttaactaataggaatgaaaattgaaaaactgataaacaatacctgaaacagcaggggagtggatctttaagcatggttgcaatgtgagaaactcgagtatagtcctcaatctccacctttttcgaactggtaatgaggctgagtttgtcacgcaatattgtcaacttgaggcatagcttgatcgaaattgtcttaagcgaattagagtcattgatccaacttggaatttcctctaagctatcacaccgaagttgttgcaggctcctcacttgtctaagtccttggagctgatcatttatgtcagcaatatgaaccaacttcacagattcatggatatgtccaatggtgatccaaacatcaagtcccaagtttgagatggggtccagggtcggggtcctgggttctagataagcatttcccttctcaaataaggcaacatctacgttgagaaggaaaatgcttatctaggaccccgtctcaaactcaagacttggacttgagaccctggacccagactgactacaacacctgttctcactgttcctattaatgttatttttctagtctcaccttaatgacccttatcagatttgctgagaaatcaaacgtttgataactatatcttgataagcatataatcaccctcatctgatttactaagaactcaaacgtttgagtaatttataatgataagcatataaccctccactgatttacttagaaggcaaacttttgagtacttgatcatgataagcatatcatgagcccaagccaaactcatctttctcagtttcttgaaagaaaaatctttgaagtaaatactcaaaactatcataaccttttatgtcaagatcctccaaatgatgtttcagcctcacataaccctgtgacgcccacagtaagcaaaacacagctgcaaaggcttttccaaagttaaataactcaattcaagagttttcaaaacatcagaaccattttctgaaagtttctcatcatagaatctttgccaatctttttcaggatttttgaaaaacaacatgcttccaacttttttactactagtaagcaacaattttccccttaaaggtgttatcttcaaaagtaaaggatttaaaagaacattgctatggggtactaagtgtcttaatatgaaaatttatttaacaataatcatccataagcaattaatgaaatgttaatatgaaaatttgacagtcactaacaacattctagagactatatggattaattttccaatatcccgaaccaaattcaaacaatcagattccacttctactgccatttaatcattgtcttttatccaactaatctaagagtttgctattaattttaattttaaatttagtttgattgcttttaaattaatattatcttagtccaaactcaacaatttaattacacttgaatcagtctaactacagttaaccaatctaattcaattaccaaacaccatattttaatgtctttattaattattgttgacttatccttttcataaattacatatataatatagggaaactctgtttgtttcgtcgtatttgcatgattcatgtgtatttattctcaaaataatatgttctttttggtctattttagtaattattcgttcagtttgcatggattattgtgcttaactaaaaaaaccaaagttttactaaagagaaaaaaagtaccaatcactctgatggcggaaggaaaccttgtgggcgttgttgatcggattcaacgattgttggagtgtttagatttgaaggatattacagaaaaacagagacttgatgagattaagaaagatttttcaatgctacgaggttcatttgatgatgcagagttgaagaagaagctttatagtgataagttactattaaaagattcacttgctgatgttgatgacttactcacaaaaatgttggcactcacttggagaacacgccacgtgtcagcacccaaaaagctaatcatgatgatgaagatgatgatgaataccaccactgctttcttcaactcaatctcttccaaaatggacaacgccatgcaaatcgtgaaacagctacaaaattcatcggttccagaggcagaggcagaggcagaggaagagcagagaggaaatgttggtggagaaattatagttgtgggaagggatcatcacctagcacaaatcacagaaaagttgttgaagaaggatgatgatgatggtgaagacaagaatgtaatggtgattccaattgtgggtattggaggagtaggcaaaacaataattgctatgctcatttgtgatgaccaaagggtaaaatcacattttgatcttacaatttgggtgtctcttggtgttgcctttgatgtaaaagccattatgaaacaaattatttcatttataacacataattacccaactatctctgattttaaggaactgcaagctcttgttttttcagaaataaggcgaaagcgatttctccttgttcttgatgatgtcccgcccaatgttgatgaacattcatggaaggtactgttacatatttcactcaaattaattttaaataatttatatgtgtcaaatatttttgttagccaaattttgaaaaatcttctaattattatgaaaaagctttggaatgtcttggtgcccaagtttttttattctacgtgggacataaaaataccatgagaattatggggttctatctcaaaactaataggtgatgagtggagtaacccatgttcttatatatatagctcaatattttacaatttattcca

SEQ ID NO: 15360 - DNA, 10028 bp, Cannabis sativa
  modified_base (6267)..(6268): a, c, t, g, unknown or other
agtacataaacaatcactgaaacattaaaattgaatgaaattagataaaagtctttaaatctaacaatctcaatagttagggaggaattttcaacggccaaaaaagtttaaaaagcacgatttggtacatgtctaaattcaagggaaaaattactaattagtcttaaaagtataattgtctacaatgtgttagcaagctttatcattctttaatcaacatggctcacatactataaataataagtatgtgggttcattggctgcctaccaatatctgtatatgatacaaatttagcttaactattgaatgaataataaaaaaagtgcacaaagataaataataataataagtacatatttgaaagtaagaattatatattacaaaagcaaccattacaaccaaaaaaaatattctacaaccgacctcattacaatttatgaatactaagaaactgatgttcatcttcaaaactaatcctctgaaacaatgtataaaaaaaaatctattatatacattagtaccatgagtaactgttcaaactctttgatgccacaaggccatatttcaaatttgccaagtgtagtaatctattatatacaacacattaattatatggttcactatattgaagtactcgtttattttgcttaaaatcatatttagaaaagaaagtcgaatgaacaagatcacgaagaacaggaaacacaaggtacccaaataaagttattggaaaaagttgaagggcaattgttatgtaaggtagtgaatttggtctacttgatgtaaaggatgtgacacaaaaagataccatcatgaatgtcactgagataaaaagtgaaataattccaccgataaatgaacatggtaatggtttaaacagttctgtttctgtaaatctcgatatgaggatggtcaagaataatattatagatgttattgaagatgacatggcaatggaatttgataacaaaagaatgagaggtacttgattattgttaccatatatgttaaaagcttcttgtgctattactgtaacaataattgttgccacaattagacttatttcagcattttccttcatccatttttctgcctcttttgccaaattcgtgtgacttttggtgaataaatcctttggtgtttgtttttctttatttcttttgctctttagccaaggttgcacaatattctccacttcctatacattaatataaaatatattgtcatcatttaacataaatattgaccatcaattaataatatatatgtatatgtagaagtaatatttatgactgagattaattcattagttgcttcatggaaaagttaatttaataagaaaatttatcataaaattataaacaaaatattaaagtacgtaggccacatactttaaaaaataaaaaaaaaatatgtactccacattcatgcatgaaaattgaaaagtcttatctatttaaaatatgtactaagtcattttgcccaatttgatacttttttagtgacgtttttgtagctctgtccctttctggtaaccttatggtaataccgtataccgtttcgacaaatggttaatatgggtgtaatttactaatcgatgtggtcgttttgatatatactactcttatttttggcaatgttttcggtacaccgatttctatcgccactgatagttaatgtacaccatttaggtgaggtttcagagctccatacttttagtatagtcatgttatatctcgttggatttaattttgaatgtagaatgcaatgatgataattatttagccatttgatggcataagtgaaaagtgatatttaagattggagtaaacaattggagctcaggacttgagagcttaggattgtctctttggacaaagtttaatgacttgagaaaggtagggactcaacttgattattggacttaatttttgcatgtattgaatattattagacatattctgatttttatgatttataaaataattaaaaaattaaaaaacttaatttacatatttttctggactgttttcggacagtgagtgccaaatatatttttatacaaatatttaagcaggttatgattttttacgtttattcaaaatacaacagttatgcttttctaaaataaaagggaatatattatttttttttaattcttatttgtatgtttttggttatactaatgaaagtcatgttgatcatgatttgtgcagattgttatttcatgacctagtctctatgtcatcgtaggtagatcaagtgtgcactcctctgtaggtgaaacacctagaataagtacaagaagtgaattaaatttgagccccggtattatggtagttatcaggtgcaactacccagttttggatgtcgttttctatgattggtattgagagctaggggtctagggatggtttgatgtgcattttgaagcttgatttcgtgattatttttggtctctctattttgtttatccattttgataattgtgatgaaatgttttatttttaaaagctaactatgtaagaatttttattaaaccaagggtcttttgatattagttgtttttctattgggctttgtaagctcaccccctattttttttcccattttaaaaatacagtttaatgctaatggatgagaatggtatgattagagaagaaagtcattataagtttagtattattctatttatcaaactttccattgaaaattgattttgaatttaagcttgaatggatggcctaaatgacttaaattagctatgtactagttagaaatgacgaatgatggatgctagatattaatttaatattttattgacttattaaatatatctatttggtgagtacaaaattatgggaatattattcttctttaatattgctgagtggtcctgatttggttattaatattttctttataattatgggagctattccattatttttgaataagtattttgtaatataaattaagagaatatttataagctttatcttcctatacaagggtcaaagtgtgatctttgaccacctaaattatggatattacaaatctaccatggcctagggctcgggtcgtgacaaaaatatggtttcagagcaccgggtttaattacctcaaagtgtgtccccaaacattagatttattttaaacaataatagaaataagtatctagatatttatatgtataggcatatttatattagtatcatccagttcgcactaactgattagcttttggttctcaaacctaagaaaattcctccaaaaggaaggaagataaagagaattgttaaagaagacgccactcaagctaatgtccaacctccacaagctaaattccctatgaacgctcttctcaaaaccttgccactcaagatggaccttattactcgatagagtcatcatttttagatctttcattggatccaagtgtctgagtttggggtggacaagattccatgatagctgaaaggtagttgaggcagacaaggaaaaacttcaacacattaggaacactttaagaataccaagttacttttgtcgtgtccaagttagagggtggtgcagcagattggtggcagaccttgtccaggacaatggaactgatggaatgacttggctaaattttgagagagttttcaaggagcagtattttagtccatctcacaaaagggcgttgattggagcatttgattatttaatacaaggggatatgactatgaatgagttttgcatgaagtttgtatagctatcattttatgtatatcctggtgttgttgaccagcccttggtgattgaacagttcatgcatcgtttgaggcctgcgatacgtggtccaatagcccttttgacctataacaacttaattgagtgtgtgaaataatctttgcaaatttaggctcatctagaaggaaataagaggaagaatacaagcagaggaaaatgaaatgatcgaaagatgactaataagaatcaagggcagtggtcccaaggacaaaaatttagtgggggtaaatgatcgaaagatgactaagaagaatcaagggtagtggtcccaaggacaacgattcaatatgggtatcactagtagtggttcttctagaaagactcatagtggaccaaacaggtgttttagttgtggtaagcaaggtcataagaaggaagattgcccacgaagacaacaaagatttcacgaacctcacaacggacccatagggagctatgtagagtttactcctttccatggatagcccaggactaaccaatctcagtcttcctcttatggtttcataccctagtcaagccagcagtctcagtatcaagatttgtttaggccacaaggttcaggattcaacatggggtactcataaggcttccaaacttgtgctcctagtgaaagtcaatgaaggtataatcaaggtggagggtctagtgcaagtataagccaacctagtcatggaaatagaaaagtaaaagaaaattcatttgctcaaggctatgctcttgggatagatgatatacaggttggttcagactagatatttgttaatggtatggttcttatcacacactcttgggctcagatattttttttttatattggtgcatcccattcttttatatctttgatttttgcttgtatgttgggtttgagttgggaaacttttagtcctgtgttgcatttgagtgtacctatgggaggacacgatgatgtatccaccatatgtaggtcagtttgtattgtgttcgagggacacaggttgtttggaaacttattagtgttgcctatggggaaatttaatgtgattcttggtatggattggttgtctacttaccaaactgttttggattattcacgcaaaagagtgactcttttgacccctagtggtgatttcattgtttatcgagccaacatgagttcagtgagataaaattccttctgaagggcatgcttaggtggcaagagaaacttagagtactatgggaatttgtttgtgatcgatggtgggtctaggaatttagactagttttcctggatatctgtggttagtggttttttggatctatttccagagattttaccagggttatcaccaaataaggagatcaagttttgcattgatttaattccttgagtgcagccaatttctattgtgccttaccgcatggcacctgcagagttggctgaattgaaaaaaagacaattaggggagttaatggataagggttacattagacatagtacttccccatggggagctctggtcttgtttgcaaagaaagctaatgaaactttgtgactttgtgtcgattatagaaagttgaatcaaatgacaactaaaaacaagtatactctgctgagtattgatgaattatttgatcaatttggtggttcaaagttcttttcaaagattgacttgaggtcaggctatcatcaattgaggattagggaagaaagtatccctaagacttcttttaggacacattatggacactttgagttttggtgacgcaatttggattaacgaatgcacctactgtatttatatggatcttatgaacagagtctttagacctttcttggataagtttgcggtggtattcattgatgatatcttggtatattctaagacatgtgagtatcatgcctaacatttggcaatagtattacagaccttgagggatcatccattatatgctaagaaagagaagtgtgacttctagatgactgaattcgaattcttgggccatgtaatttctcaagatggtatcattattaatcctgcaaagatagactccatcctacagtgggagagaccaaagaatgttactgaagtttgaatttttcttgggttatcaggctactatcgtcttgaggagaatttctctcgaattgctatgcctttgacaaagttaacaagaaaggaagtaaagtttgtgtgggatgatagttgcgaagaagcattttcagagaattggaagaaagattgactacgacgcctgctctcactattcctaatagtgaggaataatatgtggtattcactgatgcttcagaaactggcttaggaggttttctcatgcaaaatagaaaggtggttgcctatgcttctcaacaattgaaaccacatgagaccctacgcatgacttaaaacttgctgcggtaatctttgtcttaaaaatttggagatgctatttgtatggcacaaagtttgagttatacttagatcataagagcttgaagtatctttttactnngagggacttgaacttgaggcaaaggagatgggttgagtatatggaggactatgatttcacttttcaataccatccttgaaaagctaatgtagtagctaacacactaagtagaaaacctcatggtactttttcatgttaagcttatgaaaattcataaaggacaatcacaatgggtgattatagctttcagtactatgaaggggaagaggtagcttgtatctctaacatagtggctacagtgttacttcaacaagttaagtaacgttagtggcaagatgaaaagctaagacttatttggaactgaatccgtgatggtaagaaattagatgggtggacaattaatgtcggagggtacttataccataagggaagactagttgttgtcgatatctctaatcttagggagtccattttattgaggcccatagatccaagttttttgttaatcttggaagtacaaagatgtatcaagatttgaagagacaatattggtgggaaggtatgaagagagatgtggctagcttagtagttaagtgtattgtttacaagaaagttaaggttgagcataaaagaccttcaggtttacttcaacctttgcctataccagaatggaagtgggataatattacaatggactttgttactggattgccattgacacctttaaagcatgacgttgcttgggtaattgttgatcatttgactaagtctgctattttattttaattagaaaggattaccagcttaccaagctagctcaactttaagtggaaaatatagtttgactaaaaggagtgccttcaagtattgtttctgatagggatcctcaatttacatcaaggttttggaaggccttgcaacaagccttaggaattgagcttcacttgagtattgccaggcatccacaaacagatagacaaccttagaggaccatacagactttggaagacatgctttgctcttgtgttttgaattttagaggtagctggggggaacacatgtcactggtaaaattcacatataacaatagctaccaagccagtataggcatgactccttatgacgccttatatgggagaccatgcatatcgctattgtgttgggcagaactagaagagcatgtcagtatcggaccccagattattactagtaccaccgaaaagatcaagggaatccaagaaaggcttaagtttgttctaagtcgttagaaaagctatgtcttcttaaaagttactcctatgcatggtgtaacgaggttcggagtgaagggtaagctacccccgaggtatattggaccttttgaggttattgagagggttggggagggcacttaccgactagacttactagcctgattggggcacgttcataatgtgttccatgtgtctatgctgaggaagtatactcaagacccatcacatgtcattgagtaagaagccatccctcttcaggtcgatgtgacttataaggaacaacctgtagaaatcttagcaagaagctaaaagtgttaagaaaaagagagttctaatagtcaaggtcttatgacaaaaccacaaagaagacgaggctacttgggagttagagtccgagatgtatatgaagcatcctcacttgtttaatttttaatctgaggttgtactttaaaattccaggacgaaacttcttttaggagaaaataatgtaaagacccagccaaaccgagtaggaaaataatataataaataataagataaaggatgtgagacccacaatttattttattatttattcaatttattttttctcccacacccaccagaaaaactccctcgctctctttcccatttctctttctctttctctctcatcaaacactcaagaaaccacaaccaccaccgtcgttggagaccctacttcgaccaccacctgacccatgcactgcaccactcgaaccgccgaccgtcagcgatctcaaccccccaagaagcgcctcttcatgcaccaccattagcgaaagatcacgagtcaaagtttgaaggttcatattttcaaatttttcgatcacctccaatgtctgtttgacgatctatcttgaccactagaattagctcattgaggagaacaatctgcactaagtcatttcgcccaactcgatacttttttttggtgacgtctttgtagctttgcccctttttgacaaatttccagtgatagtgtgtgccattttgacaaatagttaacatgagtgtgatctactcgtcgaggtggttgttttgatatatactagtcctatttttagtgataagtgaggtttcagagctctaaacttttagtatagtcatgttatatgtcgttggactcaattttgaatgtagaatacaatgataataattatttagccatttgatagcataggtgaaagtgatatttaagattagactaaacaattagagctcgggacttgagagctttagattaacctttttagacaaagtttaacgacttgagagaggtagggactcaaattgattattgaagttgattttatatgtgttgaataacatttaacacattccaatttttatgatttaaaaaatgtttgaaaaatgaaaaacttaatctgtatatttttctagactgttctgagacactgagtgtcaaatatatttttgtacaaatatttatgtaggttaggatttttgagtgtgttgaaaatacagtagattttctaaaataaaagggaatatgttcttttattaatcttatttgtctgcttttagttatactgatgagagccataatgttgatcatgatttgtgtacactgttgttttacgacctagtctgtgtgtcatcagaggtagatcagatgtgcactcacctatatgtgaaagacctaaaatttgtacaagaagtgatcaaattttagccacggtattatagtagttatcaagtgcgcgactacccaattttggatgtcattttcgatgattgatgttgagagttaggggtctagtggatggtgtgatatgaatttgaagcttaattttgtaaatatatgtggtctctctattttgtttatacatttttataatggtgatgagatgtttttttttttttttaaaaaaaagctaaccatgcagggatttttattaaaccaagggttctttgatattagttgtttttttttactaggctttataattccaagaactcatttagatgctagtggaggaggatggtaccgtaccgttgatgaagaaagttattagtttagtcttattctatttatcaaactttctaaactgattttgtattatttaagcttgaatggatggtctggatgacttaaattagctatgtactaattagaaatgaagaatgataaatgctactattttggttttttattgacttattaaatttttctattcggtgactacataactgtgaggatattattgttcttttatattgttgagttgtactgatttggttgttaataccttctttgtagatataagagttattctattatttttgaataagtattttgtaatataaattataggatcatttataattaagcgttatcttcataaaatggtcaaagtgtgatctatgaccacccaagttatgaatattaaatatctaccacggtctaggactcggatcgtgacaaaaattgtgactagatatcaattataggctaattaggatttttgcaccctgaacttttaaggtcgttaaaaatgcctcgtgaactattgagattgttggat

SEQ ID NO: 15361 - DNA, 9051 bp, Cannabis sativa
atgttaaaccaagaaaagataaatagtcagtgtatgtttattatttaaaattattgattatttgtaattatcaatttattatcaaatagtccatattcataattaatcaagaaaactttcttattatatacttagtataagaaaatgaaaataagttttcactaaatatactgtctaaactaatgaatttattatgcacatattttgtagtaaagttatttaatgtatataatattataattaatcctttaactacatattaggttaaaccagtgagctttaatacatgtaattaaaagatattgatacaactaacatgatttaagatttccagcttccaaattaacaatgacattgaaatgaaaataaaggaaaagtccattttaaaccaataaatgaacaaatacttacccgccaaaccgcatccctttttgcggtgccaacaatgtatggatgatgtgcacagagcataacttgcatggatgcacttggatcaacagcgagagctgctgatgatataactattaaagccttaactgaaacttcaacagatggaagaaagggcacttgagcgtccaatgaactatctgtgtcactacagcaatacgaatttagatcacccaaagaatggcaattaatagaaaaacgaatcaacatgcatcaggctgcaaacaattggacctaagcttatacaataactgaataaagatgagcagaggggcacagatgttttcttctgacatacagaacacattgtactatacacaaatgttaaaagcatacgagattaatatatataaaaaccctcctaacaaattttgttccgcaaaatacctaaacgaatcattaccgtgaaaaccatcttatgatctattgtcaaatgatgtgatgaataagatttagcaagaagagacaaccagcaggtacagagaagctaaaatagtaaaagttgtaaatatgaaaatgcaacttttgtattttccttaagaaagaagataatataattaagccaccatctctaccacttgaatatatatatatgtatataaagtatattttatatacatagacatttactggttttgtattttccttgagaaaagaacataatataattaagctaccctctataccacttgaataaatatatataagtatatatagacacatacatatcaaacacccctcatccaaaagagaaaaattattaaaaagcaaaactacgaagaggaggatcttaaaaccaatatgtaccttgttttagtaatcaagagtttttccgcggcaagagacaaaaaattcataaattcaaataaaagagattcagttaactgtggagcagcagcaactatctttttgacagcatcataagcccttcttcgaacttcccaacttgggtggcataccaaaaagattacaaactgcaccacacaaaaaatctcttagcgccagattgaacttcataaccaaaacaaaaagataaagtcttgcaaccaacagattcagttcacctgtaaaattgatctcatagaaaagttatctacaatcctgtatagtaaagaaacaaaagattgaatagtcaatattaactattaaataataaaataggcatattcctaacaagataaaggaacagcacctgtgaaaatgttctaccaccagaacctcaagaagatcaatacatgtcatacaatcttcggttgttaactttgaggcctgcagcagtactcagcttataatacatcaaaggagagaaaaataggaacataggaaacacaatttcaaagaacaaagaatctttaagtagctaccatagttattggtacaagagaaggctcgctttgagaaaccaaagaccatattttttccttcacaacagtttcatctgagcatagatttatttagaagggcagagttaataaaattaatacacaaaagagggaataggtggagcaaacaacaattgtacatgctcaccgatgtagaaattaaaacaaaagaagaagatgatgagaacctgctttgatgtcaacagctgcaattttcccaactaaaagtaaagcgtatatgccatctaaacgttgaactgcctttgtgaaacccgttttcacaagttggataagagggaccaacaatgaggagatctggaaattcataatcacgatataggtcaaatggaaaatcctataaaatacaagccaacagaagcacaaccaaataaaactatggctgccaacaaacccgcaaaacagcatcagcatgtttgcataatgctcgtagacagcgaaggtgcccccttcttaatgcttccttctccttaagaccagaagcaatgaatgaaacaacatcagcttgaacaacatcagcatagtgcgctacccaagatcccaacgcagacagagttgccaacttaacctcctcattaccttttaaaaacaccccatgtcaaattaaaacaatataaatgcaagacattgaaaaactatcgtcaaataaagataaactgaagggactcaaattttcacccaaaaggaatgtaacatgtaacagaaaaaaaagaggatagaacaagttaccgtcatccttgtagaaagacataaggaagctgcatacggtctgtgataggctattgaggtgttttccatcaggagcattagacaattctcgcagcacattgatcagtccaattctctggtaaggaaatgcaagtcttccttctgagcctgttgaaattgatatctagagttaaaagtagcttagaagaagaattagatacagtacagttacaaaaataatatattgcttcatattcttcaaaagccaaaccaactagatgttatctttcttctttttaatgaaacataatgatagggtaaagtcagacctccaagaacagattttacagcattgaacattgcttccaaagtatctggattacttgactttttgctcaaacaccctactattgccaatgcctcaatccttctggcctcatctgcatgtcgagcctgtggcaataccactgaaagaatctcaacagcatacttgctcaagtccaggtcgactgattttaaaagaatgccaatagactccaatacaatctcagggttccgcttcagcattttaagaaaagctggaaccacagtactctgaaaatcttcatgcaacatatgtgtaaaaaggggatgaaatgcctcactaagaccccttgcaggcttctctcttgcatttaggactgctttaacgtatatatcaagaaatgttggctgtgaagagaaaaacagaaattcaagtcttaactgacccaatataagcaagttcaatatgatcacttcagtattaccatctagcagcattagatgaaaaggcctagtggactgtttttcccattcactttgaacacacaaagcacatatagctcctcacaaaaaagggggaagggaaaataaagtaaccaacaatttcttaccttgaattgttcaactaaagaagatgatttacttgaagtaatcgagaactccattaataaccctataaactcaggactatctatgtatgggatccgcccgccctttaattcctctatatacattttgtagatgtcaggtgactgcaaaagatatatactttggtaagaatttagctgagaaggtttcccaaaatgtaaatataaaatgcatagagttgtcgtacttggctaattgcaactacattaaaggtctaaattcccgacctttaccaaaataaaaaataaggaataatacataatgcatataaagttaagcggaattaacctgagaaaataactgaaaaaacgtccgtttgcaagcccttctctcccgaaaagatcttcgcataaggagatggatcaacgaagcctgtgctgtggctactctacaacacgcattcttcgaaactgtggcaaactggctcttggtaaggagatataacgaccattgaagaagccttaagcaaccaacgtatgactgaacctttccctgcttctccattgattgaacgagagctcccgcaaagcttttcatgaaaatagtctcacccagagacttgataatgacatcatctacagctctccttgaaactcgatcatcataaatgtacaatgtcttaaatattacatctactaaactagatgccaactccgaattcatctctgcaacaacaaaagataaaattataatcaaattcaatcaataggacaaagcgcactcactcaaattcaaaaatatcaataactcggccatggaacggataagttacaaatacaaatagattgaagctggggagaagaattagcgtaacctgaattcttgacaatggcaggaatatcatatcggaagatccgaacccgaatcgaggtggactgagtagagaccaacccggcgatggagacgagagactccgatgggttggccatcggaaattggggatataatagaggtcagagaaagctccgatggttaatagtgatgataatggttactagggttttaggagcagaacaaaagactgtaacagggaatttgtggaaaaatgtacttatattttgtgcttattgccgaggaagcaccatgagggcggacgatgatgttgagtccttggaagtggaaagaacttttgggtcatttgggataggctgggctgggttggattcttgtagtactggtgggcttagccgttagggtttcaaacagataagatccaaaattctggcccggtattttttatgagatatctttcaaatataccatattttaccacaattttacattaacatatacaatcattttgtatttctttatgtttaccaagtttttcgataaccgatttaaaagaagattaagttgaagaaagtaaaatggacaagaagagattttttacatggttggaggtgttaataaatcttagtccacgagtcaatattattagctcttaagctatggagtatttttcatacaagtctttcttgctcaaaatttctaaccctttgcatgaagggaaagttccatatttatatgctccttggtgttatctgtgtttctggatagctaacacgtgtatctctaaggcctaaaattaaccgagatgggcccatttttaagtccaattaagctagtgggtcagctctcaatggatcctcatcatatctccggatttggaaattggtccaatttacagacaaaatagagtcgaaccttaacagtcccggaagggaaacttgcctaaaagatgaaaagtctgacaaagcctatacgaatacatgcggtaattcgaaatggggcaactgaagaaacatctgcaaatcatcctatgcggcatccttttgatacaaaatcccaccaaatcaaaggtttgtcccctatacctagggagtgcacgcaccactaaaagggacataacttttgtccatcgccatattctctcacatttactttcagacttggggagtgtgcgcaccaccaaaaaggacataacttttgtccattgccatattctctaacatttactttacacaataagcagtgcatcacacctgtcaccatcaagtggtctcctatctgtactgacgaccgttatctcatattctaggccttacaaaatcggtccaaagtcaatataatttgtattgtgacccatcagtgggcctagttgacaaattaaaccctagcaggtctagatttacctactaactcgactctagcctataaatagaacatgatcccttcatgcaaaggattagaaattcatttcacaaactaagggctaaaatattagggttctaagactttggcaataacattcttgtgtaagaatactcaatagcttttcaggattaataatattaactcgtagattaaggctcattacccaaccatgtaaaagtccgtgttgcattgtctttaatttattcttctttaagattaatttcttcattaatcagtttctaaaaatctcgataaacacttggctaatggtcgggctaactcggacccattagggtttgtaggttgaaaaaagttcactggtgggataaattacattaaaacatttgactttgggttaatttgaggaggtccacagttacacggagaaacggatgatggtgacagttgggcataagtcgtcgatctattgtgagaatgtcaaagtagtggtcattggctcaaaaaaggtgatcctctttttcatgtgcgccttaggggtgtttatataattcgtaatccgtggttttgaaccccaacaaatgcagaccaaactatttgagaccgaaccaaataaatctggtttgaatgatttattcaattaggaccgtttaaaattctctagttcgatcatgatttcataaatcttaataacggttgaaaccaaactaatctgtataattattacatctatacttaatatatatatatatatatattggatgaaatattgatatttacgaataactttaggtagaatattgaaattgacttaatattattatgataataactttttattgttatttatgtattataaagttaaaaaaaaatacagaaaaaatgaacaagtactgtaacaaaaatttagagtaactatgaaatacaaaccatgaatttgagctaaaccaatctttttttgagaggattggcttggtttgttttgatcatttaattggtctagtttggttttgaattttaaaaactataatactggtttggtttgaaaaaaaaattgaaaattcgaaccaaaacaatccgtgaacaccccctaatgcacatttccaaggtctgacatagggaaaggccgcctaatttgttagtattcttatgaaaagcataccacaaaggatggttcccaaacactcattcgctccaagatacctcttcgactatgcttcccagatgacccctaagggcatccatcttcatttctttagatacttgttgaaaaaacaagtgttttccttctaggactacacgttcaacttagttattgtgaagtagtggtgtaatctggattcctcgtccaaccttactcatggatcgggtggtcacttacctaggcccagtgaatgggcatgttaggctaagtaggtcgatctaaatttacacgtgttacctatccaaaaatacaaatagcatttaccccccaagcctttgcgactcaagagtcatagaggcttgcaactatcatccaaattcattgtagtacctagggccatgaatgatttaagtcttttgatattctaaagtggaaggtcatggaagcttatgaaccttcatatttcattagtggattctttggttcgtgtatgtcatgcggcttgcgaaagtacatgttgcctcggtttacggactaacgactagttatgctagtgagttgtccgaggtgaatattatcagtaatacatgtgtccttaattctataaatcacattaatgataacctttggcattcgtaaagcgttagatccagcggatttgcactttcacagattcaatctaggcccatggatcagaggcacgcgtattgccagcttccttataaataagagagaaattgattgcttggcactttaaccatttttccatttttcttcgaatttttagagagaaaattatccaaaacccataagtttggtgaatgttcgatccttacactgatcttcatggtcgtcttctacaattccaatcaaaaatctgtctgaacgccacttcgtttaccctagccacagcatcgactccgtcagacttctagaaggacgttgacgagcttatcacgaggctaagtgatttttgggtgaagaatcttgcttcttcccagaatccaacactcccagctctgagtataccacctaagtaccttcttttgtgattttggcactgctattttctttgtaaataggctctaggcagtgtattgtagggtgatgccataatttttggatttttatggttattttcttaaaatatgtactatgactccactatgtagggtggttttagtctttctgtctgcctgaggacttaggaatttatagggaaaaactaaacgcagagaccttgccctaggaaagttcttgtagattttttttactgttgatctcttggacactaatagtgtccctaaggaccctgttacgtcccgcttactaggttcaggacccttatagttccagaccataatacggttacattccattccctttcttatgttcccgttcatttgtccaggaattatgttccctagagaactaactctaggacctagggtccggctggaacctctcaaagcagttgtcggggagaattctctcgtacccttactgtttgatttgttttggtactaactacttggcttctccttttttagttctcactatgacttaagagaaacagcttttcgagctccttcaaaacattgaagaggcagaataaaatcaattggaggatgactattcgacacagggaaaggtcaaagagtctcgttgggagatggaccacattgctaaaaagttttgcaattattgaatgttggaagacgtggagaaagaatgcagactttaaagtatccttgtctattctggaacaagctctccctaaaggagaagaagggcagctcaagtgtgaacgactttggagcttagagttggggccacatcaaagcaagagctcatatcgcattaagagactactttgcccaattcttggtagaagtcaggattgttccattccagttgattctgcagagctataagctcgtggctagggatgcacatggggatggggcagtgcaaaaattgcattccccgcccccgtccctgccccctattttttttcccgtccccgcatactccccgacgaggaatgggacagggattccccattggtaattgacaccttaatggggacccatttatcaaaaaaattgctagaactaataattttaatatattcaaaattaatataataattttaatatatttaaaactaatatttgtaaacactaaattaaaacaacatataattaaattcattccataattaat

SEQ ID NO: 15362 - DNA, 7099 bp, Cannabis sativa
gtaaaataaattccaacagaaatgggggttcagtagattttgccaacgaaaattgaagttatgtggttaagtattacaaaacgtaaagtttaggtagtttagtcaccaatatccctattagaaataaaattttaacaattacttatcacatgttcataggactagccctgagaatatatggccacaaggcaaattagatttttgtgcctctcctctcaaaaatatatattaaaaatatattgaaaatgattgtcatgagattcgaacccataacattgtataatatagatgaaattacattgtatacacattttactttacatgttttaatttttatttttaattctatattctttaaaatatatccacttttatagataatgtcctcattataccttttagattaatataaattatgtgttggacgtaagtggaaggtgagtgtatattggacaatccactcacaaaagtttaatacattttaatgaaatataatttgaaggtatttttgattaatggataaaaaaaatatatttctcaatttatccctataatatatcatacatcccaaccagctaagctatgaatatttattatttgtaatacatttaattttatttaaatagaagcctaatgaaactttatattttttattttgggctcccaaaaaatgtggactctaggcacaggcctagcccgcctatgcctaaggtcggcattgtacgtataagaaaaaataataatgcatgcaataaaataactgaaccttattttcaacactttagactatttatttattttttaaaaaatttacaaatgactctaaataattacaacctacacaatcatacaaaagaaattatactaaaaaaaaactctattgaatatcaaactagattgagtaatttgcggtataaatatagaagtttaattctcaattataaataaatacttaagtttagtttttgacaataataatacttaagttataattttgtaacttttgtaggtacctatttctacatgacaattcttgattgtctcacgttattaaatttttatttttttttaaaaaaataatttaaatataccaataaaaaaataatacatgtattatgacttaacatttaatatttaagtacttacaaaattataaaaatattaccactaaaaattaaacttaaatattatttataaaaatcaaacttaatatttatcccataaattactcaacaaatgattaccagaacacttataattacatttagaaaaaagaattattgcattttcattactgtcggtcccaaatataaaattaaagaaaatatattagccagcacatataaaaaatacacgtgtcaaacctttattgcgtcataataataattagaattagtcaacaaaaaaatatgtatatatcttcggctatatatatgaacccgagtcccgccccatatagaatctccagccagattttctctcatacaagattccaaccaccactttctaggatttcgattcttaacccgaaagaaaaacaaaatcccattttccgtacaaccttactgtgtttttctttattattcccaataaagaaaatcaagaaagaaaagcttttccttggaaggactatatagtttgatttttctttttctattattgcatgcagctctataaatttgaacactttggataatcatctgacttgtaaaacacatttctttggagttttgtgttgaaactttctcattctgacaaatttggtgagttgtatctctgtttgtattcattttctcatatgggttctttgggttttgttgttttgttcactaaattaatacgaattttgtaccttttggcttaagatttcaagatttcaacttttttatgatatgcaggtgaatctaaattaaaaatcccattaagaattgagaagaaagtttttgtttttacaaagaaatgggtataaaggcaaatgggtttgtgaaaggttgtctatctgaggaattgaagaagctaattcgatctgtggctttttccaactatggtgatgttcttgatgatacagatttattgcagatcgttcctttgaaaggggctatgactaatgaggtttttcagataacttggccaacaacacatatagattgttctaggaaagtattggtcagagtttatggtgaaggagttgatgttttcttcaatagggaagatgaaatccgtacctttgaatacatttccaaacacggtcaaggacctcgtcttcttgggagattctcaggtggaaggatagaggagtttattcatgccagagtatgtcaaattcatattatttatgtatttacttgaaattattactactaatctagttctatgtattcttcactcttgattgttcttttttagtggtttaattgtttatgtgaccaaaatggatatttcatattatattcttgcttttaaatgaaagcaataatgaggttccataactacttttgaatttgattgagtggttatagttccaagcactcgaggctttagaatcttgaccccatatttttttagttttttatttttgaggtcatgtaggtttctttctttctacaatagggaagtgacaaaagtttcttgtttgaaatttttgagtcaaacaagttggagatactgttgtattttaatatatgaagattgttcttggatttatgttattttgttatgaaaacaaagaatatgaacttgtaattctagattatgctctactctgcagcctattgcccaatctttatttatttatttatatatatgtttcaccttagatttaagggtcaatcaggataattaagatctattgtaattatgtgtttctgcaagtaaattgtttgtcaatttcctttttcttgtgttaagtctttgtatttaaaattctttcagactctttcagctgctgaccttcgtgaccccgaaatatctgcacttatagcatctaaactgaaagagtttcacagtatagagatgccaaattcaaagaatgtgcatctttggaacacattgaggtaaaattcttgttctattctaattagagttaattcttcacagagaattaaagattcttaatgctttcgtttttggctaccaggaaatggcttcctacagcaaagagtttgtgtaccgaagaagacactaaagaattctgcttgaataatctggaggaggaaatcgatatgctcgagaaagaattgtataatgattctcaagaaattgggttttgtcacaatgatttgcagtatggcaacataatgatggatgaagaaacgagattaatcaccattatcgtaagtatatgattatatgctcttaaaggctgtaaaactactaaactgtgattgattcgcctcttcttgtttccaggattacgagtactcaagttacaatcccgtcgcttatgacattgcaaatcatttctgtgaaatggtagcaaattaccattcagatacacctcatgttttggattatagcaagtatccaggtaactagctcttgatatatagattagatcagatgtgttttctgcatattttgagttcaagtttttgttaaagctgcaaattatttaacaacagctggggttttcttaattccaatggcatagatctggaagagcgccaaagatttgtccggatgtatctgagctctgcaggttagtccattagtttcttgatagtaatcttagtaccgctatgaggtgacaccttaaaaatagttggcgatattccatagaagttattatattaaatcttgtgaaacctgatatttaattatattaatagtgatatgatactatcgagtgctgtttaaaatgctcgaagtgggggaacctaatcctaatgctaatttcagctcataaattcaaagtgaaacaacaactttcttgacttttttgtttggtgttttttgacattatgttacattcttatgactaatttcagtcaaagaagtttttcaaatataaaattggtttcttctctaagcttattgacctttcaaccaatttggtaacttgtcccataagaatcctaacaaaggtttttaattatcatgcaggctatgaacctagtgacactgaagtagaacagctaatcaatgatgtggagaaatacactttagcaaaccatatcttttggtgcttgtggggaatcatttcagtaagcatttcggtttctcagtttttttcttttatttcaaaccgaaaaatgacacgaacttaacatgggatttcaatgactgttactctgcagaattatgtgaatgtaattgactttgactacatggagtatgcaagacagaggtttcgacagtatcggttgaggaagcaagaattgctgggctcgtcgggtgtttctccttaatggatacttaagaaaggaagcttcccagtagccaatttcaagggttctgatatatgatagtgtgatagcatagtatgatgaggcttgtaaataaaacccacttctcttttctgggcaatgactgtaaatttgttaaggtttttttgcaatgtttctatggcatcatatgttttttgttttgacaatatatattattttataaaagcaattattatttcaacaaattattttatatttaataaattcaaattgtaaaatattattaaaataattatatactaagtaaagtagaaatcatggttggagtaaaaataaaatgtaaagagcggtattggagatggtcataactttttttaatctttatttcacttttgaaataattaaggaaaggggtttgattagtgcttgaaccatatttttttctcaaaattgaatacagagttattatgtatgactcaagaaatacattaatttcaaccaaagtagtcataggagggtgcgtgtgtggaagatttaactaataatttcaactaaagtagttattatgtaagattgtaatatataaacgcttaaatatatataaaaaaaaaaaatacattaatttctaaaagatttgacacaactaaatttcattgactaataattttcacttgattttcttttagtatagtaccatgaaaacaaaaaagagaagaaaaaaaagatgtgttgtctaaaaggataagaaaacgtactatatgactcaagagaacattttttttagaaatccaagaaaacattcttttgagtgaagctattgttattttttttacctaactaaattatgcttatttctcttttgatgagtggctttggactttgggtaaaagttagggtttttttttttgggtggtgattaaggatcttgtcattgtccttatcctttcctacattttttgtctatagataattagattcttctgccacttttatttgttcttttcttttttaataataaatctcaaaattttgatttgacttattttatttcaaagggtctcatgtcttggtattgataaaagaataatgtagtcaaatgttacaacattataaaaaatggaagtaataattgtttatgagagggtaagttttccaagtttattatatataaatatataagatgatgtttagacaagaagcaccagtggtctagtggtagaatagtaccctgccacggtacagacccgggttcgattcccggctggtgcatctgagctgtgacgattttcaaacgctatacgagatagttgggtctatctctctcttctaattccataggatgaaacgctgcgtttctgagctcttcttttgttttttaattttatttattttgaaaaagaaaatattattaattataatgaatagttttttttttttttttttttaaacttttcaagcaagaatattattagttagttcagtatatgtgagttagactttttgacaaagtataaaatcggtatatgcgttcgagagatatgagtacgatttgatacggaaaaatatgtacttagacatgacacaacacgatatgaaaactataaacttaggcacgacacaacacaacaagtccgaaagcacgacatgtaagcacgaatagattaactcaaaagtatgatacattaaaatgtcgaataatttaataataaaatatttatcaattaaaatgatagtaatattcaaattataagaattataattattttttatatgattgtgtgtaactattattggaaaaaaaatataaaagtaactaaaactataaaatagatacattttcgtatttagctcattaattataataaaaatacaaagatatagagtacaaatttgagcctataaaagaaaaaacgttggtatatttaaaaaaaacgagccaactcgaataaagtacgacatgaatccgagtacgacacgaaattactgtacttgcagactgtaccgagcctatcttataaaattattgcatgacacggcacgcctcatacttttttatgatagggtacagttcgactcatattttttatggtccaacacaacacaatccgtatttttaaaattactaaaaatatgaaccaaataagcacaccacacatgtatttacaactattaataattattcatgttaaattttaattgaaaaaaaaaagtataatataaaagttaataaaagttaattgtttctatgtaatgtgaatgccatatatttgaaaaggttaaaaataagtaataacagttcaaattttccattaaataataataataaaaaaaagataaatccaaaaaaagccatacaaccatgtaaatttcactaattgttaaactttgttacaatttgattaacaacgcatcatgtgctttttatataacttcttatttattatttttggcacatttatctttattattgaacataaacagtcttaagtattacatcaaataaaattcaatctaatatggtttcttaagaaagtttagtagaagtaaaaggtaacaaaaaatctaattctgcttatgaagaaattccagacatggaacgtaaatcctcaacaatggagtcgattaaagcatgagagcccttggtagctgcaaacatcaagtgtttagtagcctcagctctgtcgaaatagaatgtgcccgaaaccaacttctct

SEQ ID NO: 15363 - DNA, 9464 bp, Cannabis sativa
  modified_base (6920)..(6920): a, c, t, g, unknown or other
  modified_base (9041)..(9041): a, c, t, g, unknown or other
aacaatctcaatagttcatagaaaaattttaacgactaaaaaaattcaaagatatcatttagtacatgtcaaaatttaaggagcaaaagtcttaattaacaaaaaaataaatatatatttcctatttaaatttttacagttcttacatgaaactgaaaccgttatatatttaacacatggataaattataaatttaaattttttatacaatgatatatattgtacttaaaatttctacaagtttcttaaaaattatgaatagtttagagtgtttaaattataactcaaattattttgtgtttgtttcactttatatattcaaataatattatatttgttttattttttatacatgtataaaataattgttaaaaaaattaatttcagtaagatatacatatatattttaaatataacttactttttctttagaagtagctttaataatttctcccatgtcctgtggaatcgacatactaataagcaaatagttcgaccaatgtgctcataccatgacataacagctgacccaaacaacaatggtggccataattcccttttcgcaagctcttcaagtacccttttagctccaaatttcgaaggaaaaattggctgattaatacaaaaaatataatcaaatatatagtttaagatataagcgagtcaaacctgcatttagtgcatataactaattttaaacgtaattaagtatcataaacacttttttaatgattgattgaatgaacttaccggagctactagagtgattgactttacggattttgaatgctttgcagccaatgctagggcaatgttacaccccatggaatgtgcaaccaagtggaatgaatccaattgatatggaatgattatagatttctcaatcatttccaagtgatcttttatagtgtagaaacaatctcttggctttgggctccttccaaatcccaatagatcaacaccaaacaatttatagttaacattacaatttgttacttggtttgaataattggttatattttgaaacacagtttctgtccataatgaagatgaggaaagaaagccatgtaagaatatcacattctcttctacactcttttcatcattttcttcattggctgtcaaataagaaaatgacaaataaatatttagttttatatcttaagtgtttataatattttggaactaaacgagtaaggactcgaatcgatcaaggacaataattctacttgatatcgatttagaactatatctcgtaatctttcttttatgaaattaggcattaattttgtctaacccaatagtatttggagaacaaaaaactataacaattgctatatagatacttaaaatgtactcgaacttcaagcctttcaaggccaatagttctacttgatattgaattcgaactataacaattttaaatacctaaaaagtacttgaactagtttaaagtaaacattttaactaacaaatttaacatatcaaacaaactcaaattttatcataaaataatagtagattaaaaaaattaccttgttgagaagattgtgtaatagaaacatgaagaacactattactactcatccatgaaagacaagactcacatccacaatcagaccatctttgtttactacattctattttctctaaatcattattctcacataattttttcgaaaaaccaagaaatcccatttcccgaaaaatgtttttccttccaaacagcgtctcagagagctcactatcaccattaccatcaccatcaccgccatcatcatcattatcactcctttgtttttggcagtaacatgttaagacttttccttctaaaaactcatcaatgaatctataaactaaacataaaacagtgtcaagaaaatcaaggactagaaagacaagaaaagtgaccatattttcccgagaaaatgttatctgagaaaatatggggtgttgttggttgataagaagattaatggctaggatttgttgttggggtttgaaaatcatgtgatggaaaattgagtaacgttgaagaattttgattgagattctttgttctagtatgctccactacgttccaaaccatttaataataaaaataataataatataataagttatattattgagaatcaatagcaatgtcattttcaatagtgttttaaattataataaagtttctttattttcttaaatatttttttgatgatgtaaaactaattcatgattaatttatcataattgataaaatttaaaattgtatagttataattttagagttaataattgcttatttaatacccttatatttgtttatagttaacttaagctaattaaataaatcatcttattgtagttatatgcatggtttgtaactacttcaataaattgttaaaaaaaaataagtaaaatgtaactgaaagagtaaatttacaattatttttaaaattcaagagatatttttatatataaaaaaataattcagcaaaatcataataaatttatcaagataatttaatcaaattaaaacattttaataatttttcttagttatgtaaatgtaacaaaatttattctttccgatcaatttttttatttgttttccgaccatcttaataaacaacataataaaataattattctaatgtttaatattttattctcttttatttctcctatttattcatttgattacaatttagtaaatgccattaacaaaaagcaaatataagaaataaaagaataatacacagtccactttatttgtttcttttcctgtcatgttttgagatttttttatgaaaatgacaaaaaataaggattattattttcccttcgttgttaaatattagaagcaaattcccctaaaggatatgacaaaagaataattgaacaaaaagaagaatgcctaagataaacaaacaaacatgtaattttcttaggtcttgtatatctttgttaactgtcaaaactgtttttaacaagtatcatcatcagacgacgatgacgacgagagcgagaggtttctcacgcggccatcaacccctcgatcgtgtaagtaagagacttagcccagtcggctttcagtagcagagtttgcagtgtatccatcacattgtagccggggtcgagttttcgttgccaaccctaacaacaccaacaaagattaaaacacattgtaaaccgtggataaataaacccctatcgaattctatacgaagaaattacctcgagaactaatgttgtcaccatgacggtacagacattgccgtcgatgttgactctatgacgcctcactttctcgagcaattgctgcatgcactcggcgggatgtactatgtcaccttctggagtaccccaaaaagtgaatgattcttccacttcctgaaatatacaacatagatttaagaaaaacatactagaaatagattaaaccttttactaaaccgagccaatgtagcaagcagaacattttaccttaataaaagcctttggatttggacaattctgttgtttagatagtctcaatgcactctcagcagctgtgcgaccatctcgacgagcaacagctttgaaaaattctagtaaatttactcggtcacttccagatagttcggcagtcatgccaacatcgaggaatatgacatgaggtttcgatttgaaaagtctttttcgaggagacttactctgacccacccgaacaaggatatttccaggatgcatatctgcatgtatgaagttgtccacctaaaaaaacaaaaatattgttaaaaaacataactttatactgcaaattaaaagtactaaagctcatgactgaaatcaatacaaagttgccaatacatgaaaataacgaaataaactaactatagaagtgaaattctcatagagtaatgtataagaatgttaccagaagcatttttaagagtgcatgtgtgccgatgtgagcaagtgctgatttaatgcgagtatggccttcgagttcatcaacatagtgtgagacactctctccttgctcaaaagtttccaccagaacggcagggtgcacaagcggatagacaggcttagggaatgaaacatccttccattgacggaaattgtatataaagcggctcaagtgagcagcttctctagcaaggtcaacttgggacatcatgaaaactgcaaactgctgtacactttcatccagtcttaaccacttcagtgtaggaatgaaattcgaagcttttgctacaaaatttattatcataaaatctcttcgaattgagtcaccaacaccaggatgtctgaccttgacagcaactgtcatgggcttgaccttttgaccagggtagcgaaatctcaacgatgctcgatgaacctgggcaatacttccagatgccacaggtgtctcctcaaaattctcaaatatttcagatagcttgcggccaaatgctctttcgatagttttctttgtatatgcaaaactatgttcgggagcttttgtatgaagctccgcaagctggttgcataaatccctagggaaaagatcaggtcgtgtagcagcccactggccccatttgatgaatgctgggcctgctttttccaaggtacgatgaacaacctgaagccaagttttcctgaactgaactccaaaactatccgcaaatggtgccatcattatactaggtgtgaacaaaatcgatagatagagagctcttacaaacaatataaacccttctaaaactgaccaaagtaatgaggtcatgtaagcacgcccatcttgtgcatgcatataaaaagaattctttgatgggtgctctacttccatgaatgatctctctgcccatgctacctgtccacaggtgaaggcaaaaataccgggaacaatgggatgagatcgagttatagctagactaactgcttgagcgatcctatttatgggggaaatagtacgagtattggaataacacttttgagaaagtcttttccatgcaatttgggcatgatgcgagacagcgctacttgctgaaaacacagagaaattccttgaaagactagtcttgccaaaacacttcgtgctgctatacaatgggtgtgaagtatgaactctatcagaatatctgtattgcgaatacaatttgtatctaggaatatttaacccaatggcagctgcaccattgttccctgaattcgtatagctatgcccctggcttttatgtatagaacttgcaactctcttaatatactgagaagtcaaaaatctgcgtttcgaaaattaaaacaatcaattaaattaaacgcatacattccttaaattcccataaacaactaaacattactctaacatcaaccgacgaaaagagaaagaaaacaaaaaatacacgatcttatccttgatgtataactatccttttatgaagctacacatcaatgcatgatcatactttaatactccaagactctgttggggagctaaaaatagacgcctctatataagaaacaatttagatttctgatatgaattagtatatgtcctagcattgaagaatgaaatcatgcacaagaattgaattgtctaataaaaaaccgacagctgtttatacctaaacccccgactcgatatgtcttattgcaactgctacataatctttataaatctgaaaaggcagaaagactcatgcaattcaatttaaaaataaaagtgaaaaaaactgaccttgacatggctttggcactgctgcatttgccgtggttaaagctcccacaagactcgtgctgtgttccaaaacttgcaaacttgactgaagaaatgaacctagttagcagatggccaatcgcttttacatgatagtaatcaaggaatatgagtactcatagaatcaagaattaagtatagaagtaccaatgagagatacatttggtattttacttacatatcttatgtagctaggccaggattaagctagcactaattataatttaattgaatattggaaccaaccaatctgaatcactaattaggttaaacaaaaaccacacatcataaggccatagtgttgccaaccaaaaagctcaacattgctaaagataaaattcaaaaggtacaatgttgttagtccattctacttgggaataagaaattgcaatctcaaattttgtcatgtgaatctcagatgttctaaattgtttcaatgaatactcagcagctaataagggtcatcatttaacatataatacatatacaatagtaaatttatatggcctaacaattcaaaatccaagcctttttcacaactgcagcaaattagaaacgactataatcaacataaatatactaatccaagcattaaatacataattaaaactagtataccactaaccttctcaagatttggcttagttcaggaaaaacccttccaaaactattgatacaatgtagttcaaagctaccaattgttgaccaacctcactcaatgcctcaaaacatactctatattacattcaactgcatattcaaagctcaaaaatctttgtctacttcttctttctacttcctcaattatttcctaatctccaactcaatatctcattgaaacattttatcaaacactttccctgcattaaaaccacatcaatttttagagagaaaagcacacacacacactttaagatatgtataaagaaagatcataacttttcttattctaattcctctttgttcctttctacacaaacaaaagcaccaatcaccaaaagcattgtgataatttcagatgagaacaatttgccaacaaaatttcgagtcaacagatttagttaagcattgtgattttggtttttgtttaacctttgatatattctcataaaccccaagtcaaaagatttagcctttgaatttgatatatacacacacatatatatatatatagagaganagagagagagagagagagtaccttggcggatcaaggaagcgaagttggggttcttggggttgtgaggccgggcaatctggtggtgtagctggattggaggtgggatgatcggaggtggtctggatcggcgaagaagcggcgccgtaaagtgtggagggaaattgattgaagggacacacacgagagagagaagagagagaaacgaagaaattttagtttttaggttttaattttaaatcctttaatatttatttaaattaattattctcgataaaatcttaaaatttaaataatgcgttttttatataaaattaaaatttataaatatcttatataattgaataaactttaaaatatataaaaaaaaattaataaaaatagtattaaattttttcttattatatattagaataatctttttttctattttaaaataaaataatcagtccacaaaatgataaaaaaaaaatatttcattagaataacattctaatattttaatatgcaaccaaacaaacaaatagaatgaagattgtttcatttcattacctccaaccaaacgcgacctaaatgattgaatgtattttcctttattacattgatttagtttctcatattttcaatagtattttatattagattttttttatcataatggtaagtagttttttaacagtaaagcttgccaaacttaaattttgtaacaaacaaaatattaattattttgttaagatattaagaatttatatgtaattatcacattgtatttaaatacattttgtattttaaaatatagtataattattaatatctttaattattctctttagtaattacataataacgtctaaacacactcttaagttaagtgcaattaatttactaatacattaaattatctatgttaacccaagtataggcatgtgcttaatagtcttcttaaatttaattatttaaatattataaaattattaaacaaaatctttttttaattgaaagtaataattaaacataatattaattaaaaaaaatcattttcctttcttttctttcttgagattcattgtctcatcttttcttttcttttctttttcttggttttagatctcaccacaatcaccatcacttcgcaaccaacaccattatcacatccaccatttattcttctacctcctcttcttcttctttttcggtttggggttttgaagggtcgacacttagggtttgttcatagggagacaaagcaacatcgatgtattagatgcttaagcttctttagatttgaactcatgatgagtagttatggctatagcttcatgatcaaaataatcctagtaaggaggatgatgatccaaattaataaccttcttatgtttaataatattattagtactattgtccaaatacctaaccctatcatgagtaacattattgcccttcaaattattttcctaattccaaccccttgtgaagacgaaatttcgactactcttctgacaacgatactgaaattttcatgacctcattagcttgtcataaaaaattagctcaatattttcaactccacttttggtaatagtctctacattattattaccgttagtggagttattacaactttttatagttggtaatattcaaattaagattttaatttgtgttatgattgtcttgtaattcactaatctaactttttagggatgacaagtctattgagcttaccaaacttgttaaaaatgtacacaaaaagccgaagtatatatagccatggagaataattatttgggcttgagctttatcataagcccaatatcagtacatgaggcagcccagcccaatatcataagcccaaacttattttattaggctttcatatctttttttatttttaacaaaccatctcttggatctgtttaattttaccatctcaaagttttcttgtatgataatcagtttccttaattatatgcgaaaaatacatcttttttgtatctattaatcaaaaatactttcatattattttttttattaaaataaacccactttttttagtgaattgcctaatataccctcactctttacttaagtgtagcatataatttacataacctaaggggtctnataggaacatcatccataaaagtgggtacatctaaaaaatataaaaatgtatgtaaaaattaaaacaaataaaataaagtaggtatacaatgtaatttcctctaatttattttattttttatagaatatgcaaataaagttatccatgataggaatttcaaaaatactaaaaaagtaacaaaatttataaaattaccgatttacaattttaataacatttttatggattttttttattgtttttaaagttgaagctatatgaaatcaacatgaaaaacattgttttctaagaaaaaatacaagtaaaagacctatataaaaaataaaatctataaaaataaaatatatctttatatatagaatatacttgaacataaaagaatattctgttaaatttaacgattaggtttgatctcccgttaa

SEQ ID NO: 15364 - DNA, 5760 bp, Cannabis sativa
ttttttttttttttgaaagatacatacatttttttaaccattcatctatataatttttaatagtcaatattgtgtaacatgtattttgtagcttgttaatttttttattttttttaaaaaaaaaaaaaatcagataccaaattaaacaaaaaaaaaattaacaaccaattaaaattaactttatcattcaagaaaataatttaaactttaaccaaataataaccttccgctattgctactggtcaacaacataagtattgaaagcaacaattttcatgttcttgttctgggtcaagcaattggagaagcagggcaatattccgatcatcctatacaaacctttttcaatttttgggcaccgaaaccatgcccgaaagggcctcggcagccatttcttgaacctcaaatgattttgaatcgagaaacttaatgagcttaggcatgaaattggtgtcgcctaatgctttcttggcttcttccgatgtcccagatagtcttacgactactttcaataccatttcttgtactgaaacttctccatttcgaagaaaaaaaatgaggtggtctacgaacgagttattaagtagaaatccctgagcttgttgatgaaaaataaagattttctattgcccggagagctatctctcgagtcttggaactacaagtggatctgggctctatgacttttagtaaggttcgaattcctccttctttgactaccgtttgcttgatgacttttaggattacagtttttaactggtttatcatcatatataactggtttgagtttgtgaatgaaagagagaaagaaaagaaaaaataatggaagaggtaagaataaattagtaatctatttaaataattattatttaatttaagaatattattaaaaaaataattttataaataatctagtacattctacatgttaactatttatatacactgataaatttattacttagattaaatttttatggctataaaaatatgcttacataaggacaaaactaaggtgtttactatagacataccctatatatatataaatttattaaggttctttttaagatctgaatataaaaaagtcttaagatggttctttaaacgttccatcaaaacaagaatttaaaggcaaaagaatgcccaatgacagttttgctatggttaagaatccattatctgaaagatattggatttatgctttggtgggtctctaagatttgagatgagaaatataaaagaattaaaatgatttgcacatacgatggcctagcgatgattttacataaaagctgataataaaaataaatacataaataaatgattatcggtaatattaacttagttgttaatttgagtttaagccatgtaaaattaaactatacaacaactgtcttgtgacgcagctacaacctacaatatttccattaaaacatgaatttagttgccaaaatgatgatcttatatgttcaaacaccctacccaatacatttaagcacaaatatgttcaaaccatattgttgaccttgaaaaattgctaagtaagaacatcgggataacagcggaatgagagaaaagaaagaagggaagaggcacgaaactaagagactcgctggagcctcgtgttgcgccgccccctagcgagatgagaggctcactggagcctcatcatgttctgcctgttagcaagaagagggtctcattgaccctcatgtcatgccgcccatcggcgtgagagagggtcatgtggaccctcatgtcgcgccacccacatgcaataggtgttaaacagtttgctggaaggacgattagatgtccccctgtacaaacacaaagccaccaatattgagaatcaaaagactaagatgaaagggactcctgaatcatccacaagcaacaccccacaatcttcgccaccacggagcgtgtccacacgtaatcagctagaaacccgtggaagatgaagccactctcttcaaccctagaagaccctcaccaaagtagcccccaggacttgagggaaaaactattgggaatattttaccaagatctaaatttactaacaagtatattgatttaatgtcccaaatatgaatatctccaaaacaatgaaaataaacacacaatagtttatgaaaaccttacattggatccctaatatgagcatattgtttggctccgacacctcccttcaacttagcctcacgcttcagttgaatgagctctttctcctactcggcatccttagctcggcttggcttagacttcttcttcttctccttcacgggctttggcacaaaatcctctggatagagcttgtacttcacaaagttggcctcagaggtcaacaaagtgatattccgagcatcctttggcagttggagaattttttgtgccctctccctaagtttcaacgtgaaaggagggcatcagtatgagtggatctactggaaccaagtgtggacggtctccatgcccgtcacaaaataatactcatccacgaagtgccctattttgctgaccgcagggtctagggtacccttcagccacttatcatccagctgagagaagtagaagtaccccgacctgctctgcttgggggtcgacttcaaatcgaagagccagtaggtgtcgtgtggagatggctcactccatccttgagttgcgtagaggatgaacaggcagatcagtacttgatgcccttgggtgtgaactgggtcagataaaggtggtaatagtccgcaatccttttgaagtacgggtgcagaggcagcatcgcaccttgtttagtgtgagcacccgactaggcacagtatccctcccttggattagttgcccgatgatttggaaaagggaaaaagcatttgacactgcccaggtatccatccttctccaaactcctcaactaggcttgagttacaatagatgggggagacacccaccgagccctaaaggcaccttgcctcctttgaggaaccgcctcgacatactcctcggtggcgtagtcatcaccttccaccaggatgtcaccagcctctgacagtggttctccagcctcattgtagcctccaaagcgcaaaggttgagcagctccttcctcctcggccttagaaggtctatcaggacgaaccttgccttgatcctctacttcttagacttcaacatccccctcgtctctttctcaacatcaggctgggcctgttcggcgctcgacatcgtggcatgctgggccatgtgagagtcagctgcatcaatcttctgcatagtttgtttcgtgtgggccatcatcctacccctggacgatggttggtgggtatgacgtgcaacggtcacggcaggagtagcaataggaatgtcaaaggcactaaggcttggacggcccactggaatggtatcagctatgtttggccagataatatatgtccagttggacggaagataacgccaccatcccttcctgagttcccaaatgaaacgcccgtaaccttcacctctgatctgctcggaataaaagtggtgctgcactttgggttctggagtaggtctaccctcactactcatttcctagtcttcaaaactcgagttagaaagtctatcacttgagaaggacggactaacataaagacgaggttgatcctcgtacaaaagttggagaagatcctagtcgatatggcgttctcctccccaaaactcaccaaggttcatctacaaaagataagacacaagatgagtatttggccaggatatcgaacaaaaacaagtaaaatataccgactaggtctaattaaaagattaaaaagaagaaaatttcgcgtgatttaggttcataacccagaattttgaaaacctcgaattaagggttaatcttcactaaacctcgaatgggcaaagtgaaaactgaatatcgtgaagttaaatttggaatgccacaacaatcaagttatataatctactacagtcaaagttttgtgttctaaacctagattctctaccattttccaaaaataagttaagactattgaattttctacaatagaaacccagaaaattgaagatttaagcattaaaggagaaaaagatgagaaacttactcactgttcgaagctttgaggttgctcggatgatgctgatcggctctttctgttaattccacgaaggatttgagagagaaaagggtttttctttctgaattcactaaacgagaaaaatgctaaaaatggtttgttatgacttttttccctatttataagcagattagtgaaaatgtgaaatcaattcaaatcgtaaacaccttgattccccctaaaagtaaatattggaaaatcaaaacaatcaagtacctggagaagagtaaccgtcaaaatcatgtgaataggtggcgtgtctcgaggtacgatttaattagagcattaattagccaaaaattgaagggactcttggtcagaatcacatcggatcaccaataggcgcatcgaacacgcgccacccgttcagatatagacttgagatgagtgaagtctacacacgacttcggaagtctcgtgcagacttgggggcaaatgttatcccattttttacactatgacatggcaacacatattggtgacacgtggctcctgtttcctacatctggctgaagagatattctgaacagagctcaacgtacatctacacggatagagtctgcctgaccgagcagggcaagcgtagacgatccgagcaatgtatcaagacttagcagtattaagatttacctcgtgaagcataaaagcaatccctacaatccagagatcgtatcaaagggatatggcaagctgtccaaatccctcaatttatgtattctaaatatgtaatgtgtgttcttaccaattatagatattgtgagcaaaagagaaaccttccctcagtcatttagccttataaatagtgatccatcctcactgtaataaaggacgaaagaattacttcagagagatctaagaaaaaacactcagagatttcattgtgagagctttaagagaggaaataatgtatcatttgttcttgagttaatacaattcaaggggagtaggctattaccgaactaaaggggctgaacttttttaaaatcttgtgttctttactgtttattggttcttaccttatcttaattacatttcttatcgcttattaattgattcattgtcgttggctaaaagcgaggtcaacacataataataattggaaaattaatactatggacagaaaattgattttatttttagatttatccaagtaagtatttaatttataaatattaaattaaaatttatatttaaatttatcttgaattagtaattttaaataaatatattaatattaaaataaatagattaaaatatatatcaaaggaaaatacatttctttaaaataatgagctttaagtataagaatatttgatctctattattggttctacatagttcttattttactgagatttatcctaatagatattcatttattagaaattttaacaccgtagaatctagaaagataagtttattgtaagtcttttattctcagtaacgatcaccccaatagtgactactaagagtagggcttacaaagtatgaaacaatggtgaaagctcataagatagaatggccttgactcttgcctaaataggagaacgccagattcttgtcctgatcgaataaaaagttgctagaatagtgtccattttagatgagttgactactctatttaatgaatgat

SEQ ID NO: 15365 - DNA, 5744 bp, Cannabis sativa
aataaattgtgatatataagataataagctaccattgtcaattatttttaaaatgaaacctctcttatcatatctcaaattctaatctaaaccacatttaaattaataatttatatgtaaaaaaaacaataaacataaccataaatgctttttggttgctgttaatgattaatattcaattcaagcgttttattggttaaatcattggtcaagtcaagagagctgtctctctctctttctctcttggagttgttttaattctattagttaaatccgtgttccctgtcaaaacgacatcgtccaccaaaactgcggactccttggaacaaaaattgggtcccatcccattgattccagtctcacgccgggcccacccattctctttttctctttaaaaaaaatatatcctaattaaaactaatatttaattagttttagaataatacaaaatcactatcaattatatcatcaacaatcaacccattaattgtatgttatttttatttttaaataacgagattatttcaaagacaaattatagtaatgaaaaaaacacaacttaaattatctatgccacgtgaaaaatgcatgaaatagacaaattcacgtaggaaattaaacacttcattgattttatatatactaataatacataaatactaattaattactagtttaattatattaattataacaagttgttttgggtgatgatgaaagaggtcatgtctgagtactagaaaacaaaatttcccaaatctcagagaaagctcggacgataatcccatggtgatctctggaattaagagacaagaaacaatgcaagagctgttccaaatctttatcttcaaacatttgtttctccaaaatcatttccatcatagacctcttaaaatcctcgtaaggatcagccgatttcttcaccacagcaaaactctccctcactttcccatccacactacaaggaatcatcctctgaaacatcgaaagcctcgccggactactactgctctccgaagacgacgacaaagatttcctcatcccctgtttcgaaacgcaccgttttgatgatttcttcctcttcttttttttcttattattattattactataattggtgtgatccagtgtggtctcgcgtatggtttctaactgtgtgttgaataattctgaagaggaataatcagttgtggtggagaagcttctagaagatgagactaaagtctctgtttcttcttcgtcgtttaattcgttattgtagtttattatttcgtcgttgctgaaaattccactctcggctgaagaagtgctgattctgaatagtatagatctagctactgatgatgtcgttttccttttggatcgtcgttttttcttcttctttctaaatttagtttcggctgaagaaggaggcggaggaggaggaggaaggaaaacgtcgtcgttttcggtttcggaacgccctgaaacagaggaagtgtagacttttcggcgagcaggggtttcgaatacgacgtcgttttcgaacacattttctatcacgtgccagttgttgtcttgttcacgtgacgatttttttgtcgttgtaataccgatattgtcctcttcttcgtcgtggtcggagtgagtgggttgcgaatttgatctgctgcgacagcatcccgcggaaaggaatgcggaagacacgtggcgtttcaggaaagaacggtgggtagtggtagttgtggtcgaggttgtgatggtgtgtgatgagcggtggtttggaagtagtactgtggggttgaccgtagagaatcggaagaaagatgggagtagtggattattattggaagaggggtctttggaattggaaccaccacaaggattgatagaaaaaatgattttggaaattcgaagcttgaagttgaaacgtttggccatttttttcttcttacctagttttgtttgggagcgtaaatatggggtaaaaaatgaaataccaaaggatgaaactttgtctgtcaaaagtagggtttatataggagccatagatagagtgtcaaatcttattaaaatgcaattttaagctgttttttaatttttattttatttcttataattaataaatcaataaataactgagacttgctatgctattataaataaaccagtataaactacataaagtattgttaatttttaagggtaaaaaaatccaatatatataatggcggagctaaaatttaagttgagagaataagggatattttttttttaattataggaggcatactttattttttacatgacataatatatttaaaattggtataaatttatatttttattgcattaaatatattttaaagttaaaaaagtgataagaaaaatatcgacaaaaaaaagtaagaggaattattttttatactatttttttttttcaaatttacgggttgggttgctcttgttccgttaatttttcatgtagtttctgtgggttgctatatgaatttaagttgcgatttaagttgctccattagttgctataggagtttctgtgtaaaattctgtaaagataaaaaaaactattttaaaatataaaaaaaaaaaaactcaaaaaataataacatatatacatataattaaaaaaatgaaataattattttaactcttacccttctaatatactcctcttttaattatattgttgttataagaacggacaaagaatactaaaatcatattaagaacccttttactaaagtgaaattttgtcactaaactgtctgtttaacaacattatatactactatactactatgtaatatgtataacactgctcctaattaacggtacgtgcaatgaagtgacccatcggtgtatatacatatgatcatctcatttatatttatatatatatatatatttatatacagccttttacaccaaactgtgtttacgtatccagcgggttacacttacagaattacacagtgaatgttataataaagccctagcaaaaaagaaggttgcactggtcaatacattgtactcgtatcctatattatttaataaccaaaaacaatatatatagtaatatatataagagttcatcattttcaccactgtgctacaaccttataaacaataaatattgttgttatatataatagagattttcatattggagcctctagctagaacttatgcttttactaggagtgttaaatttatatatggtagtgtggtacgattacaaatcataaattttttaccatgcgaatgaaaaaaatagtcactcgtgcaataaaagtaagtacccaagtagtcaagttaataaatttaaactaaggaagcaaacgaccaattctgtacgaagtctgcctacatgattcaaactttggacaaggctcctgatcagtgtgttgttgtttcttacttttagaacagattgtggaatagtaaaattttagaacagtataaagttatatggtggaacattctgtctaatgcgcttttcattcacaaaattcttgggcaatgaatgacaattgaagatactgcttgctctatttgcgaaagtgatgataaaatcatggagcatctttttctatattataatttgtcttactatcttggcggtcgtccccatgggggctcatttcgattactgactctggagcaaaaatgcaggattggataaattttttatagaatcttaactcaagcagagccaatgttaatgagattttcttttatgcatccaatgttgttgacacaatttggagagctcacaatgataaggtacataacaacaatatagctagcatacaaaattatattgactttattaatcattgttgtatgcagattatactttatctattctcccaatatttgttgatcctgctctgactgagtggtccccccactaatgattggattattaagattaattgtgacgtgagaaacaagagggagaccatgtgggtgacagttgtggctcgtgaccatatgggctcttttgaggatagctttcaataattttttattttcagaccccctcattgatgaagtaggtgcttgtttacttgctttagagacctcaatagctttgggctacaagtttgtgatagttgaaagtgaatcggaagtcaccatcaatgctcttagaagaagtgcaccaagatgggagattgatagctatatttattttaaaacttttgttggaatgtaattttgttagaaattctcaattatgtaactttgcggcccataatgtggctaaactacgaacgttttccaacaatctctctggtatgattgaagtgtcatctctaccagaaaatattttatacaatgatgactatgagatttaattatctttatctgaaacattaatttttttaaaaaaacattatttataatacctatgcatattataattttttttattattatgattatatatacagtgtatgggaaaaaaatatgtgtttaacaagttattttgaattttaatttgcacatttagattatatttataattaattttgaaaatttataaatgttggaaaacttttacccctatttattttagtatacgttgtgtttatttagaactacatgtaaattttaaaattttgaataattttttgtagtgttgaacaaaaaaaattaaacaaatttttattaatgtgtataaaaaaatagtcactcgtctaataaaatattttaacatacacaattataaaaaaaaaattaaattaaaatatataggtttgtataaattgagattttagatgatagaatagatagtggttgtgtgtatatgatcgtacactgaggaatttaataataaagatgaaattttaggaaatatatataatgatgatattgcatgcttagtataaatactgcaaataaaaatgaacctgaactcagatttatattctatttgcattcatttcgggtgccaaaagtcaataaagtcacgacaaagttcatatctcaatgttggattttgtttctggactggaccattctgatatacaccatcataatatacaatccaagtcagagaaaacagattaaatacaaatatacgactcttcatcactttattattactttactttacttctcttattaataatatatattctagtctgaagacaacaaaggtatctactttaaacacaacctatgtatatctatatagtactactattattgcaaacctccatatgcatgtgtatatgttttaagaaaaatgttaccttccataatgtattagatatatgtttttggcaatttttttgtaagatgttttcccaatcaaatctaaaatactacagagtctaatatttgtcatttgaaaagacccaggctaggaaaaaagttaaatgtttaaaatatagacatatatatatatacacacacagtgtaccaattaaatatttacttaataaagtaagtgtgtgttttttggttggttgaatcaggtgaaatgtgattattcacatttacattttacatatctatgtgttaatagtattgctttaaacttttacataaagcaaaccaaagtagtatatgcttaggtgtaatttgctttgtttgttctaatagtcattcaatttaaaattataaatcattagtttatttattataatagactatgtttataatacacccagtaaagtgatgtttttgttttgatatttataagagtttaaaaataaaaaatattgaataaataaaag

SEQ ID NO: 15366 - DNA, 5234 bp, Cannabis sativa
aaaaaagtagaattcacatcaaaaaacaataaataaaatttgagactttggtgctctactgataaatcacccaggtcaaggccaattactttattcaaagataaataaaataaataaataaatctaatcaaatatctctctctctctatcttcttcttcttgttgcgtatagagaagaagatagctgttttgtgtgaaaagtcagcgtttctctctctctctctctctctctctctctctccttctcttcattttctaaacatcattccttttccttctaatctcaaaaatctcttttgttcttttgacaagaaacaatattagcacaaaaaacatcatcttcagaacccgaaaaaaaaaaaagaaaaatcctccaataatctcttttaattttctcctcataattaaccccaaaacccaatattttttcccaaaacaaaatatatatcatcatccatccaaagtcttcttctcaaaatctccacaaacccaagaaaatctgcatgccctttttcacgtcaacaaccaaaactctctttattgtagcagctagctagggttaatattatttcttccctacatttatattctttcactctgtattttcattacacgagaatgaaaattctactcctatacatgttcttatccttgctattacccatgtctagcactactgctaattttggtattaggtgtgaaaatccttaagaaaatcatgtgcagcttcttgttcgatcagccaagcaataatattaataataagaatattattatggacgagagtacaagtactagcagtactaataatatcaataacatcatcaacaattttcaaggcgatttaacagatatagttcgagccagaccacctgttgggggagctgcttcttcttcaccatcttcttcaaattctcaccttaataataatcctcatatcgatgtcgtttctggttacgatgaagacttaattctccacaacatggcacacgacaacggtgccagcggcggagtcgtaggctggcagctattctcctccgccgatcccctaatgatgaattgcttcggcgatccattttcaaacttacgcccggatccacttctccaccacaccgtcaccgccccggtaccaaccgggcttttccgaaacccggatttatctcccacaacggctaacaatttggtcaacggtgggttttgcagaggagtaagtaatgggcttattgggcctagcgaagaggagatgaacatgatgatgagtagtagtacaactggtgttagtgctaggcctagttgcaatatcttctctagaattcttcagattaatccaactactccaaatagttgtactaatactacttctactacaacaaacaatattactggtgctgttaatattagtacatcaaagttggcttgtactaataatacaacaacggctactaatagtaataatacgacgtcgtcttctcagggtgttggagattcgccttctccgccatctatggctgtgggttcgccgaggggattaattaatgtgaacagctcacagttgcaagctggtggtagttgcttgcttgacaacagtactactgctactaccggtggccttcagatctcatctccacggaacccgggcatcaagagaaggttagttagagagaaccaaaaaaaataataataatttatttaattttaattattatttttggacaagttgattcggaggacaagtagtcttaattgagtttatttaattatatttatttattttaatattaccaagttttatggtttcataaattcacaaaatataagattggttttttgtttttatttttgggtaaatatattataagggtttttgagtctgctttgaatatactattattattgtttcaggttagatttttgagtacggtgtaatagcattaatgttagcagtactagcaaataactatgatttctttgatgggttttaatcaataggtcgatccaaagctataaaaggggggtgtaacgtgtagttgtgcaacaattatattcatagacatagctttcattgatatatatatacacatattgtttaacttgaagtacttttctttcaccacgcaaaaacgcacctgaaaaggccaaactgtgtataaattatatgtatgtgattaggatctgtttggtcatttttcttttttgctttcataaagtataaacagtatataatagtagcagtagtactacaactactactacaactggaattgatctcaaagcaatcttagaaccaaactctttctaggaagtgtacaaaaatattttgtaagttacatattaatgtggaagagactttctaaataatacaaattaatatatatgtatgactgggcatatattatgattatatatttattaagtatataattgtatttataattttgtagaaagagtcaagcaaagaaggttgtgtgtattccagcaccagcagctgcaaacagcagagccactggagaagtagttccttctgatctttgggcatggagaaagtacggtcaaaaacccattaaaggttctccttatccaaggtataattaatataaataaccataatttaatatttatttatatatatcatttatgttatcatatcattcatatcattcatcattctcggtaccagaaaattattcctaagatataaaagaaactaataaaaacttcctaaggctgccattttgcttctcgcttttctgacaacaacaaacccttctgcaattcattttttttactacttattaataataataataaaaacaactttcttaaattgcattgatcttaagtttataattcatgccattttcacatctcattcaaacctacttaaatatatataatattatatatatagctagagagagaaaacataattatagatagtaagtaatcacacgaagtgaaaagtccgaattaaattgctacctaacaaaacattacatgagctctctcttctatttttcaaaatatctcctcaaaaatttactttctctatatatagcttgttttctccatagcgtatcagcaaatatagctaagttataaagcacttgatacttgatggatggatgagttaacatacctaagttatataaacacacagaagtactcacaacaacaatttataatagctaaaatgtaaaataaaatagttaagagattaaaattgagttccattaaatgctttaaagtttagctatacctcattccaaattctaagaaacttttctctacatatagctcaatgaatagtaaagtgataaaatattttacattttttctttttcttttttctttctttgattaatttttttttctttttactcatttgtgtgcttttctttgtttttatagaaaaatataaagaagttgatatatagtgtaatttaaatttgtaaaataaaataaaaataatttagtaaaatattttaaaagatagagtacaaaagttgtttagaagtactcccatgagagctctcaatattgctatatgtatttatttacttaaaacatatgatcatttctctctctctttgttctttatataatacttttgtttgtacatatacatttgtaggggctactatagatgcagcagttcaaagggttgttcggcaaggaaacaagtagagaggagtagaactgatccaaacatgttagtgataacctacacttccgaacacaaccatccatggccaactcaaagaaatgctctagcagggtcaacacgttctcaaccatcaaagaacaccccaaattctattaagactacttctagctcgaacccattattaatgagctcatcccatcatcagcttcaaaagagtggtaccactagtccaaaggaagattctactatgatgatgattcatagccaaaacgacaacagcatcagttgtggtgcaggtggtggaagtactagttcgacgacaagtgcttctgtgaaagtagaagagaatgttgatcatgatcatgagaatattgatgagaagaataatgatcatgatcaagtggatgatagttcatgtgatcatgatcatgataacggtgtagaagctgtgggtgggctatttccttataggccaaccatgcctggaccaaaccttacatcgtcggctgttgatcaggatttctttgctgatttaggagagattgaagctgaccctttaaaccttttgtttagtcaaagctttaactcggctgatcatcatgatcatacacataagggcatgttaataagcaagggtttggacccttttaacctgtttgactggtcagcaggtagtactggtggcggtggtgatgatcataataatattggtgctgataataacaataacaacaacaaataaaacaacaagaagaaagagtagtgatcataaaaataatatatactacactttactactcttgtctctcttgagctagtttgtggagtctttttttttattttctcttatattaatatagcaaggtcatttggattgagctttttcttttttctttcttttggaatatcttaggaagttagagattttttatttctttctaccccttttcttaattgatgttttttttttttttttgttccttactttcttgttatgggtcagaagaagagtcagtaaaaaaatgagataaaaaaaaaagagagaaagaaagaaaagagtggtgatttgattggaaaaagagagagagagggcaatgagagtagtccctacattccttttggaatattggtggatgggacagaaagctgaggaacagaaggttgcaacagtgaaaagaagtacatccatcacagacatgactagaaagctcagagtgagattgatcgatatataatattttcaatatttttatagaagagatgggacttccctttcaattttctttttttttttttctttttgatgaagaagtgggaaaaattattcgagttttcaggaaggaaggaccccaataatctttttctttggtttgttttggttggtgtttctaattaagcactctcaaaaaaaaaactgtaagaaagatgacaaaagaatatatagtaaaagattactaaaaatagcttgacttttctaatcagtcttgtctagggatgtgtattgtagagatagagatgatcacataatacatgctttgggttcctcagctttctgttttttattattatt

SEQ ID NO: 15367 - DNA, 5030 bp, Cannabis sativa
ttaaaaataattaaaacaacttttgtcacatagagctttaagtatcagtgtatcagaagcatctgatagcaagcataattccaactacgattattactgtgaatggtggtctacacttcgaacagagcaaataaatacctttcttccttgcataatatctgcaagtcgtcgagactcttcaattactggtagtactgtcagatcaggttttggctggtttcccctttcataaatgtaatatcctttcccattgtttttacctaaattccacgagtgtagagatgggctaagatgatatgcatacaaaagtattcgctaaacttaaaacacaagatatcatatgaggtatgggatttatattaccattccgtccactttttattaagaggtcaatcaatggtgattgaaatgttctgtcaggaaaggcatcacgaaactgttttgaagttgccatgaatactccatatcccgctaagtcttgaagcctgcagataaggacatcgcatacaataagctatgttccatatggactattaaggctaatatgtaagggttttcataagtgaagctaagagggaatgctgaagtgactcaaaaatgctattacgaatgctaattacagtaggtttacataagtgaaatagtaagagttaatattagatgtatcgtggttaagattgcaaattgaatttttgaattcagaagaccataagggacttctagtacaatagtaaaactagaaaaaaaaccttctagcataagtgcaaaaaccttattctacaacagccatacatagaagtgatctgaaaacttcaaattaaatggaagtcctcccccaggactcttattttgttagaactaactaggacctcctaaagcagtgccataattctaaacgctcggtgtttgagatcaacttaaaatgaagaaacagttttcataagaatcttactggaatgggccaagaggaaggccgaacttcttgattaccctgtctattctgaaaagatccacacctaaatggaccaacatatgagaaccttgtgagtatgggaagaacgttctattaactgcaaaaccagtgcagtttcccaccacaacagggaccttctttatgacttttccaactgtcataagatcaagtatcacttgtggtgaagtcttctccgtccgcacaatttccaggagaggcatcacatgagcagggctgttaataaggaatcaaaataaaaagaagggatcgaatgttagatttggttactacaatataattacatcctagctattagaaatattgagctgcacagagtaaatagataaagaaagaaagaaacaaagacgatcaagtgtgtgcaatccattacaacaggcactgcaatgagacatgattatcaaataacatctccatgacattagatacaaaagatatctaagatttggactgtgtatacttcaagtggcaagcttgcttgaagcagcaacgaatcaagaatttgccatttacctaaaaaaatgtgccccaataatgcggtcttgagaggttgttttctccccaactaaatgaaggtcaatagtagaggtgttactagccaatatgcagtgagaaggacaagctttctcaatttcactaaatattgtttgcttaagcggaatcttttcaatgacagcctgtacagaaaaatagctatatcagacttctttttaacagaatctaatatgtaaataattcatttacaagactttctttatgattaaattacaggacaaaaagtagacagtagccatgggaatgggcatatatgaaaattataattgctaatttattttgagtgcctacctctatgaccatatcaacatccttaaattctgtgtaatccaaaacgcctttgagcaaagagaggatcttgtcagccttatcccgtgtcagcttcccttttgttaccaagccccggacatttgctacataataaaaaaaacaagcagacatcatgtacgaccatgagatgaaattaaatcgcaataaaattctatcaagtaatacataccttcaatcatttttgttcccttcataagatactcaagattaacttccttaagaacaacctttatattgctcagaataagagctgtagcaatgccagaacccattagacctcctccaatgacagcaactttctttatgtgccttggtttaagcccaatatcagaaacatttggcacctgtaataaatttgaagttcccaaaaatagtaagaaatgtagagaggctagaactatagaaattactgaaactaaaaaaatttgatgcaatctagtaatgatgacttcaaaaaaaaaaaaaaaaagatttactttgtaaaaagtaggaaggggagaaagtttggggggaagaggcagcttgtatcaaccctgtaccttagttgttgaacgttgagcaaaaaagacgtgaacaagacctttagatgtgtctgtcaaaaccaacttcttaaaatcttttgcctcctgtattgacaagttttgtcattagcacaattataaacagctagagcccaatgcttcaaaatatttagaaagcaatgcctgggtctctaactacgtttagccctcaaaatataaagacctaagaaattagaaacatgcatgtcgccagatgataaaagttcctagttcctgtatagataaaaagaacaggagggcaggtagtagtctctgaaactgaaacctccagaaggcaataaaacaaataacatcaatggtaagaaactaaatgacaaatacctttagaactccactgtatcctccatgaacaatgccctcctcaatcacatcaagacaaacctggtgctgaggcatatttggagcagttatactggcttgttgacgtgcaacttttagtatctcacgtgcctcagacagggatccaatcttatctgtcctgtgaagggaacgaatccatggtttgcgcctctctgcaatcgctaaagcccacatacgtgatactttcagtaactcttcagaggacactatggagtcgatgaggcccaacttcttcccttcttcagataatattggtcttgatgtctgaaaaagcaaagtattagcatactgatttgcaaacaatggaagataaatcaagcatatagaaactagtaaatacacaactgtgttgtttctatgctattgtaaacaagcaacagataaaaaactatcctaatttcattcttctatctctaagctgctctaacccactaaaatagttcattcaagacaaattctctgtctcctgccttttctagctcaataactgccagctaattttaaaatataatgcaaataagtatagcctccaaccaaaaacaagttttaattattttttgtgcaagaaagtcttaattaatttaattaatgtacttatatatattttttacgagtatgtaagtgaaatgaaaaaaaaaaaaaaaagttaccagcatcatttcaatcccctttgacagccctacaagccttggaagacgttgtgtaccttaaaaaagcaaaaaccaaatgttaaaatcttggtaaatgctgatatttgatcactcgttaaaatagatgcaaacaaaagcagtatacctccaaatcctggaataataccaagagaaagctcaggcaacccaagttgagctcggggagcagaaatacgtgcatgacatccctgcaagaagtaaaattaagtcattaaaccaattcaccaaaaaactagggatgtaggtggtgctttggttagaatgacacaccaatgctagttctaaaccacctccaagagcaagtccctctatggcagcaacaataggctttctcgaatctatataaagaaggtcatattaagtgtcagcagtaatttgataaaaagaaacaaaatggagattttcaatctgcaacagaatgatattataagtggtaggggttgggattgagaccttcaattatgttaaccacaaggtcaacagatacatcaggcataagtgaaacatcccctgccatatgaaggtgactttcatcaatttacagattaaaattccataattcaaaccataaactctcagttattaacaaagcacggtgtatagaaagtttcctaccagtctcgtgaactttctcaaaaacattgatatcaaaaccacccgaaaatcttcctcctttgcctacattcaaaaacaaataattcatattcataacatatatagtccgagaagaacgaattaatccaattccattgttacaaataactccaccaaatcaaatttgacacaaaaataaaaagaacatgtatatacataatagcttaccagtcaaaacaatagctttcacatcatttcttctcgtcgcctcaacgaacttttcctttaatccctcaataactaaaaaaccaaaattcatcgaagatcaggaaagtaaaaaataaaaagaaaaaaaggtgatcgaagggggaaagtcatactaggaatagctaaggcgttgacggggggattggatatggtaatgacagcgacggcatcgtctccgacctccatggtgacactgggccttgccatggcgtttgggaaatctgaaagcagaagaagaagaaaaagcaagcaattgcaagagcagctttagcgggatataatggatgaagatcactacgaaaattggcaataagtctgtttgtgattttattggtttttgggtctataacggaccgttatttagaggtggcaatcactgttattgtcgtacccaacgttgacggtgagagagacagcaagtgagttttgacgttatacattttagttttagattaggatctttatattttaggtaaggtcttccttttctatttttcacattgaataaaattagagatatatacaaaataaataatccaacaacttacgtaatattgaaattttcaaataattttatctttatcgaattttcgtttatttcaatggtaagagaaaaaagatacaactttacaaatataacctttttttcttttttcctttttc

SEQ ID NO: 15368 - DNA, 14397 bp, Cannabis sativa
aaaaaaaaaaaagactttagttacttgtggtagaaataaacaatttttgtaaattaaaaataaaaccataaaagtaggcctaaaaatagaatttgtgaaaacggccaaaacccttttccaaccaaaaacccttcccatgcagattacagtcatcatcattatttgattcatttctcttctactatgaaactgtaatcaataatggcgatgattcagcttccaagggctttgtgctcaacctcaacaactgtttccgcttctttctcaaacccttctacttcatcctcatcacctctgctccaactcccctctttcatccctaaggttcttaatctattctccatttctaatttctctcatttcgtattacacatttgttttatgaggaaccgtattggtttacttttgtgtttaaaataataccatttaatttaaatattgattcttgttaattggaaccataattatcagaaacaatctcaataaatgcaataaagttcaaagctttttgtgctattgctgttgttattatcagtaatgtattctcatttgtcattttcttggactttatctttaacttcaatatcttgactttatttttaatgttgttggatgccattggtgtttcagctgatgtcattgtcttgttcaccaagttcatcttttgggacgagtgacaaatgtagaaagtcttctctggttaggtttaaaaacttcaaattgtctagcataatttcgaccaatcaggcgaaaatccctcaagactttaatcttatgaggagttgtggagatagatttcattgtgtgcttaccttaaactctcagttaggacttggctacctaagttcatttggggttgtgaataattttagtaatgtatccttttatactttgattgatggtactttttccaaacgatttttttcccaagtgagaaccaaaaccattaggagtagtaaacttgacaatgtgggtaaacaagatggaaaaagtggtggaagtacttttgggttacaaggggctaaatgcaaaaacaatgcaacaggctttagtatctccaaagatattgacttagaagcttcaagtgaagtcttagttggtggcaaaaaggatattgtaagcccgggatcgtttctttcaagttcattcattagcaaaagtagtgagacctctaagatcagtaaaaagaagtttaggaccaagaaaagtacagaacaaaatggggatacaatgcctaaagatgatacaaaagaaggtacttctttagcaactaaatcaagtaagagaaagattggcaatgctcattgttcaaaggtaagtaaaactgattacttagaagaaagaaacaagattagtacttttttctcgacctgaggaactaacagaacagtatttcagttaaatgcaagtaaagaaagacctgaggaagtggtcatggattcttcaacaaaactcttgtctgataaggagagcgggaactgtattagaaagggaaaactggtgaaagcagctaataatttgcaacagaaacaaaaagctcaacatgtggggcaaataaaatttcaaggacaaaggagcctgaagcagttgtaccctgcaaatggaaaatctgttgtagtggtagagtctgctacaaaggcaaaggtcattcagggatatctaggtgatatgtttgaagtgattcctagttatggtcatgtacgggacttggctgctaggtctggatctgttcggcctgatgatgaatttagtatggtgtgggaagtaccttctgctgcctggactcatcttacgagcataaaggttgcgcttagcgggtacgaattttcatcttttttaatgtgagattaatcaacctgaagtgacaataaggacatgatgtttatagtatactcagggccatttttacaattaagctgtggaaaattttgtggatgctaatatataaaatgctaaaattaaatgttttatctcataaaaaaagatcaactaaaactttgggatgtgttgttgagggacaattccttttgtttagctaattcctaattgtaagaaaaaaatactgattactctagaaggttaaccaacattttttttattgtatgtttccattcattttcttttctttctctaatcaattttgatgaaatgtttctgaaaattctcatttttctttctttgcattgctcctcatcagagcagaaaatcttattcttgcatcggatcctgatcgagaaggagaggctattgcttggcacatatttgagatgttgcaacaacagggtgccttacgtaaaaatatttcagtatcaagagttgtttttcatgaaataactgaaccatccattaaaaaagcactgctatctccaagagaaattgatgcaaacttggttcatgcctaccttgcacgacgagctcttgattatctgattgggtttaatatttcaccattattatggcgaaaattaccaggctgtcagtctgccgggcgtgttcaatctgcggctttgggtctcatatgtgacagagagatggaaatagatcagtttaaaccacaggagtattggagtatcaaggttgaattaaattctgtggacaatgttggttccttttcagcacacttgactaattatgagtccaaaaagttgaatcagctttctattagttctcatacagaggcaaaagagattgaaaataagatcatttcagctaatctcaaggtggtcagttataaagtaagtcaaatacggaaaaaccctccaatgccatatataacagcaacgcttcagcaggatgctgctaataaattgggtttttcatcaacatacactatgaaggtttgggagagtttatcttaacaatttgcaattctacatttttactactgtaccttgttaggttggttttttctgtcgcattaacattattttcccatttggtgcagtaagcagatgattattggcggtaatattatgtgttttgctaaaagaaattactaattgtcaatgcagcttgcacagaaactttatgagggggttcagttatctgatggcaaagcagcaggtctgataacgtatactaggacagatggactacacgtatgtatgactatggttaccggaatattttcccggatttgatgtttaatggaactgttttgaaggacaatatcattctttttctttctgatacttgttatgtattttagatttctgatgaagctgccaaggacatacactctttggtaactgaaaggtgatgcaaagaaataaccattttttgatttaaataattatttgagctggttatatggaaatactgcttctgctgaaatttagaccaagttttgtactactgtttgctgctaattaaaggtttagtgcaaattatacattacatgtcattaaaattctatatattttaaagctaagagaacttatttcgagtcatataattatgagtatgtattttaaagctaagagaactactttcgagtcctatgattatgaggatggcattggtagctggttgtatacattgtgttgtaccaatagaggcctctgtcctaattttaaagatagccagatggaggggcgggggttaggatagatgtatgttatatctaagagaattcatataaactcaattgagggtgcgtttataatggtttgcagttggctggaggggtggtgattaggatagagatgtatgttaaactaagagaattcatattaagtcatatcagggtgagcttaagttggtttgcagttgactaaagaatttaagaggtaacaatagaagtgcactaattctagaggtagacacatgctaacttatctcttctaagaattatttacttgtatgcttgtcatttgtgcaccttgacatttgttgaaatgcagatatgtatgcttatccttaaatcctttttctttaattagtttattctaaagaaaagatccttttctgcagatatgggccgggttttgcatcagtaggtgctcagaaatattttaagaaagtgaagaatgctcaagaggctcatgaagccattagacctactgatatttcaagattgccatgtaagtatatacattatagggtgcttactatctgtttatttttttcttgatcgatttccttcgcttaaattgttttatatcaacttgtagcaacacttcgaggaacacttgatgaaaattccttgaagctgtatactcttatctggtgccgaacgatggcatgtcaaatggaacctgctaccattaagcaggttggctcaagaatctccttactattacttctatatgtggaaagtaaaatatagctattctagtttgaaaatgcctcaagagctgtagtgacctaggcaattttatcattcttgtagataactttattttttttgtttgtttgttgttcctcctgtcaagtagtgtgtgtaaaaattaacgatctgttgggtgatttttttttttgaaaccagatacaacttgatattggaaatgctgatgagctcattattttccgatctgcaacctcaaaggttgattttcttggatatcaagcagttttcaaggtaccagtagtcattttcttctcttgcctgtttcatatgtgcctctttgtccttaccagatgtaatcatgctcatcaccattctttcctgtatttttttgaagttactgacgctgtgtgttttttttttccatgttctaaaaaataaacctaaaccatgatatgttaatttgaccaattcgactttgtttcacaccacttgtattctgttataaccttttaaatagaaacttgagagaaaacaggccaaaacaagaataaaaattaacgtacgggtgtataaaatacacactcatcgtcatcctttattggtaatttgaggatattaattagaaaattttacatgttcaaattgacgaaaattattctttttatcgaggggttatatagttgagagctaggagaggcatttggcatttttttttccctgaattgaattgcttgtgttggtagtgttcagttgcaattatccacgacggattctgtaatttgttgatctgttttattttaggacatggaagctgcagaagccagatataaagaaaatgaaggaattgatcacagtgaaatatttgcaactcttgattcattgaaggtaacaagatcagttacttttccagtacattttgtcatgtttcctatttttaagtgatcccatatactagggataggcaattttgatgttactaagaaggtaaattaccattggtttctaaattaatcctcagtgtgcttagtttaaattagtgtttcaatgcatgaatttgctaaagcttctaatttttctttttttgtagtctggagatccattatatttgcttgcagtggagctcaagcagcatcatacccagcctcctttgcgctactccgaggggtcactggttggaatttgtagtatttccttttactattagcattatggatgctggctatatattttggaaacaggaagttggacattatatagataacagaacatttgtactttccattcatcacagcttcttttgttgcaatttccagattaagaaaatggaggagcttgggataggaaggccttcaacttatgcatctactttgaaagttttacaggtaatgatgatctggaagtaattgaaactttaatcgttagtttctcttgtggatttgaattcattttggaattatgtggtacttgtgtatgcggaagtaaaacatgcattcattgacaaagcttgatttaacaatggacttttgtttaattttgtcttgttggctaatccaagctcaatcttaatgaagtttatgacaagcactcaccaataggttaattggggaagtgatagaataaaggtagtatagaagtacatgggtaattgtagtaatgggcagcagaagctctatgagagtatattatatctatatatatattttgtatgagggctgctttagggagactttcaggctggggtgtttagtttacagattggtttgattcggatttttttttctttcgaatgaaactagtatatcagttttttgaatatagaaaacaaaataacattccaaaatttaacatagagtaacaaagttttccactagaacaattagtgattaatgagtgactaaaggtctagagcacaagtttgaatttaagtatgccattagttgcataacctttcctggcgaaaataccagttttagtgatggtgtacatatcagctcgagtagtttgagtgaacccaatcttattaagcaaaaaactagaaactagattttttctcatttcaagattatgcaatacatatttcagtaacaaggtcgttcctgaggtaatcttaagttctagcaacaatagtggtgtgactcccccaacaacactttcttatcattcgcaacattgtatgtttgagcatagcacgatcatagcaaacatgacttgaagcattagtgtctacccaccactcatccaatccaccaacaagattgatctcaaaaatcatccgtaaaaggttctttagtcaggttagcctgcgaagtagacctggcttgtgttcttatacttgcgtgtcgtatgacgtggtttgttacaattgtaatgcaaaaactagccaggatcattctgtttggttgtggctgccgcgttccatgttggttccttgtgttgttccaattctaattattattttgaggagtgtggttgttgttgtggttgagattcaaattcgatttgcggttccaattcttaacgtttttactattaggctttagaactgcaggagtgtacttattggtgttgttgtttgaagcagcaaacacctcctcttctagtcttgttttcgtgcctcctaggtgccaaggcaggtgatcagactttctaaggaatattccttaagtcttatgcctgagaacattcttaaaatctttccagggagggggtagcttttcagttattacagataaaatatgataaataggaagctagaacaaaaaaatatgctgtcagtcaatatctgaaattccaaatgattgttgacaaatgtgtggaggcctagtatcacgagctgcaacaacaattttaagacatttcattgctctgtttgagatgagcaagacaatctatgaactatgtcgtcctcatgataaaacaagctagttccctttttccgtatccttttgcaccaaaggaaactattcacttaccccaaatataattgctcagaaaaaatgattagaaagagtgtttgatttgaaatgattagaattgggacgttttatcttgaggatggcgtggttgatagattgtctttacgcatctcaggcaaagccgaaaaatgttttaaaattgttgttgtagctcgtgagaactgactatcacagattagttatttggaattttagatattgactaacaacatatttctttgttctagccttctctgtatcatatttcttctgtaatgattgaaaagctatccccttcttggaaagattttaagaaggttttcaggcacaagactgagaattttttttagaaagtttgatcatccgccttcacaatgaggaggaggcacaaaaacaagagtagaaagaagaggtgatcattgcaaccccaaaaagtcgactcttgttgttctgaagcgtaatggcaaaaactttaagaatcagaactgcaattcaagttcgaatcccaaccgcaacaacaatcacactcgaaataataattagaattagaaccacacaaggaatcaacatggaaggcagtagccacatctcaaacaaaatgatccacgacaggttatgtgttacagttgtaacagactaggtcatgcatgcaagtgtaagaacaagcgaagctctgcttcgcaagctaacctagctgaagagccttttacaattatgatttctaagatcaaccttgttggtggataaaatgggtggtgggtatacattggcacttcacgtcgtgtttgctatgatcgtgttatgttcaaaacatacaatgttgctcatattaaagaaagtgttgttggaagaccacaccactactgttgttgggattggaaatgtggaacttaagtttacctcatgaaagactttgttattgaaatatgttatgcatactcctgagatgggaaaaattacgtttctagttttttgcttaataagactgggtttactcaaactattagggttaatgtgtacaccgtcactaatgatggtatttttgttgggaagggttatgtaattgatgacatgcttaaattcaattgtcatcatacctgcttaggtgttttttctatatctaacttccattggattaagatttggaaaagtcaaatgcctttgaaggtgatggtttccgctcgacttttgtgtttggaaaactagatgttcattcatctcttttaaaaaaggagaccatactttgcgctgtctttaaggtggagtgtcaattgtaagaagagtggataaggcagtactcttctttgttaactgctctttttctccgagtttgtggtatagacttctcaaggaacttcaactttcaccgatgcatcccatacataagtacaggattggggtggtggctacttggtgggcaatatgattagaaagtaatatatctttgggaggaggtctgtcaaagtcatgtgacctctctgtctctttttcgagagtaccttcaaaggaattgaaggtgatgcagttcagctgtgggacagaattaaacactgagtggtaatatggctgtttaatgctagggagttttctgatttaagtatacattggcatccctttatgtgtgtcttttattgtttccagtaggatctttttcctacttttgcttgcattttacctttcattacatgttgaagttttgttttaaacaaaaaattatattaaacaacaattatgaaatctgcttaatttctattcctccctcaattactgtttgtttctacctattgttttggctattgaattaatgatccctatttgggtctatcagtttattcttttgctggagtgggcttcttaattgatctgacaacacacatttttatttctttgcccccattttgctcatttgtaaagctgaatattagctttgttcataagcttccctcatgttaactttgttcataagatcataacctttttctttagtgatacagaagtttgacttcttatttaatggcggtaccaggataggaactatgtgaaagtgaaaaaccgtattctacatccagaatttcgaggtcgcatggtatgttttgcatgtttttttatctactgctctatcaatcatcttttaaggagtgaaacccagaaatttgcgaaaacactacaaacgtttgttaccgtgatatgtttttggacaatcatgtctaatgatgtgatatacaggctgttgattttgtttttaaacaaagtaaaatttaaagtattgttatttcaatttctaacgaaaagtagtggattttcttcatataatatgtaaacaagtcttatgtgctagttcactattctcttgatatcttttgtcatcagctctctcagttgcttaatgttacatttttttatgttaccatagtttaatctttcaatttgaagtgtagactctttttctattttttttatctgtggtatattttatttttaggtttcagcatttcttagtcaccatttttctgaggttactgactacagttttactgctgatatggagactgaggtacttctcctgttatgagctcacaatttttttgcttttggagtacttttggctacatgatgatgatcttctgcataacctcacttatcattattgtgaacttgttattgaagattttagactgaaataatcttctcttatttcggactgaatgaagagacatataaaagttaaataggttaaataggagcagaaaagcaattatttagtatttcttcgagttttctctgtataacttaggaaataaggatgctaaagtttcctccccgacccaaatgtgttctcaaaatcttatgttctctctctttttcctttgtctattttgaaagtgatcaacttgagatatactcataacatgaggccatgccttcccaccggcttctataagtcttattgcgctatccattttagtataccacaaagaattcttttccatagggaacctcactatttcacgagtaacgatttgtttctcgacaataactttccaatggccatgcttccactcttgggataacacactttttcccaagcaaatccagtactatataattatcttttggagaaaaccgtactgagtttgaagagagcaagctaatcatctatcttatgtggttagtcatttgttgtcttttgcttcagcttgataatgtttcagctggtttaactgaatggaaaggtctcttgggagactattggacacgattcagctcttattgtgaaagcacagctaaggttcatatccatcaggtatttttatattttcttaattgttaactgttagtatattttcttatggatttcctgcaacacatttactggtttaaatttttcaggtggagaagatgttggagaagaaatttggggattttttgttcgcttctttactagacaatagcaagacttgtccaaggtatgattggaatcttaccagtagaaaatggttttaaattgctgttatatcttgatccaaggaatgtgtatgtagaaactggcaataaaattatcatttacatgctcactttgcatcaacaatgtctttcattggacattgatagctacaatgggattccagcacctttttccattgatgctgcctattccatatgagattctaaaactgaatgatcattgcttggctaaccaattccatggaagcttagattggtcacatttatcttttttattctacgaccaaagacgtatgggaaaccgctcaagattctctagacttgatgaggtatgtcgtcaaatctttggcaagaaacctttgcctgatagcatttgtagaagtatgacgcgaagaaagtcacaagagagtgaagaaagcacataagttgaccattctactttggtgtacgccggcctgaaacctttgatgagcatcatctcgttgagaatggccctgggtgatcattgcaaggaggggtttgtacaaaggaaacatgtttgagattatggcgaggcaactgcctagaagctcaaacccaaaagaaggttgtgccaatttgagggcacaattttttacttctatattttgagctaacttcatagtcctttatccctttttcagcccaagtacttaatttcggcccctgtgtcttccttaagtccattgtgagaaatgaaatgaaattgagataagttatttatgcttaacttttcatatcagattacacacttattcataagccattctacctagatttaaggaacctaactagtcacctctttagaataagaaaatacaaattataactatacataaccaagacatctgtatctcttttaagagatatttttttcaatattccaacaaatgtgcattcctacacttgattctacgtgttatctaacaaagaagcaagagtctcaaattgccgatcgagtgtaatctttagcagtgcccttcttgcttcatagacatgaattcctcatacatgatggcttttcggtaactactatatgatttgtgaccttagttcgtcctcttaatcatttctcatagtactgcaaacgagcacgttcccatccaagcttatgatcattgtctccaacttctcatttatcaagcagtgaacagcaaaaaatactgtttttccttcaaaatccacccttcagatttcttgtcatcgttgtaggaaagctttcatgtttctgcgtgccccgtgaagctccaacaccttgccagtcaactcgtctggtaatgcctttttcgttgttaacaaagacactacttcttagtgtagcttaaggtcatgatttcttgctttccagaagcaaacaaactgatctatcgtgctcaccaaggcttgcaatacttttctccatagtcggtaacttctaaatttcatccttcaaaccaaatataatcttggaccaagtccaaaaaatcctccatgatatccaccttagccttcataggccatgttttgttcctatagatggtgctattggtacacattagtaagcatgataattagggaataagagggtggctttattctaatagagaaccacacaaacacctctaggaaatccgagaaacctgcttttgatactagagctaatgctcaatacaaataagattggacatgcaccaactcttacacatcctatttcctgaaattcttcacccttagagattgcctcagcctagcataggtgtgctgtactggaggtctattagatgcttatttattattatttaaaaaagaaaattaattagtctatttcatggctttgtttctcagctgtattgagggctcgttggctttcaaagtgagtcggtttggtgcaggatacttcattggctgcgatcaacacccaaaatgcaagtaagtttggaccattttgtactgtcttatactaagtagtttctgctcctttgtgtgcataggtttgggggcatgtactcaacggtcagacgaagcaagtagttatttatagaatttaattagttaagcaatttaatattttaattattccaataaactcttggagtaaggtacattgctaagacattatattgtcaagacgacgacgaagaggaaaaatctcaaagcaacttcattatagaagagccaaagttgttaggacttgatccaacttcccaagaaaaggtaaaattctaatatctatatcaggaaatatatagtctttgcctgaatatgttaatgcatgagttgacataacacaatctttctgcagattcttttgaagaccggtccttacggattttatgtacagcttggtgaagataggaaaggcttctcgccgaaaagagcttccctttcccatgtatgttaaatagtgtcttacctggaatttctatgtatttgatttgattctggcttaataccctttttcagattaaggatgttcaatctgttaaagttgaatatgctctcgagttgcttcgctatccagtgacactggttagtttttcgttctcctaagcatggtggtcctgttttatgtttagtgtctctgtgcatctttaaattttcttattctcaaactagggctcccatccagacgatgaacaaccggtgaagttaaaattaacaaaggatggaccagttgttcatcataaaagcagttacgttacagttcctaaggtatatttccattcattagttttctcttgaattgcatttcttcttacattttctaagctttttataccgagttggatgtgttggcggtgacatgagatacatgtgcagaatgtgaaactaaacgaagtcgacttagagaaagcattgaagtatttaaaaggtaaacaagtaagacatattggtcgtcctcggaagaccaaaccgaaggtcgaagcaaccgttgaggcgctctagtcattgtggtgagttgcatagggaggaaagcaaagcacaagcttttctaatacttatgactaattatttccacaaatgcagtggtgggactaagcttgtaaggctacttattttttgttgttgttgttggttgtgagtttactattctatacgagggaaataaattgctttagatgcttgacattctttttcacagctagaagaggtatagaacagaacaattcatttttaagtttatagatttatttatttatatatctttttgtccatgtggtttatttattaaggaaattacattatatattcactttactttacatattttaatttttacctttattttcatgttctttaagatacgcccacttttatagatgatgtcattatttaccttaagttaatgtaatttatgtgctaaacttgagtagaagatgatagtatatttggcaacctattcacaaaagtgggtatatttcaatgaaatataatataaaggtatttttgattaattgatacaaaaaagaaatattatccctaaataatgtattaatattttgtgaagtttcatgttgatgtaatagcactcctagtctttctctaggagaatattcaaatttatcaaataatttttacatttttttttttgtatttttgcagaaattcacatagcatttaacagaacaatttaaatcgcaattaaaacttatataacagtccacataaaaattaacggagcaacccaattta

SEQ ID NO: 15369 - DNA, 4125 bp, Cannabis sativa
caagagtacaatataaaaaaaaaagtattttctgtaaataaaattaaaaaaatcataaaaatatttaaaattctatgaaactgtatttttataattttttggttgattttgtgcatttatgaaataatcccaattttttatttgaggcccagattggctgagtttgggcctttctatagggctggtctcattggataacaaagggactttcgcctgaagatccgaggaaatcatcgttttccattccattgtttctctagggctcactccgatcaggctcctactcccatttccctctctctttctcttgctacaccacgcaacaatgctctctggggatatacctcctaaccaaacaatataccttaagaatctcaatgagaagatcaagaaagaaggtattattttcttctaaccctttctttgtttgcatacccgagaaattttcttcaatctatacgtcttccactattcgaagctcagcagtgtttttcttctgggtcgtgtaatgaaatgtagcgctagctataaggttggggctataggggttttggttgtctaagtgtataataagtgtttattcttgttttagtgtcattacattattgtttatgtaagttgattatcttagctgtctgataaagggtgtgttcaattcgaagcaatgttaatggaactctaggaacaatgaaaataattgtgttattcactttttgaagaacttgctcgggacctttttcaagagtgtctttgggcgtaggggttaggattcatgtattggaagttgaaactctaattatagattaccggggaatttgggttcttgctgaaggagtagaatatgtcataggaaaggttaaatttgagaaattagcatctgttatgtttattacttttataacagacacttattctgttataaataaggtgaaagctttatgggcttgtttatattctttatgataagcttatggtgtttcgaattgtgtgacattgcacaacatttacttcttcttttttccattgcttgcttaattattgccaccattaccttctcttttgcagaacttaagagatccctttatgcgttattctctcaatatggaagaattttggacgttgttgccttgaagacaccaagactacgaggacaagcttggattgcgtttagtgaagtgccagctgcaagtaatgcagtgcggcagatgcagaactttccattttatgataaacccatagtaagtagtattcataatatatgctggcctacctttgtttattattatatgttgtgtacatgattgtatggggtctatggtgtatgttgtatattaatgtcatcatcatactgttttgcatcagattctacctaccttgtgtgccttatgtacgttgtttatattgaaataaaagtaagcacatatatgcgagcttattcccgctgagagtggaaaatgtttttgggaaagcttttgttgtggttgaagttgagacgtgagggtttttcaatgcacacagagtgttatatagtcagtgataggcatcccatatatttcacatagacacaggggaagaggaattagtgagagcttgctgcgttctctcactggtgaagggttggtggtgttttagttattgtgttctgattttaacaatgcttagttacaccttcatattgtttggggggtggggggtatgtatagtattgtctaagggagatagggaatttagattggtcatattgtgagatctggctctagggttccaagtagttcatgatacttggaaaactctccctggagctgaagttgacaaaataactcagaaaagttgcctacctcaacaatccctaggtgtaacaaccctcgccaatacagcgaactaactacatctaaatttattaagaaacatgtgaggaggcttcttgaattagttagagctgaaaattatagaaggaaaggagatcagaaagatacatttctactgtagttgtagctgactaggtaatattattttctgccatccatgtgactcttctaagtgggaattacagtatggggtttgattccaactgttgtctcccttctgtcatgtagtgtttggaaatctataaatcaaaactaatctttgtaaatgataattttgttatatctctcgataatatttcctaaataaacttactgtgatttggttcagcgaattcaatatgcaaagacaaagtcagattgtattgctaaagcagatggaagttttgttcctagagataagaaaaagaagcaagaagaaaaaggtgacaagtctttttatggattatgatatgatcgaatatactatattgatatcaatattataaatttccagattttatttagcaaatgtaaatacatgttttccagctgaaaggaagcgacgcccagatgatgcaccaccatctgctgcagcaaatggaacaagagctgaaaatggagccacaccagtatgtttcaccaatatttatcttatgtttagtatattttaataagaatttatggctcagaatgctaatttgtgtacctgtttctttgtcttatgtataggctccattccgccaaggaaatacaagtgcacaagaagctgcagctccaaataatatcctgttcatagagaatttgccccatgaaaccactagtatgatgctggaactgctcttccaacaatacccaggatttagggaagttcgaataattgaagcaaagccaggtattgcctttgtagaatttgaagatgatgttcagtcatccatggctatgcaagcacttcaagggttcaaaattactccacagaacccaatggccattacctttgcaaagaagtaactgcctttttttccattttatgtgagtgagtccatttttcaggaagataaaaatagttgaagtattttactaatgctgtagtcatgtagatcttctagaaatttcactaaaaccttatccaatgaaagtgggaaaccaataggatgcaaagaggaaatgaaagaatgctatgttgtggtttaaaaggttaaaaatgtagcaacggtgtagtatattcgttttatctggttaacagattgtttaaactgtcccaagtaatattttttttctcattacatatttgtgttagtttctttactatgtgactggattgaagcacattttggtggctgataaagatcatttcctattatgtttcataattctctgggcaaattactatgttatgtaattgtacttccacataaggtagggaagggacacctattgttcaccatggggaagaaaagaaaagtgggtgaaaatcacgtgttattagttaatgcacttttcagtacaaaatctcctgtgtttattatgagaaaaaaatgtgaatatgttccaaaatatgtgatgaatatcggattaaatgtaataattggcaaagtaaatgccattcgattagaaagaccaagaatttagagcaaaccaatcccacttctgttagcttctccacttgttttctttcttggttgctatttgatttaatttgaagtttaatattcgattttgaggttgattacaactattgatattcaacgatagcactttaatataaagttggttggtttccgtggacttagaaacatttataataaacttttgattccaaattataaataaatatatgcgtagtagtaccttcggaaagaacgtacaaacaaaacagttgtttacatcgatgtaatgaccaacttccatttgaccaataaaaaaacccattacccatttatgtatggttattttatgctagtacgacgtagtatgtatcctattctcgtcacaacattggctccaccactacacattaaactcttatccgtacacccacccacaacctttcgtttcgacaagtagacttttgacttaaaaaagaaaaactaacaaccaattagaaaccaaaccaacctttcaatgtcatattgctattaggacctgtttaaaacttaaaattgaaccagaaaagattagattgaattagactagactgtataaagttaaattatgctaatagactggactattttatttatttcattttaaaaaatttaaattaaaataaaatatataa

SEQ ID NO: 15370 - DNA, 6764 bp, Cannabis sativa
tatcagaatcagaaatcatagcagccgcaaatgcagctggaccacttcgctccagtacatacaacaaggatgcaggaagaaggccacccaaaacactgcgcttagccagcggcaatgaagatgacactgcagcttcctcaccaccgtgaaatgcttgatggacatgagttaccgagaagagttgggcaattgaaaggagattagatccaggataagccaaggcaaaataaaatgcacctgtgctgtagaggcgaatcatcgccttgggatttctagtaacaacagccttcaacaacgcagcagcaccttccacaatgcttggttcaccagaaagcatagcctgaaattattttgacattaaggttaaaaaagtaaggttggtcacataacatgacttcatgctaaagcataaactataatggaaagaacccggcgttcccacacatttaatacaatgtattcccttctgacttggatatctacacatttataaagctgtaaaaaatttgaacaggaattctgctctgagtcacctgtgcaatatgtggaaggcatcgtggacttgacaacattcgttttactctaggagttggggtaactatctctcctgcatcatctaaatctgaatgagcggataccatgctatgtaatatggacaatgctgcctcccccacctgaatttaaaatcaagatgttgtgttatatacatcattaaatgtactaactaggaaacaaagtgaaaagaatggtgcagtcccgtggataaaatggaaagtaacattgaattttgaaaaagtgcaagcatttacaactcatcatcgaggtatttaaactagagagaaaaaaaacattattaaaagattttaagaagctctaaaactaaatgctctttggcattgcagcacaaaaaataatcaaacataatagtaaattgtactagtttttttatctgacagttcagtatgaatagcaaaacactaacttaagtcctgcccaggcttaataatggaatgaactaacacaatcattgaaaataaaaaaactgcagtccaaaacaagtatctaagaaattttacacaagataaacgcaacaagtttgagggcatgaacattagtccccaagtttcaaataacaatacctgagttggagtgagaacaggaactcgagcagataatgcccagcgtagttcacgaatatccctcaatcttttccagtctaccatccctgaagcccagcatcgtgttgtccaatcaatttccttcttcgaccaaaatcttcttatagcatccttctccacaggtccaacttctgctccatccttgtcaacaaacatccattcctttagtggttccatgaatgcagtagcagcaatcagatttgattgcaaaggaatggcagtcctttctgcagcttcatgggccactgtcagcagatcaacagctaatacacaccctccaaccagaacacatacctcaacatttgataaaaccttcattaaagcctgcacaagcagtagtatgaagagtgattatcgtcaatgcttaaacagtagatacaaatttagattctgcaaatacccgccaagtctgtagatatgattttgactgaccctggtttaaatgcaaactttcctataaagattcaaaaaaccatgtctggaaattggccattctataaaacagttcccaaagcaagccttattggaaaaagtcttcaaatatctttttagttcaattaaacaaaatggttacaatgactccactgttgttaatacaataacaagcaagccatcaaacatagacaaaggaataaattaagaaaaatggctatatttaatctaaacagaataagtacaatctcagacgtcggaactaatattcaatacacagaagacaatgatagtactcttgaagtttttgcaaaacaaatatcagcatgctcaactagaccattctgaatcaaagagaagaattaaagaaataatagggaaataaggatctacttttaccttcaagagaagaagaaggcggtgcctcaacgctctatcatctgttcgatccagtagaactgtaatatgagcagagccctcaaaggaaccaattaatttgtagtgttgttcatatacaattgccattgcccttgcacaaagttctctaacagaggaccctcctcctcctccaaagccatctaatctccccatatcacaccaatcatcagatgcacccagttcatcaggaacagcaccatcaactgtaagccctatgtccgcatcacataaaaacctatgatacagtgctctaaagaaaacaaccggatcacgtaaaggaaaatcctgagccctgccaccactgccactctcaagcagcaaacgcagataatattggccaacacaaacttctctagacaaactaggatagctaacattaaattcagggtagttccaagaaatttgggccacactttcttgcccaggattattctcaatcgtagcacctcgaggaacaatatcttctgtgcgttctttctcaacatctaatttatgaacctccgcctgcagagcctccctcaattcttgcctcgtacgctcattccatatcaaatcggcacgattatggtcaaggctaaaagctctccaaaattcaggccaattacacagtagtctgccagaacccactggagtattctctacaacaacctgtgcaggagctgggaggcctgtattctgaaaaccagcaatattggcatcagaatcaattgaaattgaagtatttacttcagaagtatcatgtgaatccataggtggaacactagccgaatgttcattttgtaaaacccctgtagaaggcatttcactgctcagattttcactggtttgagcaacagaaggttggatggttgaagactgaccaaaactaggatctatagttgatttttgatagtaatctgaacctttaatggcagaagtgcttgtctgctttgttggatcactaacttcataattgtttgcagaagataatgaatgctcttgagatgttattcctctacctacacgacctttcctttgttggagtagtcgcctctgtcttctactagtcaaggatccatcttgagaaccttcttctgatgggattccatcagaacgtgtatgtagataagcaacaagtccaggaggaagcactctagacaatagttccagagcaggttcataggagtctgcccaaagagcaacaagttgtcggctaacctcacgccgctcaccaacagggagaaaaaatgcatgcaataaatgtcgtagcaaagcaccatcacgcaatgcagcatcacgcatcgactctgccgcaatagcgtcttcttctgcaattgtacgcataaccacagctacagtttctctgacactttcagcaggatgtccaaacaatgcaaacaagcgacgttttaaaccagctacttggcgtagcaattcaacaaacaccgtgtattgagtagtttcaccatgaggatcacatatcattgcctcgagaacttcaacgattgccatcgagagtaaaggagatacagacattggctttaatctgttcacaagaatgataacatagccttgttgagcaaataacactgactttgtgtgcatgattgtggcatgttgctcccctttcgagtctgttagcaaatttgtaattgtatccccaggaccaccgccaataagtacagcaacaagcccagcagcttcagcagccacaccctcagagccatttcgaagtaagcccattattctcccaacagcagcaggaaaagacattacatgtgaagctgcactctttgaagctagtaatctacgtaaacatgcaatgaagcccattactgttgcggcagctttaggtgaaggtggaggcaatggaggggattcaggaggaagatttggtgtagatgggagcatagttatcaaggccatcaatgtcacctcaggaacttcaatatttggaggaacaccagtatatggtatacacgcattaaactccctaattcttcgccatagtttagctcttgatccaggaatagaaccactttcagaaactgcatcttttgcagctgctgctaggtgtttcaaatgcatatttgcaccctccgtatcagcaccaaggatttgctttccaaattgtaagaaaactctaccacaaggaggatcaacacgatgaccaggcattgtcaatctcggtaacactggcactgcacattgcccctgcacaaaaaataaaccaaggtcaaccacgccactaacatatgcattgcataataataataataataataataataggaaagttattaaagaaaatatccatgtcatttgtttataattgtaagcaacattaatctcgcaggtgaaaaacccatcaatatccaagagagaacacatctacctacttctgtttgcaacaaatccaatactgctgcaagtaagttatcacgtgatgtgcttgcataaacctacaaataaatgtcacagatatcagaaactttccaccccaaaaaccagcagttgcataataaaatgaataaatgcttacatggatgggacacccatcacagaattcaatagcaaacatttggggctcctcagcgaatcgaacgagggaacttactgtagataaaggtcgaactataacagcctgcacacatctagtgacaattttcaacatttgatataactcgagaagtatacaaagcatcatttctaagattgttatatattgaattgccccttcatatgttcaaggctaccacacaagtgggaaaatatgttatttcattcagcaaatatatatatatgaaaggtgaaaattttataaataacataggttgtgctttaagtttaatgcatgtaaatacattcaaaaatcataaaattaaaaggcaacagtgaaccaactgaggttaattagtaaactggctatgaacaagataagttgccagatcatacatctattttgaccgtcagtaagcagcatctatacatcacacacacaaacacacaggtacatacataattatgtatgcctttgataatgtaccatgcacccactagtaggaaacttgtgtgacaagattagaaatactaataatccgtggtgattattggatgacaaccacaaccacaaaagcatttaaatacaaaaaaattatccaccattttaaattgtgaacaatgcttaacatctacttaaaaattcaaatctatgaagctaaaacttaaaccaaaaaagtctaccttaaatagacccaatttaagttaaatgctttaagaaataaaagaagtgtgcccaatgcaggagtattgtgcttaatgtgacctaaaagtatgtaatataaatatatattaataattttttttttttaaattgtgaacaatgctcaatttctacttcaaaattcaaatctctggagctaaaacttaaccataaaagtccaccttaaatagacccaatttacgttaaatgctttaagaaagaaaagaaatgtgccaaaaaaaaaaaagaaaagaagaatgcctaatgcaggagtattgtgcttaatgtgacctaaaagcatgtaatatgtatatatatacatatacataaatatataatgaattattggtctggcagttccactgggagacctcccaatggccccaaggttttcgagtctgtggggattcgaacctatgaacaaatgcctacaagcactttccaacactctccttaccactaaaccaccccttggggttacctaaaagcatgtaatataagcttaaataaagtcctaagcttacttcatagttctctggacgcctttcgacaagcgaaagttttgtcagaataagttgacgtgatacagcatcaccatgctcaccaagaccaccttttggaccaacacctaagctcaatccagaaacatttagagtaccatgggcagcagacctcaaccttgtcacagaccagcctccatatggagtttcttctgccccaactgcctccttagctgcatttaccattaaacaaaaaaggcacaattaagtggaatacaaaggaagacgaatgtagataaacagagcaaataattttaaaacaaatttaccccttcgctttatatactctgctgctgttaaagattgagtagtgtccgcagatattggcaaaccaaccatggattttgctgttttagtctgcataatacatgctctatgtcagtattagttcaataggcttactcaaacaaccagctaagaagatgttctgtcaacagtaattgtatggactaaaaagataccttattgcaaatggtaactcaagattcaaaatcatttttacacggcgacttaaatgtattggccatggcaaacttagtgataataacataacttatataccaaataaagaaccgatatatcatccttaccagacttgcaatgatagcagaatttgtggtcccagaagccgctttaaaggctttagattttctaccatataaagggcaaagaacaaaaccaccctgctcactatttttgtttccatatgcatcagaaagaacaataatggcaggagaatccatgtctctgaaatccaagcaccatcgaaggtctccagattttaagtcataaagttcgaccccaacataagtaattttcaatttctgcacaaatgacagatattagattgaataaatacagtcatccaatgggaatataggcctagcgctccagctagtgatataaaattgtaga

SEQ ID NO: 15371 - DNA, 7437 bp, Cannabis sativa
taatgtagaaaacaactaaggaaagtaacagaaaataagccttttattttggatgaaagctggattttgacgatgaaagattaaaaatggaaaaataaaatagaatgtgatgaaaaaaaattgtttttttaagtttgatatgaaaaaatattgttaaattgaatgtattttatataatttttctttccataccaaatataaaaatttactatttttatttcccgcttttatttttcttacattttaccaacctttttctttcctcaaaatactagtgataatatttatttgacttgtttgtttccctttcatgactgatattatcatgtcatgactcgtgagtatcctggtaattgaataataaatcaatcactaataaaataacaattagtaaaacgaatgagccttgaaaatttagttaatactaattatctatgcatttaatgaataaacaataaagatcagaataaaaacatactaaatcaaataaaaaacaaaacatataatgggtaaagtcgttaagaccaaattgattcataatcaatttcaaaagttaaaactgtggtaaccctttacatttgcagagcatatatatatttaccactgctgctaatatcatcatcaagcaaacgatatccaaaaaaagatttcacctgagaccccttaaacttttcaccaaaatgaactcttatcaagtaaattccatcagaaaaaactaaccccattctccaaccaccaaagtccaaaccgaaccaaaaaagagttagaacaagcttataagagatctaatttctaaacgtagaacataacatctttcacattatctttaatcatcgggagagggcggaatgttttaggaccagctctaccaccacttgatgacgatgcagactcggaataatctccttcaatgtaataccgagcgcgaaatgctgccaagtgagcataatatgctggaggaactgcaatcacaaagaatcaacaattactacataacagtgatgaaaataatgaaagggtaagaagtgtcaaagacacagctcagctcttaccgatggacactgctttggtacatcttgcatacctggaaaaccaaaattcgggttgttaagaaaaaataaacttgaaaaaacgaagaacggaaaatgaaatggagaacaaggaaaaaggaatatttacgtgtaacagagattgttcgtgagaacttgcagggcatcggcagtgaatttgttttcatcgtacaagacatggtaatgagaaggacgactagttccctgaaaaagtatacataagaatgagcaaccattaatattttttctatgttaaaaaaataagacaattagatttctaaatgataataaaatttggacctgaattccagcatgactattgaggtagaaatcgaattcagttggatgacatatttgggtgtcaacaacagtgcctataacaaataataaaatcaattggatttccctggtaatttttagtcatattgatgtattggtacgctatgtattaaggaaaaaactaaacctggttggatgttgccactcctgtccattgaatcacgattgttgtaatcagctgggaaaaggcgagtgtgatgccttttctgaacaacaacaaacgtaactcgaggaagatatccttcctcgagcgaagaacatgcctgtacatgaatgaacaaactataatcagtataagtcacagacatgttatagggctcgatcatttgatgataagagtaataaatacctttcttatggcatccatctcgtaaagcagaacctgactgaactgcccttcactaacaccatctctgccaaagagcacaaaacacagtcaattaaagcaaagtaatgaaaaattaaatttttactgaggtaaataaataacctgtagaatataatcctagctggtttgactccagttgctcttctgaaagaaatcaagtgttccctgtttgaggaagaaaaaaaaattatttagtaaaatatacaataggagagtctcaaaagttcaataaatgtaaacatggttactctcaccttatcattcctccatgttttttatcaccagtagtttctttataaaggtcttggatgatctcttcacggtgctgctgtgcagagaccaaggctctatatttggacacctcaggccaatccattgaagcaacaacctgattcaagtaaaagcaattgagatgttatctctcgcagaaaaaatagagcaaaaagactattaattagtaattacttacagctgctatggaagggctagaatcctctccaggttgtggatgtgttacatcagcaccgaagattatggttgggacatcagacacaaaaggaattttcctgtttagagcatcacttaacacggtattccggccaccaacctatacaaaacagatataaaaataaacaacacagtagcaccaactagaacaaataatgaatcgatatcgaattcaggtaaatgaaccttatggttaattttcaaggaaagattctccaaatactgtttattgagctttacagcctgtttaggttgacagcactgtgaaacaattccaagctcagtttcacatattcgtttaatcgtccctgaaaaagacaaacaaggtttatttagcaaacagaaaattccaaacttcatatttacaagtcttggtcatgttgctcaccatatgtgccagtaaaatcaggcaagataacaatcaacagctgcaattgtttgtttgccttcttacattgttcgtgaacagatctcaaagcgttctcaatttgatttgcaggccaagcagagcagggaattactggtctggtttgaaacaccttcaaggtatccaacatgataaaatgtcattcataaaaaatcaattatgcaatttcacaataaaagaaatgagacaaaaacatccagcagcaatcataccatcccacgactgaggcacatattgaccaattctggacaaaatcggttgtgtatatccgcattgtaccgcgagaagttcacacatgtccaattatctactcggcctccattgatcattttctgtaattacccaaaacaaaaaataaagagatgaatcataaacctcttcacaaacatcataacaaaaagcaaaaaggaaaaccattaatacatataaagatatatcatttactttgttgatcatgttccattgcccaaaacggggttgttcactagcatccctcccagtaccatggtaaagaagcttcacacattaaacaagttagttccatacattaaaaaaaaaaataataaaataaagaagttcaaattgaatgtgtaaaatctaaattgaaaataccaatggtggagtcaaaactcgagcttgaactgaagtcatatcattggcaacattgataccaaagtcctgaacaatctcctgcttgctgaaattgttttgctgaacagtttgtcgaatgcttccttccctatcaattggtctttgacaagttgcccttaacagattggttacttgcctttcgttaagtttcttggagtatctttgcccctcaacaatggtacaaatctataaaatacaccacatttagaaatataacaataaaaatacttgttatccataagatctttagaagacaaaagcacaatgttattaaaactatcaaaggaacctccattggcaagtagataggcttggtagcactccctgcttgcagagcaggccatgtcacatatttcagtctgattttgtacttctgttgaaaataagtggcaaccgaaatctgctttggctgatcatcaagagtaaacctaaaatgcagagaatagtttaaatcaaacaatgaaaaaccaaatgacaacacgacacagcaaatacaagaatagaatagtaagatcatgacatataagcatactcacatcaaattgttcagaggctcattcgataccccagtaatcttataagtccttgtgttctgtaaatgactacaagctactttgatccctctcaaattctttttcaactgtagcattgaatgaagaaatatattaatgaaaaaaacgctcaataatctaaatcaactgagaaactataaacaactaaatacctgaactcggacttgatcctgcaatggtcgtgagtcgtctctcaagttaaagtgtttgaaaacaaaatcaattacattcaatggttcataaaaagctcttgctgacacatctacaaaacaatttgaatcataaaaagaattgtcaggccaagaacatctacacaaaacagcataaaaactgtaaataagatatgatgcaataccaatattgagtgaaagccccaattgagttggccttaaactttgatagtatcctttccaatacattatcccatctccaagctcacccttaccagggcggcccagtgtgggatgaaaaaaggacctccccacaactgtatacctacagtaacaatatatacacacattcaagccactttagaacaatacatggcacaaaacatacccaaacaaaaataaaggaagactcttacagttcggatggagcccctctgagagcaacatccagagcttgtagagtctcctgaggagcatcaagttgcctgctctgtaaaaactgccggagatgatgtaaatccggcttagaagcaaacttgatcacaaccgtaaactcacgtttcctgcggctacttaaggccaaaacatgaaatcagaaaaataaaaaatacaaacaacacaaaatcaatgaaagttaaaatgaaatatacatatataatacctttttgtagaactggagcctccaggtccagtgtcattgtcagctaactcgattttaaactcttttgaactaaacggcaactctccagcagtgtagatagactttctaccgtcataagcaactctcaggttgcctaagtgagaagcacggtaaagattccctaattggtttataatctctctagttactttcttagatgtaacctcaggagttatagttacctgtaaaatgagtgataagtcaatgcaaacagatgtatatacattgtgatacgaaaacatatattacaatttcaaaaaaaatatgtatatctattaagattgcagaacaaatacataaccgatcacacagagaagatgaacaaagtttacaagatatcaaaaacgtattactaattcaaacatataaatatagacatatattacgattgaagagtccaaatatataaacgataaaacaaaaaagttgaacaaagtcacaaaacaggaaagaaaacttcaaatatgcacaaatatatatatataagcagttacttacatcgtaatggcagagatctctttcagcaaccttgactaagaaatgattagccttaactacacactttctaccaacagtaccataaccaggtctaaccggaaacctaacggatttcgacgacgctggaggaactctcacagtggccgccgccgctggatcctgcaatgtcagtttcttatcaacttcacggctcaacgaagaagcagtagaagaagtcgacgacgatggacctggcaccggcgcgggaattgaaggttgaggaatcggagtagttgaagcataaccaccaccaccactccttcctcctcctcctcctcctcctcctctgccaccaccaccaccaccacttcctccacctctctgaaacgttggagaaggagaagactgatcgggacgatcatcggatcgccgaccaccacccctaccacggcgagacattgcgattttcagatgaaagttagagagagagtagttagagagagagggaaaattgaaaatgaaaatggcatttcttctcagagtctccttttataggaaaaaataaaataaaaaaatcaaattatttatttatttaaattaaaaattggaagtttctttgtgaagtttttttaacgaggaaaaaagtcgaaataactaagctaattctctgactgtgtatatttacaaatatatccctgttattaattttttttactatgtataactaaattgtttgaaattaattattaataataataattaaagtattccgaaatagaaggctaataagggatgatgatgttttagtgggaatcggttcatttctcaaggtgattattcagttacttttctttattctaatacaaattttgggaatgtttacttaaaaagaattaatggtattgatttattagaaatgctaaaagtcacttgtttagtctagtgactttctatttattaatattgttattggtttaaccaagtattaaattttatataatttaatgtaataatatttagagagtattattaaccaatgacaatgttgcataacaataatcttgatttatatataaatttattaaatttaagaaagaaagaaataatgagggctgaaaaaaataaataaaaaggttatttctatgattatgaaatatatttttctttttcttaacttattttttttttaattttaattttatcaattaagatgaaaaaagtatttatgtcctttaaaaatccttaaacaaaaaataattacatgctctaacaattgtagtttgtcaaattaaaacattctgattatctttcccaattatgtaaataaaataatatgattctgtatttctttccaaataatttagtaaacagcattacaaaattattttttttgattattttttattttaaactaatttatttctatcattaattattctgattctacctacaatttacaaacaataataatatttccatcttataattctactatttttaattattttttcataaaataactattactacttaaaaattataaatacatataaacttttaatattttttcataacagatttagttttgtaaaattattcaaatccatagttggatttttaaaaattatttatacatttctaaagaactgtttgacttcataacttaaaaattattttttaattttaaaaaatagaaaataatttttaaaaaataataaggatcctttcgcaaaattttttaaaaatagtttttaaaaaattgagtttgaaaaaaactaaagaaaaaatagaaagcataaagatattgttttcaattttcaatttttttttgtccaatataaaatattttatattttttctcacataaacttggaatcaaacccgaaatcggacccggatcccggaccctaaccccggacttggacctcgacctagaccctggacaccaaaccagaatgctgacacgaacccggaccctgacctcaaacttcgaaccccaacctcgacccagacctggacccaaacttggacactgaaccccaaaccttaactcgaacctcaacctgaacccgaacctgaaccagaccctagaccctgaacaccaactcgaacccggacccgagacttggaccctag

SEQ ID NO: 15372 - DNA, 5176 bp, Cannabis sativa
  modified_base (98)..(102): a, c, t, g, unknown or other
tttgtaatttttgtgttgtttgttgtttgtgttttgtgtattttttttttttaaattatcccaataaaaaatcccccaattattattattattattannnnnattattattattattataatcatcgaatcatcaaactttgtaaaagtcgtactttttgtctagtctattttgcgtctcgtacttaaatttatattttcgtattgtgtcgtgttaatttgtagcatatatcgggttgtgtcatgtccaaattcatatttttcgagtagagtgattctcatactgatttctaatggcttttatttactattactatatttttaccttaagttgagagaatttacaaaaagtgaaaattcttataattgttttggtcaaacttaacaaaaaaaattctttaatggggtggaagcccaagtggaattaataccatattagaatttggaataaaataaatggggtctatctcaaaattaattgacaataagaggagtagctcattcatgttatatatgataatttatttccacacattaatgatgtggaactaattctaatagtatgtttcttttgtctaacacgtatattggttccaagtcccatgttttgtaactgaattgtttaccattttctctgttctaataattaattatacagccaaaatttccattgtgaatttgttccttttgaacataaataatgaatattgtgatacttgtactgataaaaatgaagaaaatcaaaacaaaggacatgtctaacaaacacaacatagtgtcctttattttaagtaaatgtcattagtaggactttcagttttaaattttgtgcttcgctaaactaagtccgttgcctaaatacaacagtacatataataacaaaaggaaaggaaagtacacattgaaattcagtagtcattataacaaggatagcctttcccattggcaatcttgactcaactcttacttgttgatgatgtttctggtttatcctctaagactcaatgcagcaagtggatttgacaagaagtcatcaagatcttcttcatccgaatttcgccacatcattggaaacaccaaattcctatatcaaataagcaaatgaaaaattatgtattttccaagtaccctaaactaattttgaacattttaatgtttgatcacctagaaaatgataagaagtaggcaaaaaagtaaaagcatacagaagttttatgagctaaaatgagttatatatgcatgaaaagaataggtacccctctttctttttgtacttgcatcgatgcattttatcagttgaaaagtttccatatagcatgtcaagctggtttgtaagtttttgtacaccagattggactaagacatcccaaatcttcaaaatctgaacttgatttgaatcttctttaacaagatcaacactccaaacaaggtacatttccttaataatgtaatgctctacaaaatgagatgaagtaaggttgctgtccttgtgctcttgacgccaaccgcatgagagcttcctcaacaaagaaaacatttcattgcagaattctttgtctttaacacttgccatggaactccagaaagaatcattgaagcatacctatattgaaaatatacaatattggtgatgaaaatgaaagtaagctcaaaaaattgaaagggtttataatgatgagcaaaccttccacactgaatctttgaaaagaagtggatcaagatttggtaaaagatggatttggtttgactgaaccaaagcactagtaatagccagagccaagttcttgtcctcatcagcattatgataacacattcgctccttagcatcgatcacaagttttctccaaacagtggagctgttagctagtgttgatccatttcccacaatccaaaggcagtgcctagatcattatcagcaaagctaattaatccacaaaaggcatgtttcaaagttctaacatttactcagtgtttgaaagtgttaccttgcacgagttagcaccacatttgctctttgatgattggagagaaaccccactgatcctttaccattactccgaacagttgagatgattataacatcatcttcaccaccttggaatccatcaacagagcgaacacttacagaaaaatcactttgtgcatctgaactatacttgttcctaatcatttcactaatttcaaaaacttgtgccttgtatggggaaatcacacctacactgaccttctttttgcctttaacttctttaagaccgaagatgaaaaaggcagaaaaagaaagcactctattacgggtcttactatcataagaaccgaaaaatattaagaagtttaatatgacaatatttcatgagaaagtgaaggaaaatacctttatataggctatcaagtatctcagaaacaacagctacttctaccatatttttgctactatgcttgttatcacaagtttctttcccttgtgccacattaatgaaagaatatgagccatacatctttccctgaagaaaagttttgctgtaacttcttaacttcacgttatgaccatccaaaatcttgttgtcataaaactgactatttggaaattgactaattgctgggtgcattctatgttgtacattgagcaggtgtttcttgtggccaaggaaagacaacctctcaaacaaacttcttccgaaattggcctcttctgaaatctgaaagaagcaataagatcataaggacattacaataagatcataagagaaaaacatcataacattataggctctataaggcttaaaacaccttgcttttaaccattgcaggcaattgccgctcatctcctatgagaatagcatgacgaagtccaggaagttgtaaaggaattgctgattcgcattctttaagctgtgcagcctcgtctatgaccaacacttccaaaggacgcattcctttgttatgaagttcagcagaacccgagacagtacaaaagactaggcatgccttttccaagcaaaaatccattacctcttttgtagaagaaaagtcaggaacagaaaaagtggaaggaagtgattccaattgacaaatgcaattttcccttgcaacattgaacttttcaacgatgtgatcttcattcattacatttctctcaaaaagaagtttcaatgtttcacttacaacaccattgaacagcacctcaaaggactttaatgactcaacagctgctaccatggacttcacaacttgtaatgatatacaagaggttggtaggtgtgtatacaaggaaactacacagatatttaatctttgtaaaatgcaagaaaaattctccttgaagaacttaccaaaactcaaaggcctagaattaccacactcatctgaattttccttcaagccttgaatttctctttctttcaagtacaaacggtacttatccacaggctcctcaagcaaggaaatcatggaaaccaagctatctttccagccagtttttgaaccaaaacaatagttaaacacatcaactcggttttgaagaaacacactttgtagttcatcgcgttcttcaatattcattcgcctcccatttccaatcaaaactatatcaccaagcccataagtatcatgtgtagaagactctataactcttttgactagtctctcagttacctccaacactgcaacattggtaggagcgcatgtgagtgtcctgcatttcatccttagaagggtatgcaataaaaagccagttgtctttgtttttcctgtccctggaggcccccatataagcttcacactattctgatgatgacaatctcgagccttaatgcagcttaagaccgcctctttctgcgattcattcaaatcagacaatttgattctgatcttcacatcagaataagaaaatatactattttgctcaaagtggcacatcatacacttttcttcttcctgcaaaaatgggactaaaaatcagaaatagaagtactgttagtggctgcaacatcaaacagttagtggctaataacttacagggaaatcagactttataactttatcaataatcttcatattccgctctttaggatcagaagttagtgcttgccatattcgaatattagtattcatattgataagataaacagcgaaaagaatgctgttttcgaacaagattggcttagacgatagcagtgtaacaacatcatctttcactccttgaactgaagcaatgacaaagtgtctatgcagatcattaactgatcttggtttaacacttgttattgctatcaagtctccattttcaggtttgtatgccttaggatgattcttcatttcattgcttctcaatactgctttatagaaaaagtctttaggaggattgtactgtttggtttgcttcacagaccttatttcacaccaaactgagtgagccactgctttcactcctgatgacaaatctgcatgtgtttcttccactaatggtacaatgaaggccttaaagtactctgctttcgacccaaatgtatcggggatttgctcaacctgcatatatccaaacttgttcaaagttaaatacaataattaagttaaaaaagacagctaaaaatgtagattttgtgaccaggaaaagaccaaatcactcttttttttcataacaagtcaaattctcacgtcttagaacaaaaatatgaaagaattaccatgtcttctcatggttttgcacttaaagaaataaacataacataacctttctggaactgaaagcttacatatgcctcactggaagtcatgatatatacacataccacatgttaatatatatacatatatagatgatatatagttacctggtttttatatagatcatagttgaggacatccttgatagaccaagagaagataaaatcaatcaaacttcttccggtcacaactctcttactgtgtgagttattagtattagtctgcatattttaatcttcaaggtgacactcaaaagattaatgtaacgaaacaaagaaacctgcgagtaataaacaaatttatgaagtctcttaaaggatgtaatattaagtactttaatccaatacttttttataataagagttcatgcacatttctttttaataagccatttatatacacattcattatatttaaatatttatagcagggaatttggaaatgtagaaggcaga

SEQ ID NO: 15373 - DNA, 3103 bp, Cannabis sativa
caagatagtatcaacattaagctaggtttcacatggatcatgcataatcatcccttttgtgaaaagttttgtgataaatttcaaactcttatacttaagtattttttttaaaaaaaaaaattgctgtctctgaattagtctatcctctttatgcctactaattattttacaacatattatttatacttttttttaaataaattaatttagtttagagtttgttaacaaatttattatatgttaaataagtttaaattatatttactaaaataattactgagagtgaaaacacactaatttaaaaaaagttaattaagatttttgcccctgaactttgatatgtaccaaattatgttcctaaatttttaaagttattaaaaatgtaacctgaattattaaaattgttggatttaaagacttttttctaattttattaaaaaaatctaacatagatgaaaatttaggagcatataatttggtagatatcaaaatttgagaaacttaatttaatacataaacaattaatgaaagattaattttttttttgttaaaaaaagataccaataaaaaaagtctttacccctaaaccacacaacacgtggttgagaaaaaaaaaattgatatatatatgaaactacaactactcgtgccatgttagacaactttatttactcttttgtttttatgtcttctctttcttttttatttcactttcataccattaataatgcaaccaaaattctctataatcttgttattcttcttctaatcaaatttggtggcgagaagtgttaatatataaataaagtattaattaattagtacaatattccacatataaaaatcattaaattaatagaagttgttaacatttcaatttttatagtaatttacaaaagtaagacatcaataaactcatgatcaaaagcaaccgaattaatattaataaacacccttttccattaatccctatactaactaattaaatctctttacatataaaacgaattataattaattagaccaagatgatccaattataaagtcattagaagaaaaaaaaaaccaaaaaaacacatataaatatatataattaattaatgtatataaatttgaaaattgtatgatgatgatcatgataataaacaaaacaattaaattaaaacccagattaagataatctggatatatacatataaatatatatatatatatatttcatgcacgtgataaagaaccaaagctcctagaaatctcatgaacacctggattaaaccctaaacaacccaacagaccttgcttgtatggcaagaaagttttcttcttcatttcctccgacaccgcccgattcaccgtataatgcaactcgtgagccgaaaccggcgtccctcgccgcctcgaactcaccgaacccacactgtccgtcgatcgaaaactcgaattcctcacatcctccggtgccggcgccggcgccggcgccggcttttttgacagaacggcgtacttccggaaagactcgctcactgaagaagctcgaccttccgacgcgctacgaaagagtaataagtccttgagtttccatttacggttggcgaaggaaatggcggacaagatcgacgagtaagccgatctcgaattgtttgaggttgaattgggatcggagactattttcccggaaaattgatcggaggaattttcttccgggtcgaacagtagcgcgtcggaaacacgcatgggggataaggatcgagtccctttaatcctggctgatgatctttctctcccgcgtcctaatttattttctgggtttggttctcgatcttgattactgttcttacgagtttcttcaatggcggcagcgaatgggtcgaaattctcgtccctttttcttctgggtgacattagtacatcttgaaccattttcttcccctgagaaattctcgatctcggcgaattaacagaagaattaggtcccgacgaatcgtaatatcgaggaggtggtttcagaggtcgaattttcccaccatcgaataattcatcggccatagataacgaacctttctctaactgtccactaaaatcaaactcaaaatcatcatcatcatcatcatcgttatcgtttgtattaattcctttagggattccaggcttttgttcccatttaaagggaatattagaagaagctgaagaacttctgggagaaatagaatcggccgagatgagagagatgtcgacgccgtataaggaggcggcggcagtggcggtggcggtggcgacggcgacggcggagacacgtgtggggctggtgggtgcgctgaagaaaaagtttccgaagcgttgaggactagagggagctgtgatgtaaggtgaggaacaattactgtcgaagttgaattcggaggcggcggagggtgggagtactgttagtggtggtggaatcatggccacttcggccatctccattgttggagctgtaaattgggtttttgagaaatggagaattgggatatggtggaatagtacggatttatagagagagaaaatgaggaaggagagaggaaggagaagaggagtatgagtatttgactgaagaggttttaagagagagaaagccgcctttttaagatttagtagtttactcttcttttatgcatgtcacactaattataaacataataaaataagtgggagtgatatatacatagtttaaattttttattataattttttagttaatttttgtccctaataatacatgtgaaaatatttttactttgtttttatagtggtgtttattatacttacaatagtaatttatgtctgtaaatttttaaaaattttggaatagtttacagtactaaaataagtttgaagtttttttgaatacatgtactaaattaaaatataaaaaactgtcaaatttatttttgacactgtaatttatttgaaaaagaaaaatttcatatgtgatttaagacgtgaagattgattaagaagttgtaatagaatattataattaatttttcttattatattagtaatatatatgtagagaattgtagaaatactgaactccatcaacgaccataaataatatgtttta

SEQ ID NO: 15374 - DNA, 9429 bp, Cannabis sativa
tgtttaaaaaaatattgaaagttactatttttatttttaaaatttttattctcttaaaaaattgaaaattgaaaacactgtagtttttaaaaaaagaatacaattaatgacgttttgatatacaaaattttaacttgcttcagtccaatcaccaagagaggccgttaagtttcccgccattctgtttgataacaaacaacttcctcaactgttataaattatcaacataaacaccaatccattttctttcttagtacacaaacactagttagtatttattctcctcatcgcttccaattgcatcaacgcaaaatgcttcttgttcctgattatgatccttacaatccacttccattggatgtaaacgaaggtttggagcgctgcttagaatttcagtcctcgaatgcccgtattgaggatcgcatcaagagcacactcaatctttcttgccgatttagggccatgcttgtgatattcaaagtaagttgttgattaattgctacgatctcgttctagattcttaattaagattttttgttcttgagcaaatatgcttggttggtcagaaaattatggttgaaagtttacagaagctagttttctgttgttgtatcttttagaaaagtttttgctgaattcttttgttatagaatctgtggtaaaaaagaaagaaagaaagaaaaagcttcaaaatgaggtagggaaagtacgcatactaaaagttaattgaatccactgacaaaacttagaattttacatcgttatcctggttatttgtttgtgttcttagcattaaatgtgtacaagaaacgtttgaattttcagtgccaaaatgactactttttataatatttttatgaaaagaaataatctaaccaatgattggaatctcttggataatttcttggttcttgcttgcagtactcaaagcacgaaaaccttgatcctttgataccctatcttgctctaacctattttgatcgctttttcacaaggggaaattttttgccggtatgatttgaatgaattttgaatattcacgcctgttttctctagctgcattttcatataacagtcatatttcttgcatttgttttctcagcgtgtaatgggtagcaatgaccacaatgtggacttaatggctatatgctgcctaacacttgcttggaagttgagaaaaggaaatttcaaactctctaaatttaaggtatagttgcccttaattttgattccctctcatttcttgtatgttctatcacattgctctattcttattacaactgattcaccattgcaggtagataaaccagaacttgaaatccttacagcgaaaaaattaatggcaatggagtttgctatcctcgaaggactcaactgggatcttcgtgttttgacagccctatgctttgtgccgtactttgctcctaagtttgccttcactgatggactcagttacagaaccatcagtgaaatcattgtaaattctcaagagagtaagtttgatagttttgatcttacaaaatgaaaacaaaagagagttacctaattatgaaactattactaatcaaggatttgatctgaacagtaaaaatcaaaagacagaagccttcggttattgctgcgttagctcttcttgttgcttcctcacatctgtatcctcagaaatttcacagttttcgtgatcaaatgatatccgagggaatcatcgaagaagtaagcaaacatgatctgacaaaccttgtagttcattaattgatgttttcttgttcttctaatgaaatctcaatctgatttgtctttttgtgaggttcaggttcatataaaggactgcgtggagcttatgattgagctgtgtaattctttggaacttacttttgaaactattaagcctcaaagactggtacaatcagaagtgaaacatgggcaacactgtgatgcaacagctgaaaaagagaatgtccaaaagtatgaacaactggctggtggaacacatgaactacccaatactgaaaaatcccaagatgatgctgctatacatgaggttaatgaaacttcaaaacaatccaccactgaaaaaactaaggaagacagtgctgatgtaactgaagtagacgctgctgagaaatctacacaaggagctgatgaagaatctgaagtagctgctttaggggaaactacgcaaggagctgatgatccatcatctaaacaattccctgatgaaaaatctggacagctggctactcaaacatgcgaaaaatcaattgctgaagaacctaaacaggtagcaacggacctaaagacaatgactacctacacaagcttgcaaagagaagcttataaggggaagaagaaagtgggagagacaacatcagaaatggcacagatggcagaagagaacgaagatgggaacttaaactttccaattagatggccactgggagaacaatacgcaaaacagatgatcgtctttcacagtgactctgattcctcagaatcaactctaaagcctgctaaaaagaaaaaggataaaactgaaccagaacaaagtgacgatgacagcagtatggatacagaggccagagaaccatcacaagaggccatggaggaggctgctatgagagctgttatgagagcctcgtctcgagagaaagtgctggactggctcaagttccataccccatgaatgcatggtggtacttaactgctgctactacaagttcttcaacaacaaacatgacacatcgcaaatatgtaccgtcaaacatatgtttcgactcttagcataaattttaactaattttcgttcatttcttcaacgtcgttgagtgatttactttggatacccaataaactaataagagtaaaattatacgaatcagcgtagatgcttaaataaattgaaaaatacggtaagttttgtttatacgggattgatatttcaagtcaaatatacggttttatttgttagtattatacctgtcttctttttttcagattcagaaaaggaaaaataaaagtaaaaaaatcagcttattgtctcccacctttctctatcacatgtcccaactgttctttcatctctgcatcgtccctcattctcagtcactctccttttttcccagtcagctaatcatttgtacgtgctacggctcagtgacattttcactggtttagagctcaactctgttttgaagcttatttttcttcgtttctatttagtacactttgcccaaagtctgttacaaaaaccattcaagaagaacgtttatttagtgtctacaccaaggtaaaagaaaagaaagattgcaaagccattttaattttaaatgagcaaccttgaaatttattacatatcttgaaagtgtatttattttatttttgagtttttgtgaagttattagggtgactttattataatagctgaccaagccaagctaaaggttttgcaattttgatgttggaaaggaacgtaatgaacgctaggtggctgtactgtactgccctttgtgtttgcttcctctcctaaaatcacaattgttcatgctaaactttgttgcttataaaaacaaaagaataattgactaatcttattttaatttataaaatttggcaagcaagaacgttcatatttatcaccaaaaaaaatagttcccgcctaaaataacccaaagattctgaagaatgtctaaggtaacatggaaattcgaatgtctaatatgaaatgaaatggaagaaaagaaactgctgagaaatcaggtgaactcagtaaaagctgctaccaaaccagcatcgttatagccaatgggaaatcgataccatccctggacaaagggcgtcgaaaaaattcatgctcgacagacctcagggtacatcaaacaggtttctgagtttctgcaaaactctccactattgtgtgtctcctaccgctttggcatgtattagaacgttaaaaacctggtatttctcaactgttgactctctcaaagaagtacagatatcccatgtccttcggaggattaatggaagccccaaccttgtcatcgttaaaaatgacccatctcccatctttgaaaatgtgagccacgtaatgcccacattgagtcgaggttccaatgtggcttacaattcccataagcttgtaccctgcaaaacggagtaacaaattgagaaattagcagaataatttcattatttggcaataagaacactttagcttgtatactataagaccacacattgaaaaatgctatgctttctacaacattaaaggctgcaaacttattaacttttcctttcaatcaatatgtttgaacaatctaacagaacatgcacaacaaacacattgactatttatcaattattaaagacaagcaattatgattcagcacaatatactaacttcctcccccatcaggtaacccgatgtcagctggattagaatttgggtttgttgtcgtttcatccatatcagatgaagatgcagcatcaggattgctgaatatccaatctgttgctttctcaatatcaccaccctgcaatcataaaaaaaatagctatgtatggcttccagacaaaaaaatgtaatgtatggcaaatggaaatcgaaattcacattgataaaatataaaaatcatatatgttatataatcttagaaaatgtagaacgatcttttttacaaattaataagaacggaggctaaacattttgtcaaaaagaaaaaaaaaagtgtacagtgtaataaaattaccgatgccttcagtgccttccgagctacttcttctgaaaatccaaatgaaagcaacatttcaagttttgattggtcgactgcaggttctccaccttgagatataggagcatctatatctggaacataatgcatttagtataggttactacttactataacaacgtaaaattacagtcaaattcatagttcaattatgcaaatggctagtttttaagggtgatgaaacttcctttagagaaaatacgaaaacaagtacctgcatcgtccatgtgagaaagtaaccaattcattgcctcttccactccggtatttgaggtattaattgcagccttctgacaatgaagatggctaaaccccattgaaacaagctgagatacaataccctcatcggccaaaggtagatttgattcagcctcattgtcaggaactgaacaatcatattaacaatgccaagggcaacacaaaaatacaatattaattgaaaattaaaggagataaataaacaaaataaagctaaaaaactgaaaacctaccaccctctggtaagatctcttcccctggttgcaatcccttgctgcgcatgtgactaatatctataatatcgggtacatctacatagacatctggattgaaaagaaatattgagataaaaatacaaataatgtaaattaaagatggaaatggaaaatcaaagtgatagaaaacacacctagctttttaggcacccagccctcctccattacgaatttccgcatgtgtaaaactaagtaatcagggaatgaagttagacctgtagtcctgcaaggtatcgaggaaaagaatggtaacataacagtgccttggaattaatgtcattatagaagaggagaagttgtatctagaaattcttagtttagaacatatttaggtgtatcttttaagagattagtccgcagttacataaggaagattgtgtacttaaaataagacaatatattggtttatctttcaaaatttggtagcaagacactaaccaacatggggaaaattttgaatcacatcccatcagggcctctaataaactcacatgtaacatgaattaaccagggttttgtcaaaattgaaatgtttgagaagagatatctccctaggtattcattcttgacaaaatatggttttcaaaaactagaactagtcaatccaataccaaatcctaaagtaatatttattgtttaaaaaagacaaacacagatttagcacacacaaaagagattgatgaaatatatcagaacactagcaattctgtgaagcttacttgacagctgttgtctttgccttcaacgcagtgctgtaaaaatcatgtatctcttctggagatgaaaagctagcaaggcatgcttcaagaggcacccttgggcgtacaatctcatcattagatctgccagatatggacacgcttagctaagactaagagtgctgaaaataataaaacaaagtacagaaattcaacgtacatttccttcccttctgaaagtttttctgctttcagcttctgaaaggcttcaagttcatctgcaatctcacgaagaaaacacaaaatgtaaattttaatatgaatgcccagttaaagttatagtgattcccaaacaacctcacttacccttattagaagctgcatgcaacgggatatttagagatagaatataatcaagccttctattgtaagcaacttttccagaagaacactgaatacgatcttcaacaccaaacttgaagcaccttgaagaatcagcctcagatctcccagcattagatctttctacttgatcaagaaaatgaaggaaaaactccagggcatcctaaatataagtttcaagtcttcaaaagagcaaatgtgtagagcttaaaaaatgaattaagtgattttccaagaattcacaaaatatatgtttattttagcattccgaaagtatgtgctcataaatatttgtataatctgcatgaattgcatctcaatcgtgataatctgaaattaaaatagcttgcctgctgtctcatggtagaaaattcaggatggctggcagcaatgacagatttgaacatacggggtggtattccttcctgtttctagaatttgaatgtggtggaaaaagcaacaaaatcataaaaacaagtcaaggagaataatcggagtgcaatgacaaaccatgcacatacataaacattgaaaacaatacaaatgcaaaataactcacttgtttgacaacaaaacaaaataaaaaataaaaacagaagataagatggtgaattgcagagtaaacaaaaacatgaaccagtcaaatggaaatgctaagaaataactgaagaaaacttacagcagttgatgttggaatttttacattataatcgtcacttccctggataattaataagatggtgtaaaacaacaagaagcagaaatcaatggtttaaagaaatatatttcgttagtatgcttacctcctgagagggaacagagtatttaccagatagtaaaccatgtcccagctttgtcctgccatacaatatgaaagcttaatcaatacacatcttgtgcataaaaaagggtgaaaagtactttacatatgtgccaactatctttgtttctcttttcttttcctttttttatattaatatatatacatatataaatatattgtaggacaaaaatcgtttgcttcttacaactgcatattcaggtctacagtgggatcagctggagccatcccaaatgccatttttaaactttggttcttgtagtatctgacaaaatcaaatttatgaaaccataattcagcacacatacatatataacaaaacagagcactaaaaataataatgataataaccaaccgtgtgtagaaagaatgtgtggagaacacaacttgcatagttgctgcgaggtaacagctgcaagaaaacaaaatgagtatgcattcaaacaaatacagtaaccccaacaagcagcactcgagtcaacaaaagatacctatttccaagattgacaaggccagtgtaaccaggtccacaaattggctccacttcctgtccattttcttggatccggttccaatcaaaatttgtattttggtcaagttctctttcagcggtagtcatttctgtctgagaaaaaaaaaatgcacagcaattaatagttaatattcaataatcgaacaagaaaacaacctaaatgtttggtttgctaagccaatgcatttcatattatagacatgtcctaaaatattcgttcaaaatgttagaaaacatcaaagatcataaagttagaaagtaagagtttcatttattaatgtgacagcttcaaagcatagttcaatgatgagaagtacagggagcgttagcataccaaaatttaagaggtattaggtattacaaaattcaaatcaatactgtataaagcattgaattgtcattttaattagttttgttgttctaaattctaagaactgagcacttgtatataaacatttaattccatctatgaaaaaaaaaaactggaagtgcaaagtagttcgatcaatgatccacaagtcctctacccaccagtaagagaccatccttttgtgactcagtgacaataaggctgcccacagtactggcagcgtagttcaattcaatgaattactaaccttctgtaatgatgaaaaatcaatgccaaaaaattgtagatgttgcgctaggagtggatccacaacactttcatcctctgggtatgagaaaacatctgagctgccacaatacattactcatcatttgcttaaataaaaagaaccttcagaggtatatgtccatgacaaaccagcgacatattaaatatttgaacattaagctacagtggcaggttgctctagctttgctaataaatgcaggccatggtgcatgcaagacaaaaagaagcaaattataaatcttaattccaacactgaaatatacagtaatagaaagcctacagagaaaattgtaatgaacacaaaaatattataaatatgtatatagggagctagtaggggtcacttttggtgtctctgttttcggccaatctttttatatgatgatctacaatgtcgaaacagagttcaaaataattcattgcacaagtattttaaggaaaagaaaaagaaaaaaaacacacgtgtgcaagtgcaactaattatttggaactctgtttactccctagcaaattatttggaattttttgaaaactagtgagatgcgtacatttacaatgtacacaatcatataaaaaaaatgagttataatttctccacatattgaaaacaaaatcgtcaaggagaaaagtgacacaatccctagtatagttgatgcctaatatacatatgtatacacatatacaaaagttactagttttttgggtaggcacataatccttgtgaatttgaagaaaagtttaatattaatattgaaataaaaactatttaaaaaaaatatacaatgttattaaatgaagacacacgcttgcattcttaggactcactagacataagatgcctggcttaatgtttaacatggctggctgtattttagtgttttggtcatgcatctttatagtattatttttttttttaatcaattgcaatcgttaatcaaaaatggatccaaaacagaaaaatggcaaaagtaactc

SEQ ID NO: 15375 - DNA, 11802 bp, Cannabis sativa
ttaatgattgtaagtttttcttagcttctttaagttttgttaaacatttttcaaataagattgtatattgtgttgctcgtaattcttattcattttagattgtgtttttagtgagagtgaattgtaatggcaacaattttaacttacaaatcttaaataattaatttatgatttttctttataattttttatatataacaaatataattttatttataaatcaataaatgtataatttgcacgcaataattatactccttgtatcctattttaaaatgtatttaaaattaatgcaacgattactaaataataattagaatttgaatcaattaattaaaaaagtataaaaagggaacaaatgaaaaagaatcacaactagtatttgtataattgtttggatacaaaattattataagctgtagacattgtgagtttccattctcttttgtttattattattttttaactgagaatttttggttttcaagttagattttgatttctcgtatgggaagttttggtgggtttgcccatgctgttggattgaaatggagtttcaatggaggaccaagatgtgtagtttcgatggaggaccgaggtggagtttgagaggattgaggtagatggagcttcgaaagaggaatggtggtctgtaaatgagaaaataaaatagaaaagaaagagaaagaagagaaagagaagagaaatttgtttttttttttttattttaaagtagcttatttttattattacttatttttaaatatttatttatgtgtgccaataatatagtgccatgtgtacattatgtacacgcagacaatattctatatacacatggacatctaacatggcagttaactgctaaaaatgaatgaaagaggctaaatactaaaaaacttgggttaaaaaattttatcgtcaaaaattaaattttaggaattaattactagcaaagtaatactattagagttatggcataatatactcttttattaaccaagttctcaaattacgtaacaaacaaaaaatataaaatattaccatatttattatttcagtaaacatagcataagtttaattaataataattatttagtaaccatattagataattacaatatttgcgaagaatttaaaaagtaaaactatttatatgacattttatggaatttggtacgagcttcataagcacgaaaaaaaagtatggaatcaagtataaatagcgttattccaagtaaaaactcttattaaaaaatttcataaaaaacactaatagtttcatatatcataaagatgacatataagtacaaatattctagcctaaaagcgacgcattaaaaatcttataatttgataagcacaactcgaaccttgaacctagtcccctcccggatctcaacctcagcttggactatggatccgaccccgacccaagatcccgaatgcggacacaatccccaaacaccgaaatttaacctaaaccctaaatcccaaacctctatcctagccacgaatctggactcgtactcggactccaaacctcgaattttgaactcagaccttattttgagtcccggatcagaccctcacccttgccttgatctagttcgtgaaacacatttttgttattgaaaacataaattttactttaatttttgcgattaaaaaataaaagtgttactaaacacacttcattattcatttttagcaattgtgcataaattttgttaaaaaaaaagaaaaaaaaaacagttgtgtataaattgtgtatttcttagatgttgtcgtttgcagaaatgtgttgttaaaaaaattgtcgtgtctcagttatcatccgccgtttcattgggatagtgtcgttttgtttctattgcgtcgtactgtttgtcatttgtacgtattggcgccaaatgtataaattattatcacattcacatttcaattcatttttcatttcgtttctccctctctctctctctctctctctctctaagttcgtacggtcgaatcgaagctctccagtttctgccaagtggtgattgttaatcgagatcatcacaggtttcaatattaaaatactgaaatcgagtttcgctgtttgtttgctaagaaaatgttgatattgactggctttccggaaagtgaaaaagctatcgtgattcaaattccatggaataatgattttttttttctttccttgactatatttgtttcggtttgcatttgaagtgtgatcgatcagatcgacaatggaagtccccggcaaaaatcagatgagacgatcaagaggccgctatcggcgttccagatttcgcgccaaaaatctggttaagcagttagatttttcaatgtctggcagcttatctttggatcctagttcatcttcgcttaattacttgaagtcgcctgcgaaacctaacttggagctttatttgtcacctccaatcgaaccatttacagagtgagttctctgcaattctaggttcttgatataagagctacgatattttctttctgttttcacgagaaaataccgaacaatgggaaagaaaaagtgcattttatttatttagtttcattgaatttctaaattatctttactgttttcttgttagtttttttctagttatgttgaggattctaactgaaaaggcacgcttaatttgtctaagatgttagtcgcagggaacttaaaagccaacgataaaatacaaataaaatgacaaatcattgttttgttgaaaaaagttctcgttgtattgtatggacataaaatacacaaattatactactaggatttcgttctaaaggttccttttatgaacgttaatttgttttcgcaaataaaatgggagatgaaatttatgatcccaacactggtaattgtgccatttcatgttttatttgaatcggatcagaaatatagagtcctcagcagtacaacctcaagctcaatttggaatagaagaagataatggcactcaagagcatcaaggacaatgtcgttgcaagctaactaagtgcttaaaaatgtgagttaacttctatatggagctctctaattcaaatgatcacaaatttgttgtttacttcttttaattttatttgtcagacactcagaccataaatcttgagtttggcatattttaacgaatcttttgagtttaatatgaaagagaaatatttgaccgtgaacatattaaaggctaatgatgtggaatataaacaagattattattttagacagactttaaagtctttgaagtagaaatcgtatttcttgtatatattgataaattaatttagtctctacctcagagccttgaatggtatggcttactaaagctactagatttgattactttcatgacgatgatctacaaattgtcaggtactgtgaatgcttttcttctggattctactgcaatgggtgcaattgtattgattgtcacaataacatcaaaaatgagcctgcgaggactgcagctgttgaaagtattttagaacgaaaccaaaatgctttcaggtcaaaaaccgctaacagcttgcatgtaaccccagatattaaggtatgcaggctatagttgctagaatgtttccctttttctcaggctatagtttgaaattaggtggaagtaggatttgtttctgttgttcttcaatattgtcttgtaacatgggttttatatcactgaaattggtcttgatgcgacttaaggttcagaaaaagggcactacatccgtaagaaaacaacaaaaggggtgccattgtaagaaaacattttgcctaaagaaatattgcgagtgcttccaagctaagatcctctgttctgaacattgtaaatgcttggactgcaagaacgtagacggatttgaggagagtatactatcacctcagaaacattatgacgcagaaacctctgtcaagagggccagggagacatcttcttcaatatcaactaaaaaagaaggccaggtactcttctcgtcctaatgctacaaaggcagagaatggcttcactgaacttacatgaacacattaaaagaaatttgttattttatttttatacagccttttagaccagaaatgaacataaatccttgctctttattgattttggctgttcaattaaacatacatgtcaattgctcaacgtattaattttctcctcatttttatttcacgttttataatctatgtttagcaggggagtcctcttgtaacttttagggcaccgcctgccttttctgccaatgctctcgaatgcaggttcatatatttagaaacatacttttcttttatgcgcactagttatagtttcataattctgactctgttcatcattattgtgggcaccaccagatcatggcaagcaagtataactacagattccattaagcgcatttgctcaaatatgtttgtaggggctcatgctgataggatacttactgcaggtattatttatttatgaagttacgaaagttacaaggattatttctttgctcaaatgaattggtaactatttgcaggaagaacgaattagttatttgtttatattatattgttttgtcctcttcttccacgtctttcaggtttttttcgcactttttattcagtccttttgttttctaaactaaaagttagttcaacaaaatattgaacaaatgtttatccaaagttgccaaactaagtacaaacgggaacctcgaatttgttcttctagtcaatagtttcacttcagtgaagccagataaaccaaatgtaggggaagtggttccagatgaccatttgaatgattatggagtaaacatagtcaatacaaagttacccaaaactgcaaatgtcaatggacaagaagggatggtgttatctcctacagcagaggcgttaaaatgtgatgagaaagttaccatgttgagagaagctactgcgtcctttgatggaaattataagcggatccctaatgcaaagccctatatggagcaggaaaggattatcttgacaaacttccgggattttcttaagaagattatctctgtgaacactaattgtaagattttatttgagttacaacattaacggtattgcttcctttatttttgtcaactctataaacactcctctttctctatgctttactgcatatctcttttaaatccttatctttataatttttcctgttcattcaaaaatgccaatcaaacaacacttcacaaattcttgatcgagctccatttttattgcagcaactggaacttctacagggattcaatgtgaccatgtaggtacttgaatctaaaaattacaaggttcctgtgtaagaaagagtaaatctccaatttgatagcaatgaatggattgctgattattgattgcatttgttcgtgcacactttctcaagaaaatcaataattaagaacctaagccacgatatgaagaaaattcttggaaagaacgggtcaaatcgggagaggacaaacccgaatatgtcggagtttgacatcatgatgggtcttccggtctcactgttgctgcatcaagatgtaaaattccatcaacaataacttcatttctttcctctatgtgcatggtacattcactatcttctcataatcgttgttgtataaatacattttcattcctctctagttcgcgcttgaaagcttcccctattaaatggatggcatagcaaagaactatatgcaagaatgtttttgactgtggcacactctgctatccattattaaagacagatcatataagctagctttgcttcaagccttcaacatttccttcttttacattcaccaataatcaccacaagaacacagtccatctttaaagtgatggtaacgattgacatctctgattatgagttctctctttgtaatttttgagatgaacttgattgcaacatggcaatcttcacaaacccggaggttcttcgttatcaaaagcctagttccggactgtgtactaattaagccaaatgcaattgccaacctctcgctgtgactacaaaccatgctagtcttctcgtcatcttccacgtcatggaagactgaaccagtgctagcaacatatccggcttctgccattaatccttctagcctctttagctccttgtatactgcatcggaattaggatgtgaagtatctccagaaaggaaagcatggactttgtttttcacttcaatccagctacaagcagtgcttttcttaattccattatcaatcattaactttctcagtctcgcaactccttcccaatttcctgcttgagcatacatgtttgataagatcacgtaatttccagcatcattaggttcaagctccaccagtttctcaactgccagctccgctagctcaatctttccatgaattttacaggaattcaacagagcaccccacacaccagaatctggcaccactttcatttccattatgagattataagcctggtcgaattgcccacaatgcccaaggagatcaaccatacaagtgtaatgctgaactgttggttcaatatggtattctcttaccattaaattaaaaaacctccatccttcatcgagcaaacccccatggctacaagctccaaggactccaacaaaggttatatgatcaggcacaacttctcttctcatcttctcaaacaaatccaaagattcagctgcataaccatgcattgcatacccagtaatcatagcattccacgagacaactctttttttctccccaagttgctcaaacaaagtcctggcaaccttcactaaaccactcttggcatacatatctaccaatgaagtcttcaccttgtcatttgattcgaatccatgtctccaaccaaacccgtgaagctcttttcctacaagaagatctgcaatatcagccgaagctgatacaacagtcacaagagttgcctcagtcggctttaagccggtcagagccatttgactgcatagagcaagtgcttcatctggctgcccattttgcgagtaagccgcaagcatagaattccacagcacaacatctcttgcttcaatcatgtcaaacacttgccgagcatttcccggacaaccacacttcgcatacatatcaattaatgccgcgccaacaaacacatccttttcacaatttgaatgtattacacgttcatggattttcctcccttcttcaatagcagaaagcgcagaacaagctttaagtacgaatgggaaagtgtatctatccggaattagcccatactcaaacatttgatgatataatgaaacagccatctcataagggccattccaagcgtaacccctaataagaacattccatagaaataagttattccttttgggaattttatcaaacagttggtgggcgtcgcgtacagattcgcaaacgcagtagaggttgaccagtttagtagctaaataagtattaaatccaatacccagttggaataatcgagcgtggagctgttttccggggttgattgcttttctggcgacgcaagattggaggagagaggcgtagtaggaagcaggtgagcgatggaactgttgtccttcatggagtttgacattgtcgttttgatgatgatgatgcacagcagagatggtgggagtgaggttgataagagaagaatcagcaaactgagattcagaagataaagatgctctccttaactttgatatggaggaaagtggcatttgggatttcaaagaaggcgaggaaaaaaaagtaaccgaagaagaagcatgaggaagcccaagctcatacactaatctcaactcagttaataagtgccgatcaatgacggctaccgccggagtactatgcttctctccggactttctgaacgtttctctttgacatttgggagttatgttgttcaaataaggaaaaaaattggattaaaaaatattcaaaaagaaagggtaaatattattttggattatgttttaacaaaggttactaattaaaatttttgttttgtcaaaaattactaatgacaaattagacctgtattttttaaaattattcaaataagatttttaactgattttttgtcaaaataaaacttaataataatctgatttagagatgttatgataaaactggttatattttttgtatctattcgtgttaaaaattatcttaaagttggttatattttttttttttttagtcataaagttggttatattaaaaaaataaaattgttaaaaattaagttcgggtcctatatttatcattttgaaaaatatagtcaattttgtcatttaacaaaacagaaggtccaattactaatttttgcaaaatatatagtctaaaatagtatttacccacaaaaacaataataagaagaatgagttattaaaaattaaaaataaataaatatttttttagaaacaagaatatcatttcattgttcaataactccatcaaccataattcctttcaagaatatcatttcatttgctaaattgtgttggagtaaggctgagattgatatgtttcagaggtgcttcactgaagttttcttatttgtatgtttagtggcctgtgttgggtgctttagaaggccgttaatgagcttttgtttggcaaaggaaaagctctagagtggaagatatgtattattcagcaagactaactattgatcaatgaagaaatgctcaaaattctgaagttggaacccctataattgttggtgttccaggagatggtgttaagctttggtgaagcgaagcctagtgctaatgggatcaaaacgaatattgaggcagctattttcacgtaggcaagtttggagagggatctgtgatcaggaatcatcgagcttaaggcagagagagtggcacatgtttaaaggcatcattattgtttttgttaaacggtctgcaaataagttgggttatgcacttgcaagtgtctcatgtttatactcggattgtacttttggaagataagattttgcctattcttttaggggattgctctcagtaatgaaaatgctaacaatggccaacataagcacattcccaaaagaaaaaaaaaacgaaacaaaaaattgaccaaattcacatctacaaattttaaaaacgttttaaacattctttacagagtaaaacacagtaaaaacggcttaaaaataatacacagaatatagttcttatgagttcatgcctaatggtacaacaagagacttgcattgaatgacaatggtggtactgatttgaccaccaccccagttcagcaacaacccaataagaacctcaattttgtaaataaatacactcataataaacattgccaaacccttaccatttgactgcacatttcatttgcccaaaatgtctgatactgttttgtcaacaatttggaaaagctcttccctataagaaagagaaaaaagtcattgcagagtacacaaaagtaagtcactacaaagtcatattccttagaagaaagagaagctgctttgttttgtataatttctaagtgtttttcaccaatacacattggtcatacaattagcttaatcttatacagaaacaaaccatatttcactggtttatatttattatgataatattgctgctaagatttttacttggtattgcattacattagttgatattttctggtatttattaaagcttaaattctccattattacccactaaaggattcaaggaatagtagtcataaggtgaaatttacttacctatcaggtttgaacaagaggtaacggtagataaaccactgaaaataagcagagaggttcttatcaacttttgaatgtaaagatatattagacaaagtaagaacttgacatgatagaagaagaataactatgtatgtatcatgatacttactgaagaaaatagaatgcccacaacttcaaatacgcttgggattacaggaagcttgtcaatggcctagtcagtaattggaaacaacattagggaggagggagacaatctcataagtcacactatatatgattagcatctcgaagaaacatagagtttgagcatgtcaagctccactctgaaagccgaaaaggatataatttccagtctcttaattctttcctatcagcaatgctaactcattttcttcaagaatgtagaagagaaagagtttaggaaattaccgaaaccaggttaattgatgtccatagagctgctatagctgcaaaccctaatccaaatagagctggtcggtcttcagagttagcccactgtttaaaatcataaaataaacccaattcaaaaaatggtgagacatgaaagcacaaactttcttgaagctacttttaacatttaactacaaacaagtttcttcactatctacaagaatccttgtaagccaagttgaaaataactcactataagcaaatgtgatagagaacttactaagttttgaactgatttattaacggttagggaggttgatgactcagagttatccccagcagcctttacagcaacagaaccacggttttgtctcactgcaatatacaaaaatcaatggacagaaatgattggtttatacataatgatacccacggccacccatttctacataatcataaacctttcccttctattgtaaaaatcatgagaaaagcattctactaaataaaatactagtgttcttttctctcaaaatgttcttaattttcataaagagatttctaaagtagtggtagtgtgcattatgagtcatacccgagttactactgttataagttaagaattactcagatgtaaagatgattgagcaatctatcttttataatcataagtgggattgtaagtcgtgcaaatttttgtgagaacattgctttagttatttttataactaacttccaagttcaagttcatgagtgtcaagctctcaaataattccaaattcatgtttcagaaactaacttccaatggacttcacattgagtaaagccctaatcttgttggcaaatccaacaaacctaaattaattgttctcactaacattgaataaagttccctttttattgatcaaaatactaataaacaaagttttgggtatcttcttcttcttcattttcttattttccccaaattactattctgtttgaatcaaatcatcccaattttccacaatcttatgcaaatatataacttcagctccgagaagagcaatctttccctataatgatataacccacatcttatagttatgaacaaaaactaccaattttagtccaattaaactttgagaaaaatgaaactgaaataaaatctaaaacttgggttaaaccatgtaaggcttaccttgaaaggaagaaagtggaagctttgagaaagctgttaagatggttttactggttttgatcaataatggtggaggcaagcttgcaacaatggaagccatgtctacctgtgagaaaatttaagatagtaatgccaaaagtgttttctttatatttatatatatttattatgtgaagagaaatgtgtaatctaattggttattggaggatgagggaaattatggataaagcaacagaaacagaaacaggaagaggagagttgaaaaagattctgatttgacaaggatatgatagtgttctctactctactactattactaccattgccaagctacctccgttcttccctttctcaccacacatttttcctttttttgttttttttcgttttgtcaagtaattatttatattagggaaatttgattttctatacttagaaaatcaaaaaatttgatttctaaaccaataatttaaaccctaa

SEQ ID NO: 15376 - DNA, 9910 bp, Cannabis sativa
tataatatttattatttagaatacttcaagtactatatattacataccaatttgaagtaattaataatggaagagtttgtactccaaggttgaaagtgatattaggactacataataatgggctttgattgtgaaagtacaaatcacatagcatcttataaggccatcaccaatgcaagccgcacattctttcaagcttcctcccaagctaccctattaaacatgctctaagttttttggtactatatatttatttattttattaaagttgtagtgaatttatttgtttttttcgtatgtatatatatctattgtatgtgggtagaagtcttacattatttacaaattataaaaaaaaaaaaaaaaaacacttttttattcataattaaaaaattaatcttttaaaaatatataatttagaaagacaaaatgataagtgcagatccttttgtgcatatgcaagagttgttaacatgcactaaattcaaaatacattcaattaatcatataatttatgttcaaaaaaagtcaaaactacaaattgtgtgaaaactttaggagaagagaagcctcagcaatcgaggtaccctcatgtatgtggaacacttctcttctctgatcttctattattaaatattagctcatacattttctcaaaatgagaagagaaatcaaagaaattgatactctaaatcaacaaaaatataatatggctctaccttcaaggctttcatggaccaaccaaatccaatggtgaacaaaacctgaaaatggagatttgatgatgatgatgatgatgggcacttgagtgagtaatatatatcttcacaaaatatgaaaaatgaatcattcaactataattgggcctatacatgaatggaacatgtcgcctagtacacgttgaacttctccagaactgtgttcactccttaccagatctaccaacaatggaaagaattgcgatacgtgtctcttaaacgattctctttccaacccactcaatgcccgtaaggctaacacaactaacgaactcctggcagccagttcttcctttttcgccgaacccaatgggagaatccagtgaagaacccgctgattagctggtttctgtggttgctgctgttgaggagaagaaagagagccggtacaactgacgtagatgtgtaatatttgttcgcatactgaaacaagttcggcttcaatgtcaatctcttcgcacagagatgaattgttcagtaagttttggaggaagttgaggtagttttgatacgactcattctcgaaatgaactattggtggaggggtgagctccaggatggagcaaactctttgcagcttcttttgtagcattatctccaaattcaattggtgggcatgtgtggtggtagtggaaagaatttcgagaacaattgatgtgttagccactgatgaggatttcaggtgcgtcctttgcagatcagtaacgacctgaaaaacaagacaaggcttatgattttgataatttgatatttctgtgactgaatccaaaattaggacttagcaaaaaaaaaaaaacagagacctgaggaaaacacaatatacaattgtgcaaatacttaagaaaaatatagtatgttggggaggaagccaacctgtacaatgagaagctgcattgaaatatgactttttattctcgaaactacatatgatgccgtttggagattatcttcctcaagatcatcattcgttaagtcctgatcagacatttccatgtcattgttattggattgagaaatgccaggcacatcgatgcgatccatgcttcttaagaccttcgtaagtccaggcactgttgatgtggtaacctccttcagagctaggaaaatttccctccattcattttctgaaagcctactgcctaaatcgtctgacagacgtaccaatgctgcatacccggtgctagctggaccctgaacaggacttcttaagaaaccagtgaatattgacaccacaccaggaagttgagacctcactatatcaaagaaactgacaaataggtcaattagacattctgctgcaatggaagatgtttcagaatcccacatacttccttccaagtgggacgatctcgaagctgattggtcatcttctttcactatatctttcttgtcagatacagcatcaaatatggggaaaacaacggaattgaaaataccagtccaaaattgaggcgagaaaagatgaccatgatcctttaggatgttaaaaagaacttccaaagaactcttcctgatggctgacctaggatcagatgtaagttttgacaaccctgaaacagcaaaacgatgtgcatgttgtgcttatcccgttgtagcatactctagtagaggcatttgctataaataaaaggaagaagtaagaaaaaatatattacctgtcagcaaaggaacccaaaaggacatgttatcatctttgtcactgaaagtgtctgcatctgaaacattcttgctcagctctggtgtcgtaccatcaaccacattcttgtcattggaaacaagcgctccttctgcaagcttgactgcacaataccggagaaatgcaatagcgttgaggctaacatcactggtgaatctactagttgtgaaggttatgagacatttgacacagtcagtgaaggtcaatatttctgtctcagttatatatgggaagtattctcgcactatcttttccattgtctcaaaggccaataagacaatattcttccgctcatcagcagcagcagctgtgaatatctgttgaaagagcagcagcaggaaatgaggcactcaccattttaatcataaaaatttcctatttgtagcttatattttgcaaatcaacagcaccccagcatttttggtacagaaattgctaagaactagaacaaaatccaacagatctcataatatgcaaaaaggagagaaaagtaacgtactttccaaagcaataatgagtgaaaaaatagcataaatttgaaatttgaccataccacaataaatacaagccacaataataagtgaattacattgcaagatggtaagaacagaatatgcaagcatctgaaattttaccctttgatgtggcaagtcacttcatgaaaatgaattttagtttgttcaaagatattcctcatataaacaaaaattcacaagtgaaagacatgcataccatgaaaacacttttccagccagacttcacattactgacacgactaaggatcatttgtgatatgcagcgaattattaactccctaatctccccagagctacttttttgcataactatcacaaatggtctcagaaattcattttggaaattgtaatttgccagctcctcacgctccaagaatttcatagcaagctgacgcaacgaatccattacaaatattgcaactgagagattttctgataagccaacggaaacaaaaaagtcagagagaacgttccatatgcgagtccatactaatctgatgcggttcatattgtaatgcctgcgaaagaaacaattgaatggttatagacatctcacatacattttgatttaatcaatacacccatacaaaaagatcctccgaaagaaattatgcaatagagacaaatagaggtacaaaatcttacgctatttcaactagttttgtgaggctaaatacacgagggtctgtgggagactgcaattctgaaatggctactttacacagagccttcacaaaagccactattgcttcactattcaacctctgactattagcaaatacgtgattcaactcgaagttgccaatttgatccaacaaattcaagttagcaataaaattatttatctgaaccggtgttactaatccaggagtgctgcctccaacactggtgctatcgtatgatccaccacgaacaacagccaccacagctggattttgaatggttccttttttctttagagaaggaaatcccaatgactttgataatttatcttccgtttccatattagatccagtcaaaaaggatgcatcagttggtgcaccctctcccaacagttgcagatgttcaattctagagaggcatgttaaaatgtgatcccatgcttcctgcagataattaccatcttcaatggcaattaagattattgcctgtagataaaaaaaatgtcaaagtgatgtagggcattttacatggaattgattgaaaacacacgataataaagagtaaactattttggaataatgaagtgtagtagagtagatataatgtgggcagttttttcagaaagaaatgacaggatttatgtcagacagacaacttcttttgactctttataggaatggatcaaattctaaattgtagtttgcctcaaaattgcagaagaatttaaaactttttctttttctgatctgttggagagaatgggagtatttgttgtaaattgcccctgtaacaatttaatactttatctgctcttcttgaagagcattggcatttggcattttccatgactttctgcgggtagcaatattctactttattttgatacttaaacatgcactaaccttgacagcatcaacatttttttgcttcatatctgccgcacaatggagatttgtaaacttggccatcgatgtaacaaaagcatcacgctgtgtctgcatgcacataactgcagtaacatgaatagcatgtcgaaatcccagcaagcattgagaagtagcaactctatcatcactttggtcgagagtcacactaaacgcagccagcataggaccccagcaaacctccaccataaaccttaatatagtgacatccgtaacagcatgatatacagagctgcaacaatgaaaaataaaaatcaattctgtagcattaatcctagggccaagtgggtaaaatctttctatcatttatttgagtgctcatatgatgtgaccaagtctagtgcccatacaaaagatacaatatcaattttcttgcacaatgctcagaataagttatgcagaacaacacccagtcactacttgacagtggtgctttcacaagtagagaaattaatttgaaattttgtggtgctttggagtttagcttactctgattttcctgactttgctttgaattgctcctgaatatgttttataagaagcccatttgcacccaaagccttttcttcagtctgcttccaagttactaaattaaggataccatcaaagcctaacaatttattaaaactgtttgcctgcttgcttggtggttcagaagaattggcattcatcctaatttcatttttaacaatgtgatcataaatggagccgagatactcttcaggtaaatcctttccatcatcaatccctcggttgtttcggagaaagtcagcctttgtcatctgaaaaaccctccagtgcatagtttaagtaaggagacatttaaaatccaattttgactcaatatataagactgatacaggatattaattttttgacttaatatattacaataaaacttttcaaagaaggttgaaactgcaaatgttcatacaaattaagatagataattttttccccaagagaacaagagtactcaaccaatttaagatggaaatttcaattatataaatataatgaacaggtgaacaaaccttatttttcaccatgatattatgggcatctgtattgagcaaaatcacagagtaagcaagaacataagctgtatctgcactggtgaatgaatttggattgcatttacaataccgttcagcaaacttctccatgatgcgatcaatcttttgtgcctctccaggcaatctgaaccctcgcaggaaaaaccttattgcttcaccgaaatctatccctttaaaattaaaagaatccacgtaggcatgcataactttcagaggaaattcctctctctcacccaaatagtcgccgatcattgtttcattcaagccattagtgttcttcaggaacaaagccacatcctctgctgaactaccaattttttttacatttatcaagaactcaatcccctttgaaggcttcctattgaataatgagatacctttctgcattgaacccagtaaagttgtcactacacagaacaagcagatttaagtacataacaaaccaaagtaacaccaaaaatgtgctcaaatataaccaaccagagcacagaaaaattgtcatgaaagcttagcaacagccatttataacaacttggtagttataaaatttataactgaatgcctttgacaagaaaaaaaaaaagttcactctaacctgcatttcaattttataagcacgacgctgttcgagggtggtagcatctgaatgttcagaatttacttctgcatgtaattcaaaatcagaaacagatccttcttctccattttgagtcaaatgattctcgactgaagcatcactctcatggcttttggggagatatgagtctcccagtctcagttgttggtccatccaagctcccattgatttaactatacctaccaagcacttaacggattcatgtcggaaggtgatatcctgtgcaggtgacaatgttgtagttgatccagaaggtggtcctaaagcagttttcagaaggccattgacaatcctgcaagtatctgatggaattataagggttttaatacattttactaaagcacaatgctgaacaagaatgacaatgtaggaggcttaaagttcattcaaattccagcatttgggttaatagtgcttttgtatgcatttacaatgatacatgtgcctgtgatatagagaacagagattggatgcatgtgatgggtgggttctagcttcgacataatatcagatgtgtgaggaaccatttctgcgacatccaaccttcatagcaaatataaatatctgttgggccaccagttagatttagctattctagattagacatactaagcctagctgtcacaaatgttattctaattgcccaagttgtattaattgtgactaactaagttatctgccttaatatctagttggatggctaagcctataaatactcagccaccttattttgcaagtggcatctggtatttgtgaattgtgtgagtttagaagctttgtaactcagtgttggtataaagattctatcctaccaatctttggatactaaagcgtatcaaaatcaatagtagtgtcaaaatttgtacctggaaaagaaaacacgagcctgaaatgaaatcaatagcggcttcagatgtatatagtccaccaataaagtctaatctaaccttttttccaacataagttatagagtgaaagctttctgccactaatattgtttctaattcctatgagcttagctaagaacacacttaaaatctaacctactaacttcacttgcagagacaccacaaaccagtcctctacaaggtaaccaacctaatatttttcagttttaagggagcagttattgtgacatcagatagcgggataaaagtaaaaatatatagcaaagtgtaatacctttcaaagatgttcggagaatccatatcacagtcatagttgacaaagatatctatcataatctgtgaatcctgagatattttctccagtaggtttaagacagtcattttctgcaggaaactaggctgaagaacgttctcaagcacccggaggacaagcatgggaaagaaaataccaatctctgctttcaatcccgatctgaattttgacaagaagttgatgaaaatagagcactgaagttggaaaatagccataacggataatgcactgtttttcagcaatgataagcaaagtaactgcttgatggcattaagaaacctgtaacaccaataaaaaaactattagaattccaaaatagtttgttagaacaaggagaaagagaaagcatgcttacaaatctataatatcctgacattatttaagtacggtaattgggtataaatctttccataaaacaaaaaataaattggttataaagctgcaaaataacatggtttctataaaattcatatcttccccatcctaaagtcaattcccagaacttcgtaaaactaatgttaacatcacaactagtttaaggcttcaattgtgtgtgaaaggttaatatacagaatagttcaacatgaaaaccaaatgttatatactctattcactattgttctcacacacttgtcaaatttgaaagaaagcataagcaataatcacttgcctctcgttggtgcgccaaatcggtcccccattgtccatgactacctttagcagctccaaagacaatatcttccccctcaagagaatttgatcatctgggtgttcaggcgatgagaatttcattgacaacttgcacaaattcttgaataggagaaaaccatcatccctaatcttactgccacatgattcagttccttcatttgattcgatctctccagattcgccctcttttccatctgcttcagacacagaaccattgccattttgcaatttgtgcgaggaattctccaccgaatggctaacagaaggaaccccttcacttgctgcatccataacctcattaataaagttctggcagtactgaattgaacttccttcattcaaattcttatcagtaaattcaagcaattcgttcacagaaatcctcttaaccgcaacgtccattgagtcctcctcaactctggcaaagacaattaccataatctgagccagaaccgacttagcacagatctgattagtaccattaagtcctccaagatacacattataacaagtcctaaccatattaaccaaacagtcaccacgaatcaaaacgcaaggagatcgaaccgcagaaagcagaaccctaagcacagcaagctcgatcgcctcttccccaagaccaccagacttgcaaacagcctcaaccatcttaaaaatgacatcattaggattaccactatcaatctccccacgaataagaccaagagagaataacttaaaagcacattcaagagctggctcagcaaccttagcataggcagcatcaagggcaagaaaaagaggttggagaacaaattcagcatcggaaagagataaaccaaaaagaggcgaaacgttaccaagatcggaattatcggtaagcgagtcaagcttgtctaagaccgatttacaagtggagacaaggtgagaatgcttacgccacgcagcgttcttgatgatcttgtcgagagaaggaccaattactcgaccgcaccgggatgaaccgcctagggtttgcgaagctgacattgtcgttttcttggattttggatcagagcgaattctggtggtggtggtggtgcattatttccatttccaggtggatctgatctgatctgatctgattaaaacggcatcgttttatgaatggttgaattggtatatgaataagaaatggggtctctgtggtcgcctgagacgagtgtgtgtgtgtgcgccgacaattgcgtaatcggaatgactcaaaggagcttagcttagcgggaggaaggaaccaacatagtctagcgcgcgcgtgcattacccaaccttattactttttctcaactacaatttcaaaactaacattgtctctttcttcgtgcgtgtcactcacgtgatatctccttactaactatatttataaaactttcttaattaaatatgttagtcaatattcgtgtaactttcattttgtaatatcacctcaaatatgtttaattttagggttcattcataatagactatcgacaaaagaaaaacaggtatcttgttaatataggtaatattaattaatatttttaatgtattattatacttgtaaagtcttacaattattacacttaaccttcttatataatataagattgcatagcatccaatctttttatcacgtgattctcactgtcatactctgtgtccaaaaataca

SEQ ID NO: 15377 - DNA, 5218 bp, Cannabis sativa
tatatatatgtatgtatttcttgatcattcttgcaaactatcactctatcaatacccattctttattttcttttttagatgcatattttttagttttagactggtgatgtttggtttgttgtaatgggtgttgtaatggaatcaaaatcttcattacattgtttggtttgtttttaaagtgatgtgatgggattacaatgtaataatgattacatcagatacatgaatcctcattacatcaattaaaattgtgtaatgaggattacattacaaatggttaaataaactaaactaaaaccttagtacccttttctatataaatataaaaattaaagtacggacaattttgtcaatatgtcacctattccaatattcattccaacaacaaaccaaatatcataatcgattcatattaccattcatgttctattacattactattaccattattactattccattctaccaaatcaaacattagtgtttctttttcttttttttttctccttgtctccatatttcaaattagtttatgcagctgttttatttttaactattgatttttccttggcaccaatcagtttgctaaaattacacagaaagggcatgactttcctttgctctcctggtcttatgcttgcattatgagagaaattaggtgtaattacagatgtgatgtaacttatgaataaactttagtttactgccagtttccttttttgattgtttcatgattttattcaagattttggttccttttaccatcccttgaatatcacaaagttaaacttggatccttttgattttttttttcctgtatggcaaataatcgtaattcataattacttgtgatgattcattggtttggagttgtggagtaacatatacacgtcaggttgtttgtatttgcttgcacttggtaaagatagaaatgattgtgtagaaatggagagatttaggcagaattgtcattttataggggaacacaggtacatatgcaattcttttataggtttgcagaatgtagcttctgaaaattagttgtccttgaagtttctatttggagttaataattttaccctttctacgtttttttgcatctagaggttcttatgtttattgatgcaaatcacagtcaagattttgtttatacttgtttcctaaaggttccattttttcagttacaatggcatctctaaacttttctaatcttcacctgttattatgtgatgtagctcatttatagaatgctaacatctcaagtttcaagtgaactaacaatattttgtcttgcagtggacttttaatccgttctttttccaaagtaaaagaatatatacagtcctcatttggtgcagggttctagcttacttagctgtaagtatccagttgttataatctattcaaatagttttttttgcagaataatctattgaaatagttgtttacattatttagtataagagattagctattttctgaaaacatgtttttctaaaacttgtataagcttactagaagttatttcctttatgttgtccttatttttcagcctctgctaatcactaaataatttgttatcatatccttgagtagtttttaaaatttctccgaggttggattcttttacctttgtgtaactgcctgtggtgaagtctatctttgtctaacagtccaaatagataggtatttcacagcaccctatgctgtattgttatattctgaaattcattatgtatatctctgcttggcttttaaggtttctcaaattcttcggatcatgacattctattccactcaacttcctggtccaaactatcattgtagagaggtaagtttaactaaagtttgtcgtgttcagtttgattacatcagcattcctcaagtacgcattttgatctctcagagtaaaatgtttctgtatgttatttatatgtacgtttgattatattgacttttttttataaccagataagtgtctctttcagggttcagaactggcaaggcttccccctccaaagagtgcaattaaagtgcttctaatcaactgttagttatgaactatctacacttttactttacctaatcaatctagaacttaaattgcacaaaccttattttatctcttattaatgtgcagttcctaatggagctatatatggctgtggtgatttgatattttcatcacacatgatctttactttggtatttgtacacacatatcaaaagtttggaacaaagaggtacattatcatgttctttgaacaatttaaattttaatgtaactagaatgcacagctacattgaggtttcatctaccaagcataacagttgcatacttcctattaatactctctgttttctcttccctatgtttttcatctccagttttatgccctcttcactatttgtaatgttaatgcttatccttgcagatggattaaacagtttgcttgggcacttgctgtgattctgagccttctaattattgcatctcgcaagcactacactgttgacgttgttgttgcttggtaagaagactttttttatctcttgatgaaaattttaggagtattgagttgtaattgacaaagagctgcataattctctggcccaggtacgcggtaaacctggtagcattttttgttgacaacaaattgccaggttagaaaaaatttagtttcaagaaaattttcacatctcttaagatttcttctattctgagactcattttctctacttgaattttcaaattgaaagtacttgaaaattgattcagtttcataatcttaggaattagtcaaaatatcaaaggacaataattattaattaagcagcaatggaatactcaatgctttaaaggtgggtgattctatgtttgttttctccagagctgcccgaccgatccattggttctaccactccacaactattaccattgagcacaagagataaggattccaggaacaaagaagagcatcagagattcataaatggaaattcagccgacactacagactgagtatggaaaatcaattattatctttggccatcaaatcttgtttcacttgcacttaatactggatgtttttcatcatgtataaattctgctttcttctagttataggaacagatgaatcacaagatttcagaataggaacatttgcagaaaattacagaacattgatttaactagctgaagctgaagatagctttggtgttaacagttttatattttgttctttgaagtttgctttcagagtaaacctgaattgtacattttgtggaatgtgtaaagtgagaaattgaatgctttttttaggaaaaagggaggccttaagctcaattattacatgtattattagaagtcacatgccatttggtttagttgatatccccagctcccccacacgtactggttgtaccatcatttttcttagttaaaaataaaaatgaaggggagacagaaagtctccattttcagacatgtagaatcaagaagaaaataaacaaagtcatcatagttataaattcaagccacttccttgtataccaggttgtcatgaataaatatgcaagcatatcatatcgtatcagatggtccacaatttttccttgggttagcctacacatctttggctgatgaagatagactaatgtgttcaaagtggattagagtagccaatccaatagtgcatgtggttgccttatgtaggcaatcggcgctggcatggcccacgtattcaattgaataatgcttcttgtctggtggccccattgtggaccacaaaatagcctttgctttttccaaccccactttctattctttctttcttttggtaggatggtgaaacatggaagttggagacagcccttgctacatccacacatgcctgtttttttttttttttttaattaatgtttttttgctttatatgtagtactacaatgatttctaccctatcggtctgagattttcagtcctactaaggtcaaacatgttaagacttaagatgggaagaaagaaaaagaaaattaatgtcttctctcttcctcttgggtatcccagaaccaagatatatataccccagattctgaacaaagttacttgttgtcctttaagccagtggcagcactattagctgtgtgtttctgagcttgcattatgactaatgagtgtctttcacattctaataataataataaacagagaatcccttttatccgtaatcttatgtcttgctggaaactagagaaatgttttcatagaactgtatatgtataatatactttataaagtttgacaatataatgatgagtcaatagcaagattggtgaccgggcggtgtgtgtaattaataacaggtaaggcacctcatcctgaacatcttgtaaaacatataattggttgaaaggtagactagtaaattttttatgcatttaataaaagtggatggtctgttagtttaaaataaataaataaaggtgcatggccatggaacacatttcatgagggtaaaattatcattattggcattggtttgaattttttttttttctccctccaatgcttcctcaatccaaggacaaatatagctgatgagtgatgttggaaagttgccaaacagagccatgaaaagtatccactgtctgtgctgaaattttagcaaagtactataaaattaaggcaagtgaacagcttaccctggcttgcttttctggattttcttgcattgtataacaaaaatattttctgtagagatggggctgggtgggtatgggtgtggggctttatcactttcttgcattgcatgcacttacatcatggcattgaggcccatcttcactcatcttttgtcaacgttaaaaaagaagttattattaaaaaacaaaaaaacaaatttcttttgttaatttccatggcatttcttacaccaattagtttaagctaatgaaagaaaaatgtgctggaaaagttgaagattgagatctgtttggaatgcaatgcaatcttgttaaataaggtgagaaaacagaaaacagtttcctcgtagtcatggattagaagaacttacttggactaccgtttagagctgcaaataaaagtgaaaagaggaaattacacggaatttttaaaaattcttaaatatgacaattttaagtttgatcaatttatataatatttttttttatttttaggtctttttatggtatttga

SEQ ID NO: 15378 - DNA, 6439 bp, Cannabis sativa
  modified_base (5749)..(5749): a, c, t, g, unknown or other
tgcttacccatggatggcttgaatctcttatcacatgtttttcttctcatgatcttgattgatgctctccctcatggataactttttgattgtatgacctccatgtcaagtcttttagaaagaaatatatgccatcaaaatgacttttagattgttagaaaatgttctcattacaagagaaaataggaggattacaatcaaatactcaaaatacaaataaaagtattacatcaagattacaagaaagctagagaagaagaagaataacatataataaacttgatcaagactcaaggatctttgtcctaaaagttatttcgttcctcataggacacttatggaaactctagaaatatttttaaggatttatcaagcctcatatgcttagtctagagtctaaggatgagtatatcctcacaaggttctaaccgcaataaatttaaactacacctctcataagtgaacaatatgacctctatttatatagagttttcactctcatatgaacatgaatgatcacaataaagcccttagatgttgccaatcataaattggacatttatagtattaaatgagtgatttggaggagctttgagctattagaaagactcccaaactttcaaaaatatatgcacttgtatgctaaaaaaaatagtaactaattactagttattttttttttccagctttgatcaattcttctctaaagtattctatatcactctcatttgattttgaactatttatacaccttataaatgaataaatcaagtctccagcagctatattttcaatagctatcattcattcacattcataaataattagtaacatcttttactaatttaagagtgaaaaaaatgtgagagttacatattcaagttattattaaattaaaagatttgtaactcctattttgtgattattgtatacatattttgtaactccataatatatgttacaatttaacaaaattaataatttgtcacactaaattatttgtctaaagattatattatataaaataatataacactacatggttacaaataccataaatatatattttgcctcaatatcattatcatacacattaccttcttatgaaatacatcctttatataattctatttgtttttctactataaacggtcaaactcaaaaattatttcatatacaattatgctaaccatagatatatattaagttataaaaaaaaaaataacaattataatatgtacacacataaattacacacaaacataatacacacttatgtgacaagtcacttataaataagactcatcttaaataagaataattgtttataattactagccaataaatgtgtaaattatgtgtgcacatattattactcaaaaaataaataaataaataaagatacatatacaaagtaaagggaggatgatattgatgtacgtttgtatggtttttgtacgctgttgttagaaagaaccaaaaaaatagttatagtcttgtagtttatttataaagatagatctagtaataaattgactcggatgattatatgaaattctcttatatgttaattaataaatatatatacatagttgagtttacatgaaccttatttaatgttgtaggtatcttcctccatacacttccttcctccccataaactacaaagatcagcaaaagaagattttgtcacatgacaataataacagtattggtggaagaaagagtttattggaatgcttcatgttctcaccactctcttatttatccatctttataattcttatttctataacggagagaaaaaacatgaaggacgatcccctcaacttcaatgtcttaaacgttatcatcgaagtaataaggttagttattattctactatatatttctacctacattcactacacagctatacagacgagctatgtctttacctagatccccacacaaagaagtcccatgttttggacaaaaaaaatcatatgtttacatatacataaaagcttctaaaattttgaaaaatattactttatactaaaattttgaaaattaacttattttaaatagagtctctaacaactcaagtttgattttgtgtaaatacataatgttatcaaatgattaatatttttatatataggttaatctatatcaacatatatacttaattgcagtgcatatggtaatgttggcttctcaactggctatagttgtaaacgacgactccatcaaggaggtgactgtgtagacaggtgttatggcttttctgggaaatggagttctcaaggaaagtttatcttaatcattgtcatgttttttggaagacttaaaaagtttagtttgaaaggtggtaaagcttggaagttgtcttaactaattaattagctcaaaatgttactgcctttatgtattagttaaacttttatattaaactatgaaatattattgtgaatgttagaaaataaatttacaagtgtcagccccagttaacttattctgtccttagtgtcctactttgtatgattctgtgaaatcatattataataattgttgcatttaattttgttataatgtcagtatgatattttctttttgcaacaaacttttggtgagttatattattctaaaagggtatgtaatcgtttttctttgattatataaggtcggggccaattccataagctcattgagctatttttattaaaatcttctatgcatttcttaagttggtattagagctatacttggagccatggtgactagataatcaactctacctcatggagatagtgttggagttttatgtttgagcatccaggttgacatatgacatcaacctggatattgggtaagtgtaaaaacatataagagaagtactttaggatgcctaagtgatattttgaaatcccttagcctgtttttgtgttctggcaaagttggtcactacttcacagagatgttattgttcagtagaaatgagagacttgaaactcttcatttctgagtgagttttccatgttagaaatgagaaatgtgaagttgtgaatttgacttttctaacttcatggatcttagttattgtaagaaactaaatagacaattgaaactgaataagaattggataagaaaaacctagcgcaccagaccatatgtcaacctgggttatggataccctattcccgagctcctaggatcttgttttgatacttctaaggtttctgaacttcagaacgaagtctcctttcctgtttttgaccattttgaattcattggtcaaatcaaatttggtatttgagcaattaaaggtagcatcccaggttggttgtcaacctgggcactaggccaagtactaggtcaacctaagcactgggtcctgtttccaggggctcaagttttttgttttctccccgagtttaatgtaaagtctctagaaattctaggagaggctactaacaagtctgtaagagatagttatgaatgttggcatgctgccaataataagactcgttactatatgctaagcaacatggtcgatactctaaggaccaggtttgcatctgtagaaactacatctgatatcttagtaaagaaataaatcaaactaggtttgaagctaccaagaattttaccaatgctcatatgaaaccaacgcaacacagttgtgatcatcttctttaaataacatactacttttaggaatttgaactccatagagttattatattgatcaagatactcaagtgagtcctcaatagatttgactctaaattttctaccattcacctcaaactatgatatgaacaagtttaactttgatcaggctaaattaatcaatcaaatgtagacatttgaaagtttgatgggtgaaccacagaaaggagtcaataaagctctgaacactaccaataatcctaaaaatgatatggaaattcttgaagacaactatgcttctactggaaagcctaaccatttgaggaaaaggggaaaagaatataaccctaacctgcgaaagctgtaaaaccaagtcataaatctgggaagaataagaaaacaaaggggaggtgtttttactgcaaggataagggtcattggaaacaaattttccctaagttcctagcaactaaaaatctaggtatatttctagatcttttgttttaaaagaatgtgttttatagaacgatacatatacattaggaatataaattctagatctactaaacatgcatgtactttttttcagctactttattcgtggaaggggttagaagatggagagttggaaactaagagtcaataatggagcattagtatcgttccaagctagacgaaatgcccgtcttagtttttatttttctagtaatgaagtatcattttattataatgttgtatgtatggaaaaggagctttatattctatgatctaataaattagttgctttaattaactctttattatagctaaacttagaacacataagcataaaaatattaatagaatacttgtggcatctaagtataaatcatattggctatgataggaaaaagtggctatcattaggatggtcctttacatgagttaactcttggtgagttaccaacttgtgattcttgtcaagacaaaatgtctaagagactattctctgcaaagagaaatcatcagaaccaaataggtaaaatgtttaatgggggtggagaatatttaaatatgcagttcaacgatcatttaaatggacatagaattctatcacaactgaataccccagtaacttcataacaaaatggtgttgtgaaacgccagaaccgcactttgctagacatagttaggttaataattaactactcaactctacctacgtctttatcaggatatgctatagaaacagtgaataacattttaaatgtagttctatctaagttagttcccaagacacccctagaacggtggaatggtaaacaacctcatatccttaggaagaaagattcaaaacttgagtctcgtacgaaggcttgtgtttttgttggctattccaaagagactagtggtggactactttatagtcatcaggataagaaggtgtttgtctcaataaatgctacttttcttaagaaagactatacacatgacttcaaaccccacagtaagatagtattagaggagataatatcaaaattgactcctagaaatgttccttcaacatctactaaggtagatgattattctacttcctttgttgaaccaacgcaagttgttgtatatgaagaggaaaaaaatcaatgttactccaaattagaatggcacggtacttctattggttttatggtactaaatctggtacgcagcgagagaattttgtatctgattatcatcgtaccatagtccgtaggatctccagatgtatatacattaaatcaaaatataaattacatgaaaaatatatatacctcttgataactatcagggtatcctcaaaacttcttgtaacttggatccaataatcctctcactatagtcttcaaaatcgattcactatacacaaggagtagttttgggtactaagctatataaagtatataatttgttcttgttgaattctcaatacatgaccaagaacagtttgagagaaaaacaaaagttttccttttctttttggtatttcaaaaataacagtgtaaaagcatcatttgattcttaatcaggcttatatttatcatagtcaatttccaattaattaaatcatatttaattntttaaataaatatctataatcgaatttggttattaatatattagatgagggaatattttaaccacttgagagaatatctcaactaacttggaaatatctttaaccactttttaaatttaaatatctatctaattaaattaatttatcaattaattaatccaaaaaagataaaattaataggaacaccctactatagggtagtcgcctaccttgtcttaataaagagaaggatgtcgtcttttgtcctaataaatttttttcctattttattaattttaaaaattatttattacaaaaaaataaataattactaattcaaaatagatttttttaaacaaaattatacaactttttatccccacccttcacagtgttttaaaatggtgatacgagaactatgaacctataattctaagctctaacaaactagattatttattgagtctgatcaaccaaataattatgtttattaattccatgattactccactataaatattgaattgaactccttagtatttatagaattatatttcatgagttttactacatcgtccattgatataatcagttctctcttagttttaatggctcattacatggcttctttgaaactaagaggtgcattaggtagggggtgttggaaattattttaccacgatcttagatatactcacaagtatgttgatt

SEQ ID NO: 15379 - DNA, 2427 bp, Cannabis sativa
ttttgtttctttcgacagtattctatgtctaacaaccatccttatcacaaatcatgttacaaggagaggcatcatccaagatgtgatgtttgcaatagctttgtaagtttcttgtttgtatagttattaatcaacctcttacatcttttggtgtttcatttataatgaatttgttcttattattgctgcagataccaaccaactcagcaggtttgattgagtacagggcacatccattctggcgccaaaagtactgtcctgcccatgagcgcgatggaactcctcggtgttgtagctgtgaaagaatggagccaagggacacaaaatatttgttacttgatgatggtcgtaagctgtgtctagagtgtctagactctgcgattatggacactcatgaatgccaaccgctttatctcgagatacaagatttctatgaaggtttgaatatgaaagtggagcagcaaattccaatgctcttggtggagaggcaagctctaaatgaggccatggagggagaaaagaatgtaattgcaagaatgcattgaactttgattctctaacaaacagttaacgctctttcttacctaacctttctcatttgtgagcagggtcatcatcatttgccagagacaagaggactttgcttatcagaagaacagactgttacaacagtaagagcatattccttccccgattttcatcttttttaccatgactaggcgcgcttacataggatgatattttcttaactttcgttctatactaacagatattgaagaggcctaagattggtgcggggtaccggatcatagacatgataaccgagccttttaagctagttcgtcgatgtgaagtgacagcaattcttgtcttgtatggcctccctaggtaatactttacatatcttctaatgaaaaatacacaagtctttttaagtagaattttcagttaaatggtctaaaacttgtacacaggttgttgacagggtcaattttagctcatgagatgatgcatgcttggctcagacttaaaggttttggcttgtcctataatcattattatccaatgtcaatctctgtatgttttaaaacttgtgcttttactaataatagctatgatgtgtcttctttgataggttatcctaatttaagtccagaagttgaagaaggtatttgccaagtcttgggacacatgtggttggattcagagatgtattcggggttggggaacgatgttgttattgacgcctcttcatcatcgtcgtcatcttcaactcctcctcctggatctagttcatccaagaaggggaagagatcagattttgagaagaaatttggtgaatttttcaaacaccaaattgagtcggattcatcaacagcatacggcgaaggatttaggaaaggtaacgaagcagtgctcaagtatggcctaaggagtacacttgaccatatcaagatgacaggaagctttccaatttgacttgcacagaaatataatctatatctatatatgtataatcaattatttgtcaactaagttgaaatagtactttggcctttatgatattttagtgaataggattagaaaagtctaaatcccattaaagcttatacctcataagatagaataaacgactcaaaaaatggtcgattccatatatgaaggaaaccctttgtaatgtcttcagatcagaactgtttgcagttgcagtaccacatagtatttattacactcacataatacttttgagatgtttaaaagaaattgtacacaatatgaatatggaatgagaaatggcttgttttataaataacattttctaattttaaattatttcatgaatggtataatctaatatctaatttaataaaaccatttactttggtaagtattatttgtccaagttatataataatattttttaaaataatacaaaataatacttgaaatcaattttcgtaatattttttaatataatcaagcagaagataatttctaatctaaacatatgtaaaaaaaaatgtaactaacttagtcataacactttttaattaatttattattatgttcccttttcattaacaattcactaaaggcttatttggtatgccgtattgtaatatattgtattgtattatttaatacaattaaatgtttggtattgacatgtattaattgattgtgtaaagttataatatatttttaatacacttgttcccaacaccaactacgggtacgggtcccgggtaccgggttcgagtccgggtccggggtctgggttcgggttcgggtctgttgtccaggccggggtccgggtcggggtttgggtcggggtccggggtcccgataccggttcgagttcgggtcgggtccgaatccgagtccaagtcctgagtcccgggtcccaagtccaggtccgggtggccc

SEQ ID NO: 15380 - DNA, 4620 bp, Cannabis sativa
ttttttaaaaaaaaaaaagattttgtcaaattgaaaacctgccactaacagacaaaccacaaaatcgaaaaaattgccaaaaaccgcacaatcaattttaaacagttttaatttcttaacggttggttatgaaattagtaaaaaaattaaatgtaatcgaccgaatttcacccatagttctcaaataatgtccttacacatgaaaaaatgaacgacttgtcgtttcaatcccattgtttataagaaattgtaatatggccattaagagagagagggagagagaattaacaaaagtttcagtataatatgcatgaattattgttataatataataggacaaccatgatctgttttttgagctgtgttttccattaattttctcacatttatttaaaactaaaaattaaccatacccacatgtgcaacacagtctaccaaaaactaaattaatatataattactgtaaagcaactcaatttgtattattttatcaatagattctaaaatttttgtagttatgtgaccaattttttagtcttttactgcacgcgtataatattaatctataaaataacattaacaagaacattaaacaaatgttcagtacatacattatgcaaaattaaattttatacttagaaaaaccattctactctatgcactgtttgctacactgataatctttctctctttgcaattttttcttttgtaaaagatctgatatggctgaagtagttggtggagcgcttctctctgctttccttaatcctttggtgaacaagttaactacagagatgaaggacttcttcaaaggaaaagatgtgattctcaagctgttgaaggagctcaaaacattgttgtccacagctgatttgctgctcattgatgctgaggagaagctcatcaaagaagaggctgtgaagaagtggcttgatgatctcaaggacatcatttatgatgcagacgatttggtttacatgatcgagactgaatcatggcgaaatcaacaggaaggcgaatctcatgatggtcgcggctgcagttgtactagtagtaaggtactcatgaaactcatcttatcaacaagtactcctttaacttcttttgataaagacataaaatctgagatagaagagactctaaggaaattgaaacttcttttagagaataaagatgttagtttagagcgtttgaaaaagtataagcttccagttagagcatgtgctcctttgttagaagaatctagtgttattggaagggatgctgataaagaagagattatgaagttgattctttcggatgataagattggggatggtggtaacaagctatctgtgatccccattgtggggatgggcgggattggtaagactactcttgctcaacttgcatacagggatgatagggtcgacgagaagtttgataccaaagtatggattactgttggagatgataaacttgattgcatgaaagtgatgagattaattgttgagaaactcacttctaagaaatgtgaaattgaggaaccgtacgatcttcaagatgaagtacagaaggctctgagtatgaagaaatttctatttgttgttgatgatgtttgggatgaggatccaaccaagtgggatgttctaaacaattctttcaaatcaggattgcatggaagtaagatcattgtgactacacgtagcacgattgttgcatcaattgtgagaacacagtcaatttatcagttaaaggggatatctaaggttgttggatggcaattatttgctaaacatgcctcaattgatgtagactcaaaggaaaatgatattgttgatcttcaagaaattggaagaagaattgttgataagtgcaatggtcttcctctcgcaataaagtcaattgccaatctcttaagagggaaacataataaggaggaatgggagagcattcttagtgatgatatatggggattgtatgaaagaaaaaatgatggtgttcttccagctttgtggttgagttacttttatctaccttctaatttaaagccttgtttcgcttattgtgctcggtttcctaaagattatgaattcaaaaaaaaggagataatcttgttatggatggctgaaggtcttttacattctcgaaacaaaaagagtgttgaagaagttggagacgggtacttccaagatctaatttcaaggtcattttttcagcaatcaagtgcgaatgaatcgatttttttcatgcacgatcttatacatgatctagcaatgtttgtgtccggtgaggtttctcctaaggttcgccatctttgggactcatcacaacatggtgaagaagctaatgagcataagaactttgaggagttatttaaagccaactgcttcttgcgcactttattattacaccgatatgtatcagaaattgttgagcaagattggttgtccaaattagagcatttgcatgaatcattcccacgcttaagagtactatctataaagatgaattttatcaccaagcttcctgattcaataggaaatttgaagtacttaagatacttgaagttagattgttatggtattaaagagatacctaatacaatttgtaatctgtacaatttggagacattattgttgaaagggtgtcgtcatattactcgattaccaactgatataggaaatttaacaaagttgcgacatcttcgtgttcacttatttataaaagagatgtcattgcaatttggtaagctacaaaatcttcaaacacttaatatcttttcagtgggagaaaataaacattctggtggccttgagctgttgaaagatcttcaagatctacacgggagtcttcggattcaaggaatacaaaatgttagtgatgttgaggaagtttcagatgcatcattaaagagtaagaagtttcttaacaagctatctttggtatgggaaggtgataatgatcatgacttggataaaaaaagagagatattgggtgccttggaacctcatccaagcctaaaagtacttgaaatttttggctacaaaggcaacagttttccaaattggattggagatcatcaattgctatcttctttagtattgttaacattggactattgccctaattgtagcttcttgccatcattgggacaacttccttctctaaaacacctagtcattgagaatttaaaaaatgtggtgagaataggttcagagttttattatcctacttctactacaatacaaatacaaacaaaaaagccattctttagatctttggagaccttgagatttgagggtttggatagtctccaagagtggtcatttattgaaggtggagtttttccaagtctcaagaaactttatttcgatagatgtagaagactcaaagtatcattgtttccagatcattttccattgcttagaaagcttgtgattagaggatgtgagcaactattgcctaatttactagctggaagtgctgctcacaccccatttcctaatcttgagaagttgaaaatgtttgattgtggaggtcaagaatgctttctagaagggggattgcctttgagtttaaagagcattgaaattaaatgttgtgacaatctcaagtacttagatgagggagcctttcagagactcatttttcttgagaaattggtaatttatggctgtgaaaaactccaatgcttgcctaaagaattaccagcttctctttctcatctacacattcagatttgtaaattgctaacacgacgagtcgagagggagacaggggaggactggccagtcattgctcacattcccaatatctatattacaacttagagatggaaataactccatccccaataaatatggtatgtttgtttgtttgttaaatttctttttttataacaatttagagtggcatatatagctacaatattttgatattagtttattctcattttggttgcaggatgtcaagatttcacagattaatatattgtgtgtgtgtttgctttagctcacgagttagtatttggagtctcttagtcgcggtcaagagagtttatgttgggacgttggtatgatattattgtccgctttgggcgtaaatcttcatatgttattgttcatttttatgtacatgattttttttagccaatgcgagactttagttggaaatctgataatttagtttgatgaaaagaaatagtgtgaagtagagagcaaaaaactcttaatttgtttgttactttttccatcagtttagaatattttgatattttatattctcatttggaaacagcttaacttttcagtactttcattattaatttactttgattgtccattgcttttttattattattattattttatttttattttgtgtgtgtggaaaatgattgataattgcaagagcaaatgaaaataaatctttctttttcaaaaaataaaaataaatcttttgcttctattttttattcaaacattaattcttgattatcatgacaatgatatgaaaactcacatacttctcataatcttatacattcttacgagggataattacataaagcaatattttttatacaaaaaattacatttttatgtttaaagattttatatatatatatatttacgattt

SEQ ID NO: 15381 - DNA, 9513 bp, Cannabis sativa
gcatataaaattatacaaggactatttataacaagctgaatagattaaggggcataatagtatagtgtcataagtacaggggtaaaaaagataattattctttcttttaatcaatatttgagatatttaagcacccaaaacaatatatatataaatcgtgatgacgtggcagtaacggattgatgtgtcgatcccacttcaccgtttcatagcgtaaaactaacttaaaaaatcatctaacgtgtccacaacaataaaatacataaaataataataataataataataataaaaatatcctttatgtctaaaataaattacacaaataataataaataaaacattttattacattattcgtttccttcttccctatttttacattttcttactcattggccatggccatggcgttgagatccgcaggaagaaatctctcctacgagattctcagccaaagtagttccattgaagatgacgaaactctctttcaccgctccaactccgatccattccacaaccattctgttcccaacccgaaccgaaagagacggaagaagagaaagaagaagaccgcgactaatactaatactattactacttctaccacgacgatcgagatccagagctcgattccagaggaaccgataaacggaaatgactgcgaagccgaagccgattcttccgtcttggacaatttcggaatcgcggagcaaaagtttcaggtttccgggaatggagatagttattgctcctcgaatggttttgaatcgaattacgagggttttagcgttacgcctgcgaaatttgttcgttcagggagtggagggagtgtttgtacggtcactgagcagcagccgggatttcagaatgtgcgaggggagttgagacagaggactgtcaatggtagtggcggtggtgccggagatggaggattggaagatagtgcctcgcgtgtgtacagtgaagggaaagttgaaaccgatgttgaggtgaattcggctgggaagcagagaacagaacccaatggggtcgtccttacgaaattagagactgccgagtccttggattggaaaaagcttatggcagaagatcccaattgtgagttgaatttaattttcttcgcattccccattttctttctgtaaattatgattaaaagctcaaatgaaggaaatgaaaatttctagctttacatgaaaattccccattgataacaatagtgacacaacaagtagtttagaagtagctgtgtaattactaaatacttataccgagtgattaaactatttatgaattcctattgtagttaacaattgcacagaaaattaatattgtttggtgattaatatttaaaatggaatgtttttagtaattacactgtgattacagccaatactcatatgaggccacaagaattgaaaagtgtaactggaactcctcaattacatagttactgtaataattacttcaaattacacccaaatttaattatagagtgactttccaaacatacccagatgaatttcattttgccaatgtggatgcttttattgatgctgttctgaattctgattgattctttgttctttcttattgtcagatatgttttcttctgagaaatcacctttcaagtacttcttggatgacatgttaagtggaaattcattacggaggacgacaacttttggtaatgagaaagaacgagaaagagtttatgatacaatctttcgcttgccatggagatgtgaactggtaaactaagctgcttttttttttctccacctataagaatacttagtctcttgaaaggtttattatgttgtattcagatttggtttcatgtaaaagcaacaaggtttcatggactgtacttggccaagtgaatattaatgtcatttgtttctttgttaaaattattagaactccttacaggagcacataggagtttatgttccataaggatttcatctaaattgatacttgagctttacaaattcttgcagctcataaatgtgggcttctttgtctgctttgattcatttctgtcattgttaactatcatgccaacaagaattctaacgaccatgtggaggtttataaaaacaaggttagcccatttttcttttagtttctataattgggttaatagaatatgttcaatacacattgagttcaaggatgataaaataataacatgtatctaggaaaattattcggtgacttcccaaattattagagacatgaattttatttgtaaagactaataggctgcttgatggtaatagaaagaatgaaagtttcaccctcatgcctgagctaataacttgctaagaatgagttttattgtattttaatgtcactaactctaagtataagctctttttgttaaaagaaataagctctttttctaattttatttcattttataagatacaaagcagctcccttgggaatcttactttcttatttagttaattttgtacatatttacagagtattctaaccatacttgtggcaggcagttcaaaaggccgtctgcagcagagctgtccgattttggctgctttgtaataatggtttgtggagttattcttttggaacgaacaggtttagtaaggatatgtgatattatgctctcttattcaattaccatgctagattttactctttttggtggcattattgtaattcttattacatgaatctgaattctagtatttttgtttcatttgttttagatatcagtttaatatatcatatgatccgtggtcaaggaacaatcaaactatatgtggtctacaacgtgttggaggtaacaagttgacaattaactcaagtgtctcttagaaattttaggattcgttttttctctttattctttgagacaactgtttttggatccaaaaagctcaaggaaagaagaaaaactttattgcaattatttatttagcctgcgatttttttcctctatacaatttagttctttctttctatgctataaaataaaaaagaaaaacatatactttttacaaaatgatctctttatctcaaattactagtttagtttacttctatttaaaaaatgacatgattaacctgttattgctaatgttcaaacctacttcatttgacagcgagaaaaaaaaaaaagagagagaataaattgtcaacatttttcagcccttgttactgctgccataattgttaatttgatttggcactgacatttatatgttatgatcctttacgcctgcagatatttgataaattatgtcaaagttttaatggagatgtgttgcaaaccctatttaattcagcagatggacttgcaatctctccgccagataacataaccttctggatttggagatacatgtgtgacctgactttagctgttgctgcttccaatatccttacctttgtctttaatcattttcttaaatctttttgtgaaaggtgtacaatgagttatttgactatccaatgcgaatccttaactcttattactcattcattctttcattttattagctcaagcaattactttatcaacctgtatagtcgctcacaacaacgctttactggctctgctggtgtccaataacttttctgagataaaaagcaatgtttttaagcgatatagtagggagaatattcatagtctggtatactttggtgagttacctctttataacttgtctatatgatttgtctagtgataatgtttccatatgtgcttgtaaatattaagcaaaatgtatcaaaaaaaacttcagtagctgatagttctggttttgggacttctcatttcttgtgattgagatttattatctttacaaaatatcaaatgtacatatacatattttcatttttggttctttcctgatttattgtggtttgactttgtctcataatttcccctttttccctcatatctgttttggaaatgtacttgtcaaccagattcggtggagagattccatatctcagcatttgtcttatttgttttagctcaaaacattctagaggccgaaggtccctggtttgaaagttttctttcggtaagttttctgatctctaaattgagaattggtttagtaggaaaagtactttactgaatagtaacaatacttctgctgtatagcctgtgtgactccttaatcatatttatgacagaatgctctcttagtttacgtttgtgaaatggctattgatatcataaagcactcgttcatagctaaatttaatgacataaagcccattgcatactctgagtttcttgaggacctctgcaaacaggtaactgttgattcttttgattttatgagttaatattgtttctgttgtataacagctgcaagtataataagatatgcaattgaaaaatgtatgttcttgaaagtgaagtaatggtattgtgatatgtttccaggatccttaatagtgtctcatgaaaaaggcatatgaccaaagataattagtgtggataagttgtgtttagagaatcatttggctgtattacacacttttgaataaatgaaaattagaactgtaggatttgttttgttgtttaagttactcgtttgatatttaacgtttagttgtcatctctttccaaagagtttcaggttgacattagaaacttttggggattatgtttgatcgtgtaagtgttaagaacattcaaaacatagtcaagcataagcagttagtcttagtaatgttttttttgcttgtgttgagttgagaactcttgatcttttccaatatccactaagagatcatgccatgttctacttcattttgaggctgtcttctcttttctattggaatctaacctttagttttctgctattcttagattttacatatggatcttgaagattcaaagaatattctcacttttattcccttggcgccagcttgtgtggtaagctctagcttatattctctcttaacgtgttttcatggcttgtttgcaattatctgatatcttataaggatgaaaaaataaaagctcaattattcacgtgttaattttatctttagatccaaaataacatgcatcctatttttggccaatgaatttgaagaaattccagatttgaaacccattttatgttttcgtcttagttcgaacaatctctgtacaaaattaatagacttaatagagacaacaataagaagggcaaacaaaaccttagcagaattgaaaattgatagttagagggaatacctgattggaaccccattattttatgtagtggggaatagtgtttttttaatgtcttgtatcatctgtgaaaggacgagacaggcttttgtaggctttaccttagcatataaggacaaactagattatttttaatggtcaaactatagttttacctaaccggtaaagatttgattcttcacatgttcccttgatgggatatgatttaggaactatataggaaaaagaaaactcattcacttctgctacccttgttttactttttcaacaaactgtgtgctactactcttggctcaacagaaatagtttagtgagagtccatatttagtgtgtttgaattgaattttagttcaaaaccggagagttttagtgatttttggcatattgaaatcatcataactataacactagattgtcagatacattgttcatatttctttatagattattaattttatatctaataaattattaatgccctttcggttttaggttattcgagtcttgactccagtctatgctgcctgtctcccatgtcatcccttcccatggaagctcttttggattgtgctattgttttcagtgaactttgttatgctcactagccttaaggtgctcataggcatggggctacagaaacacgccacctggtatgtgaatagatgccgaaaaagaaaacaccatcttcattgtgattaatttaaaagaaagaaagaaagaaagttcaaactagacgagtctcggcttaactctttggctgctgaaagtcccctttgtctcgagcctgtggaaacctctcacacgaaacaagttaagatcaagccctcttgaaatagtgtatcaaagtcattacaatgttcgagaagggcgcagagcgatgcagtcgtatacaattccggttgtcttaaagctaagttatcagtgttgttgcctttcaattttgttacaaagaaaggatttttgatcggttggagggcaatgctggcttgtatacaaagatgtcaatgccctttcaccattagtgctatagtttcttgtatccctttgaatacttattaaatgaaataataataataataataattaaaaggaaaaaaagtcattccaatgaacaataacattgcttttctctttaaacctacttatgagtcataaatatacatctataaaaataattatatgcaacaaaaaggcgatcgggtagtgcctatcattttcctattctactcgagaaggttctttattttagggagactatcgagtagcatcaagagaccttctctgaagacatcccgtaacttctattagaagtgctacttttaaagttggaagtaattgtcgctagggcgattcgaatacataaaggcaacctagttggggcctttaggatatgcatcccatctcaatgattattaaaatttatgggcaaaatctagcactccttgtgtgtgtgtcttgtactcaactcaagtcccaaatcatgttttgttcattaaaatgaattatgagattgtttagttttggccacataatcatcctaaagatcaagaataaacagtttagactacaacaaatttctccacagaaacacaaatctctcaaatttgtgtatcacaatttactactacacataattcacaatcataatacaaataaatgttttattaatcatgttagtaacaaatcaaaatttcctccataactatagtcattagttagttatttttcttgatagccattaatattattggttccattccattatggtttgagaatgttttgtctttttaataattattagccaattaagatttgacaaaatgggtccactaaattggtaggtcagtggatcactgtcactttctccatacttctttttttttaaaaaaaattatttaaaaaaattgaattaaagataggtaaaatatggaacatttgccacctgcaaataaagataattaatcatatattatctgtttatatatattcatatattatccatatttgaaatattcatgataatttacagattttcggagcaaatatgggagtagttccttcctatattgaacctttcatattccacaacaagaatgtaaaattttaattttttttagttatttttttattataaattttaaaaagttgggattttttttatgaaaataggaatagccaaacaagcacaataaaggtcaaatttttattatttttttggctgtaaaaggctccttttgtgctgtcaaccaaaggaataataagaagtaaataataatatatgatctcattttattttcctaattaagtaattatctcatactcatataagagcaaaaattgactgatttaattgactttttacagtaaaagtggaaaatatatatttatttattatatatgaaaagtatagtttgactttgactaataaatagtaagaaaaaaaattaagtcccaagagaatgcttatagatttatttttcaattttaatctataattacccaaaaaaaaaatcattagcaccaatataatggagaaagaaaacaacaaaatattttttttaatttatttatttaattatctgaaaactaaacagtgttgatgatacctttttcagacttttaattgtacaaaagaataatatatgaatcaactttcataattatatgaaataatttacgtacctttattgaaataaaatgataagtatgtattaaagaaaaataaatttaatattttaaaattcattataaatcattgcccctagacccaccaatatttcccttttttcacgttcatttataatagtagtcatatagagaatattattttgtctacacattatataactaagtaattatatatatatagtatctatattttatgtgaaaaaaaaaaaatactaaataaagactaacattaactcaataaaatgaaatttatcaaaaaaataaaatagaagacaaactggctttttgaaaaaaaacaaaaaacggcaaaactaaaaacacctattatatttccgaaattaacggttaatttcggcgcataaaaaatttaattaaataattaattcaacattttatatcataaccatgtttttttttcttcttaagatggtttttatatcataattaattctatatatatttaatagggttattaacatttttaccccttaactttaatatttataaaattatgtttatgaattttcacgtcagtaaaaatttctcttgaactattgaaattattaggttttttttttgtttaattttttttattaaatttcattcaattttgttgatatggtaattgtctatatacgaaattctgcctcttgaattttgatatctactaaatcattatctatgaacttttaaaagtataaaattattcaccttaaatttttatccacgttagagtttgtttagtaaaattaaacaaaaatttttaaatccaacaatctcaatagtttgagaaaattttttaatgactgaaaaattcaaagcataatttagtacatgttaaaatttaagggttaaaaatctaaattaacttattttatatttatgaggaattataagaaaaaaaaatatagaaatttatacaatttaataaacatgaccaatatattttttttaatagataaaaatgaaaaaaatatatatatatatattttccatcaatattctttaaaatatatatacaagtgaaattaaccttttatatactatcataaaaacttatttaatatttaatatgatgtaactgttgatatgcttaaaaatattttaatatgattatgattaagataatttaagctgacttttgtatttttcaaaaataaataaaaaaattaacagttaaaatattattttagtaatttattattaattaatttatttattttgctatgtcaaaactcaaaaatccaaacatttacttggagcctagtataataagcgttacaatacttttatatatttattatttattttttctaaaaataataataaccgttagatgattattcatcatttaatctaatggacaacaaatatataactcttctcccgcctatagcaccccacttattttatttttatttttattttttttataattagaaaaaacagtgagagtaagatataccactgactgcactaataataaaagatttaattttttattttattttttctatataatttcccataactatctcttttatttctctctctctctctctttctttctctctcataaatttgtatac

SEQ ID NO: 15382 - DNA, 15076 bp, Cannabis sativa
gaactatccaatcaacccaagttttaataaaaccaataaaacttaatgtaagcccaaataaaaagtctaacactaatttgtaacacaacaaaaattataaaatataaacataaacacgattcgaataaattttatgaacccgcaaaatttcatatcaagttcgagttgtgttcatgtcaaactcacgtgatggtcacccctagctaacagtacgtaatcatggttgtttaacgaaggtgttcccaaaaacaaataatgctgcaaaatgttataagcctgtataaataaataaaaaaaacaaataaaactttttattttaagaaaaacattgttagccgtcggatgagaataagccaagtaaacaagggcctcgattattaataagccttatcatttttggcctcttgttaggagaaaacatttatagggtccaattactgttttgtaatttgtacagaaggacccggaaaggtcttctctttgtgtctctccctctctttctctctatttggtctttttgatacctgagagaaagccgggaacttctccgtcaacactttttctcggtttgccggcaatggcctccggtaccggtctatttgtatatacgatccttctattgctcatcggtcaaattcctactgctttcccccaaagtattatccaaatcttgccgaaggtgaatctagtctccgataaaaatgctttgtactgcgacagttggagattctccgtagagacgaacgatgctgggtactggtcgacgataccgacgagatgccggagcttcgtgaaggattacatgatcggtgaccggtataagtctgactcggaggtcgttgctggtaactctttaacgtttgctaagtctctggagatcgctggagatgggaaggacgcttgggtctttgacattgacgagactcttctcacgaatttgccttattacgaggcacacgggtttgggtaagcctgaaacgataatccagctattaattttcgtttcaaaattaaaaatgaaaatgactttaataataataatagttgtcgcttttgtgatttgcggtcaagaaaggttaggcatgtgtttgaaacgccattggtggattgaatggaccattcgaagcttgacgcgatgaaatactgcataggaggaaagaaatatcatttttttttttttggctgaattaacgtaagggaaattagtattgaaagccaaacaacattagtgaaatatggtatttaatattttggtttacattggcatattgctaataaggaaaacaacataaaagctttggtagattcttttttatgaaaaagggggaatatccttcagctatttgacagtaacgtaactgctttcttacttcaattaacctttgcttgaaatgctaaaaggaccatgttagaattaggcttaaattctatttggaattatgtgaaattttcaaacatttggtatatgtttggtcgttgtttgatggctagactttgatgattagtttgttataaggggcggctaattcaaatctttagacattaagctttgttagttatcaatatttccaacgagtttcatgattatccatcgaccattgtagacttttagattgacccgaagtcatgaagaaactgacaatgataattcatactgtactataaaggattttatcttgaaatttagttgaagataaagttattccttgaccatttttttttatgttgatgtttttgtccagtagtagtattgagtaatgtatacaatgcaagttttaggtttggtttagttttcctaaagcagatttattttcacacgatgtgttatgtttcctctttatacaaatttctgatgaataaaaaactgaacctttttaagtttctttcttgaacagatcagagaccttcgacgagaaatcttttgatgaatgggtggaaatggctcaggcacctgctattccagaaagtttgagattgtacaaagaactgcaacagttggggatcaaaatatttcttctaactgggcgaagtgaatatcaaagaaatgttactgtccaaaacctttactttgcaggctacaaaaattgggagaagttgcttttaaggtacacaacactagatagttgattgttaaagggtacaatacaatatcctgcaaccaaatctaatgcacatatatttacatatttggtaggttgactgattttctttgtgattataatacaggggaccttcagatcaaggcaaaccagccattgtatacaaatctgaaaagagatcagatttaataaatgaaggttacaccattcatgggagttcaggtgatcaatggagcgacttgttgggttttgcaatagcccagagatcatttaaacttcccaatccaatgtactatatcgcctgaacaaaatatatcatcaaatttgagactattgttgtaatttgattgcttgatataattctcttgacaattatgatggtggtggactggtgttcattttgtgagttgtattttttagtatattattctttaagtaacatcaaggtctcgacaaaagtaaaataaaaataatagtaagtgtttgatcaaggcgtattatgtcatatatagctttaattgaccgtgcaaacctaggaaaaagataaaacaagcagagtctaaatcggtctttaatcaatacgacagaataaattgatgttgggtctcacatgaaggaagattctgtgcttaataatatctcagagagaaaatttatatatatattcaaagcattcccgtgattctaagcagacaatcgattatgatatatccagcatgaaacatatgaacccatattaaccaacagtatcagattggtataacatgggttaatcacgtgacataaccatataaatccatttctttcaatataaagttacaattttttttattggttaatatgtaattaacagtattttatctggaaagtggaaactaacccccaaaaagaaaaaaaaaaaactggcttggctttctggatatgatctatctcatctcatctgttgaagacagataccagaattttggctgtactaattcctaatccagaaaagaaataaatggggacgatctaaatcataactactaataattaataatacaacctttcacccacccaccttttttttttcttcaccttcactcatggtgatcctgagcttgtaacattttctgaacctatagacactgccccacaaacaagaggccttgcagctggaatcctcaggcagtttaatccgccgccggggatgacagaacattccggttgaggtctctgcatatatttccccggaatgcaattcaaagagaaatcaaagcccacattcctgtagaagagcttgctgcattcttggctgaacccagaaaagaagttgtaagcaactgttaagttcatgagacttttgagtgaacagacgaggtctggaagaaccccagaaagcttgttatgtcccaagttgagaacttccatgtcttgaaggcaagagatggtatctggtaaatgacccattagagtattgaagctcacatccaaaacttgaatgtctgtgaaaattcctactccttcaggaatgcaacccgtcaattgattgttcagaaacaaaatctcttttagttttgaaccactcatgaatccgaagctaaaaggaatgtctccactgaacttgttattagctaagttaatcactgaagcttgtgagttccccaaactttgtggaagctcaccatcaaattcattgttgtttagaaatatggcatcaagtcttccaatgaagagattttcaggaatgggacctgaaaacttattgaatctgaggtctaagtagatgagatttgggatatcgagtgtgacactaggaaaagaacctgaaaactggttgttactgaggtctaactcaaggagggaagtaaggtccttgaaagtttcaggaacagagccagaaaacctgtttgtgtttaagtgaagaagagatatatcagtgagcaaagatagctcctttacaagagtcccttgaagatttgcatggttgagatctattccggctaccaccggattaggtgttgctcccatttggggttgaggatctgcacaaaacactcctttgtaagaacacacatcggttcccacccaagacttcaaaatcccagatgggtcatctgtgatcgcagatttccatgcctgtagagcagtgtaagctctctctagcttcgaagctgaagaataatcatatgggttttcgccattgatcccacttccacctccatttccaacccaaaaaccaccaccaccaccaccaccgcctccgttgccaatgccaacaccaacgccgccgtttccagagcctacgttgacaccaacaccaacgccaccgctcacaccaaatgcagcttctgtgataataattgttgtatgaaagagaagaaaagccagaaggcagctcttctccattttcaggttcagaataagcccaaggatgtttcactttctgatgagggatttacttgttaaagttgtccaaataaggttgtagcatttaatgatggaaaaatggtggggtttattattggctttgggcctttggctggtggtgacgagtgtggtgattagtgctctgtttttcttcttcttttttttttttttaatagaaaaataaaaaaacaccctttttatttttattttttttatattattttaactgtacatttgttgacttgttgtgagtgatgtgtgtgtgatcaggtttgtgactttatgatttaatgtaatgagaaaaaaaagagaaattttatttaggaagtttgagttcagacttccaagcttgtttattgtttctttaatctttttttgtttgttataattacacttaagaaatcacttgaatattttaacttccaacaagtcccatattcaagggggtgttcagtgaatcagtggcagcaaagcctttgaattgaacttctttgactgatagggatatttgaggatgagtattttaccaagttaaatttagaattttcaacccaaccaatgattaatatcaaatttcataatcaaacactgtacataaaagggctctcattttttttttacttttaccacaaacccataaaaagtaaagtgaatggttacttaatgtaagtagctgttatgttgctttagaaagtgttgaaaaagagtggtgtgtggtttgtgcttggtgggttattcaattcatttccttaaatgtttcactttcttttgttctattggtgaaggctttgagctccaataataaccaatatatatacctaacaagagagtgagtactttttctttcatttactattgtcttttccccctggtaattaatgtagcttaatatgtttgcaagtgccaactgtcaagttgtcctaatgatataatttcttgcaactgtcaaatttttggttttctttttctttttggttcttaatttttggttaagttaaataattgtaaaaggtgcacagttttgaggaagcagcctatacaagagacaaagtttttacttatttttccataaatgaggagtggataactacactaagcaccagctggctttggccttttatatgatgaacttcaacaaaaacctgaactcactttattgccatttttcatttaaccaatggagaagaagagaacccttttttttcctttgctgtgtataaaacacattaattattgtcccaagcccgaagtgggacatcttttctcgtagagagttattaaccaagtattaacaacacgagactcaaggaaaaactggatgttgattggttggatgtttaatttgattcaataacttgaaatgtataaaagatttcgaatatggatggattattacattcattattagattatcgtctcgagactcgaattgatcttattttaaaaaatttctccaacaattgatccaattaaacgttttcacatgttccctttgaaagactggagggtttaggtgataatctcaacttggatgggttcattccttctgatgctgctgtgttgttgatgtcagacgcctcttggcaaaatggtgttacaggagtggatctgaggagtggtcattggtctatatgttgcaaaaatcaactgcaacctctcctttagaagctgaagctaaagctattcaaatggctttatcctgggctgtgaacagcagggggactcatatttgtgtggtatctgattcgactattgcagttcatgcttttcagcagaggagaaatatttataattggaagcttttaagtatttctataagtattttagacctaattaagacttttaatgtttgtaatttcatttataccaataggtgtaatttatcttttgtggatggtttgacaaaaaaacgctagaacttctagtgaaattgctgaaatttttcaaggggagggaactcctcctgtgattcccactgttttttctgcttaatagaactgttatttcttcaaaaaaaaaaaaaaaaaaaacgttttcacatgttacaagacaaaatttatatctcagaagacaattatttagaaaggaaaatcttgaagacgtgcgatattttaaaattctataacagatgagcattgctatgaggcactagtggtgcctagcaccttctcgacatgtcgcgttgcaattggttagcgatactccttaaaagttattatattaaatatataggacccgatacttagttggaccaataacgatattgacatgtaagagagtgctaggcaccactggcgccctttagcatttctcataacagattatttatgttagttatattgtttacgtagaaattatacaaatatttgtgaaaaaaaaagtcataagataaagtcactaagtattttgatttggaagaatgctactaatggtgggttctctcctcgtgtagcttacaagtctattatcaagcttaaattgggagataaagatccaattcggagaagaattcaaaattttaaaatctcaaagaggatgaaacttttcccttggaaacttgagagggacatcctcctgttcagggaaagacttcaaaggatatttggcaacgatgttagctgttcgatttgcggtgacctagaagattgggttgaacatctgttctgtcgatgctcgctagccaaatctctctagttagctagccaatggggaatacgaagtgaggctctgtattttagcaggctcctgcagctggtcgaatgggtcctgaagccagactttttgaaggctagaaaccggaatgaattggaggccttcaggcgatttggtatatttgtctatgttttgtcctctggtctacaagaaagcaggcctatcatgatcggatttgaccgtcttctgtggtggttcttgatcgaattaggtccatggtcgatgatcttgccttggcatgggatacttagtcagttgttggtcatggtccaaatgcctctaataattttctgctacagggtgaccatgtggtgtttattgatgcggccaacaaaggcttgtgctcagctgctggaattgtgatcaccaattcggagggcatggttgtggaagctttctcagcgcgtctcgaggcaaagtccccctagaagctgagacttgggctctcttccacgcggtgcagcgctgtaattaaatttcatggttgttctaatgtcaattttgcttcagactgtcaaaccttggtgcttgaaatcaattctcgtaaggcttctgactggaagttaactactgtgttcagacatgtgttgatggggctggatcatctccctgagtcgacgatcacttggatccctcggtctagaaatgagatggctcaccgtctctcaaaacttgcttttaatttttccctgtttggttttctcaatgttaaggagttggcacctcttgtttctaactagaatttttttttctgttgtggcctggtttgggtcatttaatgaagtttgatgttcaacaaaaaaatgtatcaaattggttaattgaatattaaatatcatatattttaacttaataattattataaacaaatattaatattttgcaaggtattaccttataatgataccttcattgttttactctaagaatatgaattcaaaattgtttaattcaatatcttgacaagatgtctaagatttctttctcaattatttaaggcagttttatttgaaccaaaaaattacaaaattttttgttattatttttattttataatcaatcatcaaatttacacgtatgcactgtattagtcgtaaaaatatagtatggtatagtttcttcacatgaaaaagatcttcgaattttttttatcttcctagaaagttagttgtctcccaaaagagctttttcgaaaagttaacttgtccatctggaagaagtctcgtctatgatagttaccatccggaagggcgttctcggatgtctatcatgtccacctggaaggagtcttctcttgatgactagttttttccttcttggaagagagtcgcggatagtcaacttcagctgtctcttttcctatctaggatgtccttcagcatacaattcggtcctttttcctggaagtgtatgtctcacccgtaagcactttgtcttgtgctgatgtggagattctgatatgaggagtttgttaagtttgttaagtttgagaaattgtaccgaagttggataataaaaatattgtggagtgcaaatggattctaaaggtgaaagagggaatcaatgagaatgaaccagcgcagtgcaaaaccaggtgagtggctaagggttttactaaaatggaaggaattaactacacaaaatcttctcagatgttgtaaagtacaagatgataaggtttatgttgtctttggcagcttaaatggagtttaaagttgaacaacttgatgttaaaactgcctttttgaatggattcttggatgaagagatctacatgaagcaaccacatagaatttaagtagaagagaaaagagttgagttagtttgcaaacataataggtccttatattgtttgaaaaagtcaccaagataatggaataaaagatttgatacctatatgcaacaaatcaggttcaagcaatcaacattatatttcaagaatatggagcaatctaaaattgtgtttttattactctatgttgataatatgctcatcatgagaaaagacaaatctatgatcaaaagtatcaaagccaagctcaaaaaagaatttgagatgaaggagcttggatatttttaaaagatacttggtattgaagtttcaagtaactggaaggaagggaccattagcctgaaatagttcgggttcatcaagaaagttacttagaagtttaacatggaagatggaaatagtacatattttccgttaggtagaaaatttgtttttgtcgaaggaacagtgttcgaacaattcgaaggagaaagaggaaatgaaggatgtaccctatgcaatgattttgggattaatatatgtgatggtgagcaccagaatagatatagcttatgcactaagcatcctaagccgattcatgtccaatctggactttgaacattagaagaccttaaaatggttactaaggtatttaaagggcacttgggattatggtctgacctatgagaaagtaaaaggagaactagagttgaaagggtttgtggacgctaactatgcttcaaatagagataaaagataatcaaccacttcctatgttttaatgacaaactagaactatatatgttagaaggcccagttacactccgtgggtgccctttccatcacggaagcagaatttatggcgactataaaagcattcaaagaagcgttgtggatttgaggaattctatttgaattgaaacaaataaaaggtggaatgattgtgtactcatatagctagtcttccatccacctttgcaagaatctggcttatcatgaaaatagcaaacatataaacataagacattactagattagagagaagatagaagaagagatggttgatttagagatggtcagaacaaaagataatcttgctaatgttgggactaaggtcttaagtaataaacaagtccaagcattgcttggacttaatcaatctcagaagttagtaaattgagatttttagagcaccaaccatgatggatgcatttcatcaccgtcaatattttaatttgaagtaacttggtagaatttgcagaatagttcctccaaataaaaatagtcttcgaaagtttttcatcttcctagaaagttagttgtctcccagaagagcttttccggaaagctaacttgtccatctagaagaagtctcgtggaataatagttatatccagaagggctttcccaaatgtttatcatgtccacctgaaaggaatcttatccggatgactagctttttccctcagaagagagttccagatagtcaactcaacttgactcttttcctatttgggatttcctttcaacatacgctttagtcctctgttctaaaagtgtatgtgttacccagaagcacttgtcttgtgctaacgaggagattttgttacgagaagtttgttaaatttgttaaatcgtaactaacttaacagtttcagtcaccaacttaggatctttatcctgagcctataaatatcaccaatacttgtcattttgagtatgctaattagattgagtttcgagattgagagagagaaatattgagaggtagagagagagagaggtatagaaaaaaaagagagattgagtttgggttttgtacagatgaagaagattcttgggtaagagtgtgaaagttgaaacactttgagagaatccaacagaaaatcgatctcaactgtattgtaccatgttcttgttcaatcaataaagatgacttagtagtgttccaaaactagagtagagccataaatcacatctatctataagacttgaatcgtatatcttggtgttgattttattgttttactgcttttatagtttctagttgtttaaataactctgttcatccctattttttttttttaattattattcatgagttgttaatcttgttattattaattgtttattgattaagttttttagttattttgattctacatattagtcctaagtttttcaaatatagtttaaaggttactattaaaaaaaatatcttaaaaaagaatctgctcaatttgttttttgttttctgaatgtaaatgttgtactaaaaaaaaagaaagaaatgtaaatttcaaattatttttgtttgattttgatcattcaaatatatttaattttgatgatttatttcaactttatatatatagttgacatttttaagtaaggagaatttttctcattatcaaatttatttattcatgtagggccgtctatacaaaataataatatatgagtttgctgtttatattaattagcttagtttatttgtaagggaggtattagaaaaccatttcattatttgttcatagctagtaatttaacatcatcttgatgagatgtgtaatagtaaaatgaagttacattgatttttgtttgcattatatatatattatcttttctttctttttactaaaaaacaaagaagaatccagataaaaatgaaaaagaaactttgattttttttgtgtctatttcccatttggtttgaccagggccaaccatagtagtgacaagccatgttcccaacaatcccaaaagaggagatcgaaaacactacatttacacaacctcataattagaaaaagaaagttccatacatatgaatatgagagaagatctttatataaggaaaaagcaaagtaagctagcgcatgcctctcttgaaaccacccaaaccgatccatatctaaagactctaatggatggcagctatatataccatattacaaccaatttcatatccatggccattcatatagcttcaactgatcaatatacattacatgcatgcactttttaatggtcgcccaccaaaaccaagatatataataagaaaagggtattgttaatgagcattttaaaataaaaagtgacgtcatgaacaggttaagtttattagtagcaaacgaacgattttttattttacttaaagtatgctatagaaaattcatatccatggctattcatatatccatagtaaggtgcatatagtaaaaggtgatcttttatgaattgtaaatggtttttatattaattattattaaaacatgtagatttgatcgatcgtgtggtttagtatttttctttaaaaaatattgaaatctaccttttcaaagtagtcacatatatatatatatatattaaacatgtacggtatctgttgttttgtatttatgtacaaatgaagtaagtgtgtgttccacaaaattattgctaataattgataatcaagtacgaactgactaaacatgatgaacttaagaaaagatcgagagagagagagagagagagagagagagggagaatttggtaaatgtgaatgctaatagaagttgcggctgtcgtagtaggctgtcttgattgtccttttttccttttaattttggtaatgaataatatgaaatagatttgaaaatttagaacactagaaaaaagaaagtttgttgtttataatgggatgatttttctttagctttattgcgcactaagagagcaaagcatgatgtattgcatatatataagttggtaaatggttagtgcatgtggttgtagtgtttcttcttcttaatttgatataaatatatgtatagttttaggcaccatctcttataaatatatatggtccatatgagcagcttgctgcatcgtgggttgtctttaattaaagctgcttcccacttcttttattctctttctttgcattaaaaaataagctttcaattttgaagaaatggttggattgaaagttgaaacacaggcagttctattgacccctgatcctcccattatattaattatttcattggaacatatttttaatgctgacttatcttggatattaatttcatattggagacaatgtaagagataggttaggtaacattcaactacactagcttatgagtctgtactagtagtaagagtactctggtaatgaggtgactcatatataattgaagtgatcagttgaatctcaaagagcaaaagcatatatataaatatatatatatatatatatatattcaactgatcatttttcattctctgcttatattattttattaagctcattatttttcctcctactttatataaattatatggataaagcataagataagaaaacagttatctttgggggttcaattttcagataaaaaagtttgaaatttagaataaacgcattggatgataagaaagtctaataataatcatatcaatatatcatctagtgttgcatgaacttgcggagccaaccatatatgtcaaactttggatgaaaggaaaaaaaaaaatatgaatgttattttttttttaaaagaatttgtgagtccaaaaatatttgtctaaataattttttttgttaaagttattttatgacagtatgcattataattataatattattcttgtaaatttaattttttttaattaattgatattatctaaaacagatttaaatttttctgaacatgtttagtaaacttaaatatttaaaaatctattatatatcaatgttgtaaagtgttaactatggagaattttttaaaactatgtaaaatgaacaacactaggaaaaaaaattttaaaaaaaaatatttcatcatatctttttgaacgcaataattcaaaaaatagattgaaatttaaagttcccagtagtacttctaaaaacaatatctatatacattattaagattttttttcttcatttttttaataaagatatattataaaattttttcagtatttgttgattagtagaagagctaggttgagggtcgaccctggacaaaggttgactaggcttgtgcttaggaccctcctagctcaggagtccaaaaaaaatttatcttcttttaaaattacacattttttcttactaattttaaaaaatattatagtttttttaaaataaaagtccaaaaataattttttctatgacccactaaattttaaggcgaaccctaactaagataatgatatactatttggattagtttacatgggcttttagtaagatagtccaagtctaaactcaaaattaaattttatgataaaaaataaagaatttatactaaataataattttttaaaaaatatatatatatttttttagtcacccaaaactcttttttgttttttctaagttagttgctgacatttttttcttaatttttttcattctcttttctctctatttctcttttttattttttatccaattctctctctctctctaactattttttttatatttgtatatataataagtatatatttttatatcttatttttttaatgctattctctctcttataaataaattaagagcactcctattatatatatatatatatttttatcttttacataattaataaaaatagtatattttttttttgaatgttttgtagtttatataaagttttttatgaataatttcaatattttaacaagattgatgtcttgttgtttttctagttgatttatagttgtcattttattattttatagtcgttttttatgttgttgttaatgtattttatagttgttttatagttatttttatgtatttttttcgtacagatattgtttaatttatatgtatttttttatctgtaattttaatttatttccgacaatattttttctatatatatgtgcatttattttgtcatttttatgttgctttttagtttttcagattaaagttgtttttttaactatcattaacccaaaaaagaaaagagaaaaaaacagttgaaagaataaagttgtaacaataaattttatgaaaaaaaaggtaaataccattttggaccttgtgttctgcaaaagttaccaattggaccct

SEQ ID NO: 15383 - DNA, 5282 bp, Cannabis sativa
  modified_base (5153)..(5165): a, c, t, g, unknown or other
attctttgcctcaccaactacctaaaaaatattaattttgttaatatgtacaaaatcaagaccgagcctgggctaagacgggctaggacccacccaacccaggagcctaaaaaaatatttctcatttaaaattatacataatttttaaataaaaggcctaataattttttttttcttattcaatttcagggccggtctagtacaaaattcaatgagaaattaggacaaatttgattgtacttgcctgttctactccacttctttgtatgataagttcctgccaagaaactaaaaccatcaaaaactctaatgactcaaactcgaaaaacacattcaaacaaagaagagaaaatggtatttttagctcttacaactgcaccagtaaccaatatgtacaagtcagtaggagcttcattttgtaaaataacatcttcctttggaggaatgtactctgctttcatctcggagaccttaaaaaaatatcaaaaacaacatgtgaaaattatttcgatttgagtactaatatgttaggatcccacatcgactgagtgtggaatcagttggtgacttagtcgatgtgggattctaacataatacaactgagtaataattattaccagttggaaaagcaagtcctttgatactccgcgaaacaagtagacattatcaacgagcgaatagaagagatgatgtgtgatgctagatcgaatggctttaggaagggcttcaagtgtctcttgctgctgcaatccttctgaatctgttctaaatttcaagcacaaatgagctagcatttgctcttgcaaccgctctggtaattggttcctttgtgcaaaacttgaagctccttgaatggtgtctctctgaaattacacatacaaatctcttaataagttatgaataattttcattaaaaatatagctatttaagttatgggaaaatttaacaaaaaaatgttaaaaaatatgaaacaaaaaaaaaaacagtttaaggtaaccagttaccacgttacctctatagagtttggaaagaaataccatacttttgcctagtataaaaacattagctcttctatggagttcattactatccaaactcgtaatttaccgccatctattttaatgattggtctcaactcgagaggaataaccgataaaacacataaaactatccattctgattctatatttgttcgaataaaatgcagtgtaattttcgcataaaagattccaataaggaaagagagtttactcacaaattttcttgttctagcagtgccatgaacaaccaaattggtcatatttccaataagatatgcttgaagggctagaataaagagcatatacaagatatcaaataccatttccccagaatttacaggatgaagatcaccatagccaatggatgtgagtgtaactatagaccaataaattgaggtaacatatctatcccataaagtctcttctttgaaatgttcattgttcattccaatccatgttcttcctggatcatggtattgtgctgcaagaaaatagaatatgcacccagcaaaatggactgtgaacagagttacctatacaaacaccacatcatatttatacatacattataagcctaataatataacaacaaaaatatatgattattattatgtatagttaattttatggaagttactcacacaaataagctttgagtatcgaacccaagtgtagctatatttcctgtccttttccaatctaaaaacaatgaaaaatagatgtgagagtttgaatggagattatagcatttagagcctcacaatgtacattcataatttttatttgacattgctcgttatttttaatgttatttattaaattaaaatatatgagggtccaatattgataaattcatatgatatcatcctaatattccttagcaatacattaactataccctaatcaagcattgttaggcaaaatctcaatgaaattcaatagaaactaggaaaagtagatatgagagtatgaaaattataacataataagtcgatttcttgttatttagagcctcacaatgtacattcataacaacatttctcaacacaataacgattttcaatattacttattaaattaaaatatatgagacacgaacaatgagaaactcaaatgataataatacactatctataccgcaataaaattttattacttaaaatcctaacaataaaagtaattaatagaaacaagaaaaagtagatatgagagtatgaaaattataatataataagtcactttcttgttaactagagtctcaaaatgaaacattcataataacatttctcgactagactaaaatatgtagaacgatatgacaactcgcatagtattaggcaatctattattcatcaaatcgaagaattgtttttacctggcaaacatggagctgactctacgaagacgccataatcggagcatagtgaagtatccataagtcttaaaaggagaaggtaataattttttacccaactcagaaggaatagttgaaacaacatcaagaatcaaccatgtcttgatgtacctcttggcaattaacttaggattatcaattaggagataagtactcttgtccaaataagcaacaaagaatgtaacaacaatatcaataccaaaaaaaccattgaccacgttgtcaagtatagccagagtcccttttggtttgtctaaaaacccaaattcaaatggggttacccatgctgtgtagaacactaaaagtaccaaaaataattgccaatttctgcaaaaaaaaaataaataaataaacaagatttcccatgtatagaaactcaatctaaacaaaacctattaagattatctcaaacggttgtactattttagggttattcttttcaccaattcggtagagaatctattaacaagaccattaaaaaatctcacatttttattatttacattaataattaatttatcattgaaaaaactaaggtgacgtttggtaacacttttttaatcaattttttgtttttaaaattagaaaacaaaagtattaccaaacgatacctaatttatcgtatagtaattcaggaaaattactccatatattatttttttaatttttttaaaaaaaattaaggaatctaaagtggtttctacggtagtttctatataggttgttatacggaatttggttgcgatttaagttattctgcaaagtttctatgtcgaattaaaaatatagaaaaaaaatattttaaaatgtaaaaatgaaaaaattctgaaattttattctcccctaactatttcaacatctaagagaatttttaattcttcttttgtttttatggttgtgtatattgtaaaatattttaaataactacaacttacaaaataaaaaaaaaaattattaaatttttcttttagatgattgatgtagggtagaacctttcaataatatatatttttttaaaacaaattaaaagaaaaaagttgagtaaaaaaaacaaacaaaaagtggttatgcaccaagttggtaaaaattcaaaatttaacaccattaatatgtaaaatttggtgtatctatagggtgaaatggtgtgaaaattttactcaatttacataataaaataaaaagaagaatgaaacagagaaaaacaagagatgatcaaacctgtaatgataattaaatggcgaaacaatgaaaggagaaagctttggtcgtcgaatgttgcgagcagtggcgccgagaggaggaagaattccggtgagactatattgactgccttcatctcttgatatctccatttcattgtcatcattttctttcatcaaccatttcttattctttttcatcagatcaaaccaatctcatttcacacaaacctatataattccaatattcttgatctcagaggcgaattcgggtaaccattatcgtcggtggtagtagcgacggcgacaatggcggcgatagcgaagcagagaagtacccgaaaaacaattccattttacaatttcttcaagaagagaagaaagaaagccaatcaaacaatcctaatgaacaagtcataaacgaatggatttaaaacaagaaaaaaaaaattgaattctgtgttctaaattctaatacattttttcttctgaattgaatttttgtaaaagatttagagagagaaagaattttcttttttagagagagagaaatgaggagaagcaaggacgtgtatgaatatgatgagaggcttaaactcttttatatattttcctaatttttcttttttgctttttaattttaaatttacttttttttgtaaacaaaataatattgacaaaacaaacttattctcatcagaggcgaatcggctcggccgtagtgacggccacggcggcgatgattttttcttatgtataagttttgattgaatttgaaatagtttttttagtattagacaatttgagcgtcttgtaaatggttaccgatatttaaatcaagatggaataatttattctattcaatctgcattattttatttatattattattttatattagttatttttaatattgatctatttaatatttattaaagagtttttttttccacataactagcattttaacaacaaattaaataaattaaagataaaatatcaaattcaaagaaattatatataaagaaataattaattttattttagattatattatttatttttttataaataagaatataatatacatttaatctatcatattttgtgcggatgttagatttttcaatcaaattcgtacaagtatagattttcgcattttgtggattgaatggattgaattgaatcgtgcgaattgaattaaattagatattttattgacacctcgagtctcgtacttagttatgatatcttatgtacacatacaaattgatacattataagaaaaatgtaattttaattaattcttttttattcttaataggtttcttttattaaaaatagtttactatttaaccagtgacgaactcaaaattttagttaaggaggtactttattttttacttgataaacataatataaatgtaaaatcggttaaggcattttggtgtacgtctatttgtgtaatttatgtgtgcaattattattattattattannnnnnnnnnnnntattattattattattatctttgtttaattaaaagagagaactttttgtttgaacaaggaagagagaaccttttatttgggtcactttacatgattttgtccgtgttttcagttaat

SEQ ID NO: 15384 - DNA, 5217 bp, Cannabis sativa
ttgaccaccgctctcctcagccgtagactccgcctcagcgccgcctggattttcctaatcacattacaagtgtgcgtgggtttagggatcgaaggaaccgtttcattgggaacagatttttcgagcttcggtacggacaggactttggtgagtcgagtcattttctttctcggcttgcacgaaacgatgcttcattggtcgaggcttgtggttaagcctgtggtggacgacaccattttcggtgtcgtttcgaggaacgaaaagtggttcgagagaggagccatagctgggagtttcggtgggttgtggtattggcggctgagggacgaggttgagtcgttggtggttgtggctgaggctaaaggtgagatgttaatggaggttggtttggctgactttgctggctggtggttgtattacttgactgtcactattggtatggtgaaagtcattaagagtcttatgtgggttggaatgtctttgttttgtaggagagtaggtagaatctcatctgaaataattgactccaatactaatagtaatattgctactttaaatattgttgttgaagaaaaagtctgatcatattactgagtaaaaaattgtatgttactgtgtattttttctttctttcttttactgcttctttaagatgtataaaaaaatttcttggaaaaagaaataaagaagaagaagaaaagaatattattattcttggttttaattattttaattaatatataatgggtctcttatctatatatagctgaattatattatgatatttccttactgctaggttagttgttgtgacgttaattattattatatttataatattaattaattaagatcttgtatatcactatgacagctattaatagtattattacatttttttaatataattaattaagatgttcgaagttagaagaaatgttagttaatttgattaatattgtattgcatatatataattaccatctaattacttatattataacatgtatgatgcatacattggagatgttacaaccgtagataggcctgggtacatctttttaattagatcatctaatatgttaggagatatatattttatattttattatcataacttcttatgcatttgttgtatatatggagattttgattaggtttattaatttccaagttattgcagaataatatatatcttgaagtcaccaatctgatcatccacacggtacaatgactagctagctaattaaataataattttttaattttaattttatgaaaaagaaaaagctagctagccaagcaagtatgtttttggttctcatttgtgccctatactaatgtttgtccttttgaatttgtctcttcaaaaaaatccaaatctactataggtaaaaagaaaaaacacacatccaaatcaattacatcatgtttatatctttattacatattatttgacaataacaaactttcataatctattctaatatagtaatactttttgggcgtgcaaaatttgataattataataagtgctcttactgacatttgtctaccttgtattgggatgaaactatataatccaatgcatatatagtttcaaaaaataaaacccttttaaaataaataaataacactcaccaagtcttgtttggtttaatcaaatattgctttgtataaataaaataaacaaagcctgcggattaaaacagttctttactattgatggtatcgaaacataattatcaaatcttaaaattaaccaatgctgtcctgctaagcaactcatgatatttgtgcaaataataaaactcattataatgtacaacattgtgctatagctataataagatacaatacagatatatattatggctaatgatgatgataataataattctttcttctttgttccaccattcaacttcgaagaaattcagaacaataatcattgcggccctactattacagatgaattagaagtgatcttcaatccaaaaaataaagaccattcatttggaggaatggtgaacaataaagatgatgatgatcgatttggcttgttctatgatcaacaagataacatgatgatgatgatgaatatggctggtaataaagaagtactagtaccaaaaatttttgctcaagatcaacaaagacaagagttgcccaagtccgactactcaattttggatgatttcgatgcgatttcaatgaatttcgatgatcctcctcctcctcctcctcctcctccctttgcttctttagagtttcttagccaatgcgaaactagtggacataacaagctgagtagtcctaacaagaacacgaagataacagaaagcaacacccaaataatgaatagtcatcattatacgacacgtcgttcgaagctatcaactgaagaaatcatgagaattgccggatcatgctatataacattctcgagtgtccagggaacaaacgacaccgttttgatgcccccttttggaagctgttatgctatctccggtttatcccatggcgaaaccaaagatgtacaactagtccaccttctcttatccgtagctgaaaaagtcaacgaccaacagtttgaccaagccaccagactcctccaaagtcctcaactcactccctcttattattattcctcatcacctaataataaacccaactcagtcgagcgagttgtcctctctttcattgaagctcttcaacagaaaatcgattcagaaactggttttattactagaaaaagaagaggaagaagaagatcaatgaccagtacaactaatactactaataatgacaaagatcaattaagtcgtggtttgggtacaagcattttaagcgttacctgctttcaacgactcccttttcctcaggtacttcatttcccagctgttcaagctataatcgagagtttggatgagtttgatgataagcttcatgtgatcgatctcgagattagaagtggggttcaatggacacttttaatgaaagctttagcagagcgaaatgataataataatattaataatcaagaccgtccattatttcagcttcttaagatcacagccattggtacaccggagaatcaggtcaaaattgaggaaacccagaaccggttgacgaatctagctgagtctctgaacgtacccttttcgtttaaaatcttgatcttaacagaactggatgacatcaatgaaggtatgatcgaaactgaggaagacgaggttttagctgtgttcacctcgttattactaagaatgatgttgtataagccactgagtttggagaaattgatgagagttattaaaacactaaagccatctgtaatggttgtcatagaaacagaagttaatctaaacgcaccgtcgtttgcgaaccgattcatagaagctttgttcttctatggggctttctttgactgtttcgagacttgttttaaagaggaagaggagcttaaaacgacaatggaagaggtcttgggaatggggattgataatattgtgagtaaggaaaatggtgagagagttattagaagtgtgaggattggagtttggagagctttctttgagaggtttaggatggtggagagtaagttgagtgactcttctttgtaccaagctagcttggtggctaagaagtttggttatggaagttctttgactatggaaaggaatggaaagggtttgattgttgggtggaaaggtactccaattaattccctttcagtttggaaatttctctaatgattattatgtaaactcttctgtctctcaatttttttctctttattaattgtttatttaaatattggaagagacttggaatttgaaatatctttttttttttttttttaagaataggtttattccgcttgtagttacatatcgtaaattacacttgtattaaagattgtaatttttattatagcaaatcagttatcaaaatagcttccaaatgagaagggacagaccttctactggaaatacgatcaggatatgaacaagaatgagctaaccagttagctgcttagttcccatatcgtttaacaaactggacagaaatatgaaaagtagtaaatgaccgtataagattaatacaatccgaaataataagaccaagagaagaaagaatttggctcttgctattgatagcattaaccaacaagagacaatccgactccatagtcaccgctgtaggacgaaaatcctcaacagcactgctttcttcccagcatgctttaacccaactcaaagcctctttcattgacaacgcctcagcaacagcgggatcaatttacatatattaggaaacaaactcggggttatattttgtttaataacaactaaatcaataaaattaaggaaaaaaaattgctgaaaaaaactaaaaaaaaatgtgtctttttttcagttttcattttttttagatactaaatctaaagtaaaataattaaaaaaaaatcaattattttaataaatttaatttataagccttatttaataaatctattagaagaaaaaaaaaataatcatattatttttttatctaaaaaagaaagaaatcaaaaaaatacattcaaatgttacagtaaaagaagattagaagtcaaaaaatcgtcacacaaaatagagagctaaaatttttctcaacagctttgtcaagagcatcttttgcgtcatctctctcttcaagagcaactttccttttatcggatagatgtgccacactcaatccagatagtttttagctgcaacatagtctcagcaacaacatccacattgcgttgagccaaacgtcatgatcaactcaaaacagttaggcaaaaaagaagatttgaaaaattggagaagattggtctcttcttcaacctagaaaagcactcccagatgattcttcgcgagccatttctttcatctccttggaagtgataccttcaagcttaatcttcttgccagctcgaccattagctttcctctttaggattaaaacctcttccaaggtctcctcattgtccagatcgatcacgaggttctccctattaacctcttcacttccgggcatattccccgttttcatcaacaattaagattttagtgttttaggaaacaaacggagtcttctggaggtcagaactgggacccaacgcccaggttgacctggtgctgggcccagcgcctaagctgacctggtactaggcccagcgcc

SEQ ID NO: 15385 - DNA, 1572 bp, Cannabis sativa
gggtggcttctgataattgtaaaggcttattgtttttacgtatttcaaatttctcaggaagaagagacgaaatcatggaagaaactaattaatgttgcagtctcaggagctgctgggatgatatcaaatcatctacttttcaaagtaagtgtgcctagatcacattggaagtgattcttctttataaataatgttctgttatatttttgcttttggaccacaaccaagtttgttttgttttggaattccaccaagttatttgttatattttttaaaatgttttgtcatgtcattgtcagcttgcagctggggaggtttttggtccagaccaacccattgcattgaaattactgggatctgagaggtctattcaagctcttgaaggtctgtttcttaaaagattttgttttgaaaagattttgctattaacatgctgcataaaatcaagatttgttctatctctgatgtatgatttgttaaataaatgtatcaataatatggagattaccacatgagttaccagacgaaaacttattcaagtaaaatacagttcaacattttgtgtgcatgactttcaagactaaaatttaactaattttctttaataaaatcatagagtgggctggaatctaaaggtttagcttggttctaattgatgaaacaattttctgtgcaggagttgccatggaattggaggactccttgtttcccttgttgagagaggtcagcataggcattgatccatatgaggtatttcaagatgcagaatgggctcttttaattggagcaaagcctcgaggacctggactggaacgagcagacttgttagacataaacggacagatcttcgcagaacaggtttccatcatgatgttaactattagttcactttcatacacaataataagttttcacttcttatgtatttcttcaatcttcaacattatagggaaaagctctcaatgctgttgcatctcgaaatgtcaaagttatagtggttggcaatccctgtaataccaagtaaggaattccttcacgaggaggtgatcaataaagtaaaaggatttcattgtaatgcttgttactgatattactgttttcttttttcatgtagtactctaatttgtttgaaaaacgctccagacatacctgcaaagaatttccatgctttaacacggttagatgaaaacagagcaaaatgtcaggtagaaaagaaatattttataggcatcatcacacttatcaattatattaagatttaactattggaggcttgaaatgatggttataatttatgcagcttgcccttaaagcgggagttttctatgataaagtgtctaatatgacaatttggggaaaccactcaactactcaggtaatataaagaatttggtctgttaggaagtgaaggctttgggtagatagagctgtggctgaggttacttgtaatttctaccaggttcctgatttcttaaatgctagaatagatggggtacctgtcaaagaggtcatcaaggatcacaagtggttagagaatgagttcactgaaataattcagaaggtaagaacttt

SEQ ID NO: 15386 - DNA, 5723 bp, Cannabis sativa
taatatttttgtaaatattaaatattataaatgtttattttttctttgaatagtataaatgtttattttaaataattttagcttaaaacagaaaaaatcccttcttttttccttgtagaaacgacgctgtcgttgtttgttggagacaaaacaacattagaagcaaaaaacgacattataagcgataaacgacaattaatgaacgaatttttttgttgcagaaacgataccatcgttcgttggatacaaacgacattagaagaaaaaacgacattataagtgataaacgacagtgtcgtttgttgtaaaaaaacgacattagaagataaaaacgacattaaataaacgacattaataaaaacgacattagaagagaaaaacgacatttaataaacgaaacatattacaacgtcaaaagataaaaagagtgggaaagaacgacaaaaccattcccgccattgttgtggggaagacaaagaccaaaggagcagaggttattggctacataagtaagcacaactcactgaaatctcaaaccccatttctttctccatctttgtagctgaactgaagccattgcttttctcagcgaactctaaatccaagggtatgggatgggtattcaagggcttttaccgctactgaaatcgataatggtacccattcacatcaaggaactggagggttcttgtgttgctattgatacatattcttggcttcataaaggagctttgtcttgtagcaaagatctctgcaaaggcttacccacctcgaggtagtatttctctctatctcttgttaaattgggaattttgagtaaaggttaaatttttattttcagaaagatatttttgagtaaatgggtcgatcatttaatggatttagaatctgggttttgtttgtttttggttatggagataaaaatttggagcattttccccatcttgaaggggggttttgactcaaactatagttaatgaaaaatttaataagttgatacataatagattggctatggtatcttaacatgttcttgttttgtgtccaatatcttaggcatattgactattgcatgcatagagtgaatctgctaaggcattatggtgtcaaacctatgcttgtatttgatggaggtcttcttccaatgaagattgaacaagagaacaaacgagccaggtatgttggttatcctttagttttgcctgttttcttactacttgatgaatgtacataattgggatttaaccaacttatatgatgctctttaatcatcagtaattttgattctttggcattaattcggctacaattcggttctaatcttgtagttatgcttacaaaattattgtatcttctcaatgtatggaatagggtccttgtttaagttaagatttaactcaataaaattgcagggggagaaaggaaaatctcgctcgtgctatggagcacgagtcaaatggaaattcttctgctgcttatgagtgctatcagaaagctgttgacatttcaccttcaattgcctatgagttaattcaggttagtaagaacactttttcttaagaaagaattgatttaccgagaaaacagaaaccatttcctgtaaagtaccataccaaatcttctgaactcgattatgagtgatgaagaaaatttattatattttcaatttcttttcttttgacattgttgcttgtaaaaggtgttaaagcaggagaatataagttatgttgtggctccttatgaagcagatgctcaaatgactttcttggctgttagcaaacaagttgatgctgttatcacagaggactcagatctaataccatttggatgtccaaaggtgagttatcaaaactttatttttcctgatttttttctcgcactatgtggtcaagatatttctcagatactttgtgaactttgttttgtccagattatttttaaaatggacaaattcgggcaagctgttcagtttcagcagtccaagctacaacataacaaggatttgagttttgctggatttacaaagcaaatgattctcgagatgtgcattttgagtggctgtgactatttgcagtcattgccaggaatgggactcaaaagggctcatgctcttatcaaacgatttacaacttacgacaaggtgaagtctcatcattcacgacattgtcatttgtaatccttaaacgaaataggcatagaatgttgttctttagacagctaatgattggtccattttcaggtgataaagcacttaagatacagcatttcttcggttccacctctttacgaagaatcattcaagaaagcactattgacttttcagcatcaacgtgtttacgatccaattactgaaaatatcgttcatttgtgtgccatttctgagaatattgaggatgatggggatttcttaggaccatatccttttcagatatatagttttcctcatgtttaaatttctgcttctattcaataattatgaaataattgaaatcccttaactatgtatatacaatgctacctcaagatatagctaaaggtatagctgaaggtgatcttgatccattcaccaaaatgccatttcaggtaaattgtttgttctacatttcttctttcgggttcatctacaattgaatgctatttcttattgattttcatgttttctttcaccaacaggagactgctagagccaacacaactttcaaactcaagaatgttgatcttggaaatgtaaagaaaaagctcgatttgcctgtacagaagaatcttctaactcagtacttctgtatccttctattcctttttaccttgtttgtgtatgtaatttcggattgaaatgtttctttcttatcatggacagttcatcatgtccataaaatgtaactggcttgagtggctaccgaacgaatggtattattaatcttaaactcagatttgtaacgggctaagatttttacttggccaagaagatagagtatacaaattagatggtgccatgaagggcttgattgtacatttggttgaaatacttgtttctcataacgtggcaatgtgagcttcttttctttgttttttcttaacttttcataggctttgcttctctcgaggcaaagagaaagtttaaggctccgcgttcatcccctattcaacccagtccaagttgtaactcctctcctaattctgaagaacatgtttcttctgaggaggatgatctttctaaacggagctgctcagagacaccatctccaattcactctaaaaatgtgagcaatctttctcttcccgatgcattttatgttcggccatttttatgataaataacaaatgttttctctataggtggaaaatggatttgcccccgaaattcaagagcttatagagtctccaaagcatggtaaggacatgaaagacatgttgaaggaaacaagtccagaacatacttcattgcagaaaccgaaacattcaatccataaaccttgtctagcacaacaaaaggaacatgagttcgggagtgtacccgatgcaattgagggaaagataagaaaagagaaccgaaaagttattgtaaggagttcatattttaagcataagtcagagcatgaaaatgatcaagaaaataaacaaaacactttgatagaggacaattcggcggccaatgtagctaccgagagtgggaatctattgaaaagaaaggaacacacaagtgggagtgttgaagaagtatgtactttcttctttactatactaactttcgatatattgtttttcttttcctttctgaaagttctgattgtctaaattccttcaggaaattgtgaagtctaagcaaatgcgcattgaatcatcatcatccaacgacggaaagtttggttcaaacatttcccatttagctgaatactctgacatagcagaaaaatcgatggaaaagtttgtttcgatcatatcctcttttaaattcgcgtcttctggctctcgtgcaagtggtcttcgagctcctttaaaagatattcgaaatacttcttccaccaacaataggtaacaaatgaactcaatttttgatcttcattgattttcactaatcatataatcatcatcataatgttgactttggcttctttgtatcgaaaggtcaacggttggtgtggacttgaaccaatttgcatatgtcccaaagaaacccaagaagagttgataaaacttcatcttcacagctgagttaggagggttgttgttgtgcaaaaattctataaagtcaacatttttttttgttgtttttgccgtatttttttactataaagtcaacacacaatgacattgtaaagacttcaaaaaaacttgaaaatgacattcatttattttttctttaccatgagagtaaaaatgttcatatatagttcttattcttaaagttatttctaatgttactctttattggtttgaataattcttcgactaatattgaagaatagaaaagatggaattgttttaaggcagcttaaaatatataagaatagtttgtcatatgctaaaaacaaattccattaattctcatagtaaaaaattcgtaaaaaaaatgacaaaaaaaattgcaaataaaatatctacaaataatatcaaacatcaatcaaattcgagtcggccaccatggatgcagaagaggaacaacacgtaaatgattacgatattttggaagaagatgataaataagttcaatttgattgcgattctgaccaagtatttgacattgataaatctcaacgtcatctctagcattattattggagcgagaaaagaagaacacatctttatcgtcaggatggagagcaagtatggtgaaccgcaacaaactcatacaaccaaatcttatcatcatttcgtcatggttgtgcaccaaattccaactccacatgtcctcgatgtccatgtaattattatcttcgggatcaacaagctcccatactttaaaaacataacactgcttttttttataccaaaaaaattgagccaaccgcactttctcgtgaaccactcctacatgtactctagaatttgaacaacgccaatcatgacctaactcttgaggcaaactaatcaaacgatatctctttgagtaaagattcaatgcaacaatgccttccgtcttcactaaaccatatggcatgtatattattgttctattgcttccaacaatagtatttcgaagataacatttacttagaggtttcgctagaaagttgaaagttgaatcactccattgtccagtctcagaagaaaaaattaataagtggaataattttcgtggtgggatacttgaaaaatcatctatcattctgacgttgacaacattatacttaacaagattattgtcatcataacctaatactactaatgcatatctacaatgatcccatctataaggggactccggaagcttaacaaacttttttgtaaaagaattgcaaatgtataaattttcacatgcatttattcccaccaacaacagatcctcgaacgatgaccataaataagtaatcgttggccctttaatgtaaggtaaaaagtctaatggtggtgtctgtccatagccaagaacttttgatctatcagatgaatagtatattgagacattaaaattaggtttagttgtattgaaagctacgaatagtagagtaaagggaagtgatgacgacgacgacaagttgtcaagtcttttttgacggtgatag

SEQ ID NO: 15387 - DNA, 9963 bp, Cannabis sativa
tctagacaaatctacttgactttttcagctggtaaaatttgtagagaagaagatgtttctagctatttcagtttttttctttgtttattaacaaaaaaaaaatgcttttctaaaaaagaaaattgttctttttctaactaagtttttgttattttttcagtatttacagtaagttcaagatgatagaatatcaagagaagatgtttgactttgtgacttaatatgaatggttttgaattgacttagttaaaacactaatttgatttttgttgttaagttggtattagacaagtaaattaatgaaggcacgtaacattaatctagcatatatatatatatatataagcttagaaacttatcgtcatacagtacaattaatattaacattaactattactatacaacacggtagaagagagaaaaggtaattaagagaaggtgttgttaatacaatagtttattatattagtaaagagagttgtaagtgaaacaagtggcaactatggaggatatacaaatgaagaaagaaggaagtaaggtggtattcaagagcattccttggcctaagtaccctgacagtgttatggttccatctgccatcactcgtgccagagttcctgcttctgtcgaaagcaatcccccattgtaagtcccacgagaaagccttgacgacatcactcgagacaacagtgacaagttcacacctgatcaacaattatactcatcaattatcttattatacatattaacttttgtgcttcatcagaaatgaccaaattataagttaccttcgagtacttcagctgacacaaatgtaatcagagccgagcccacatattgaggtacagagtaaggtaccacgatttggaagcttaacactatgcctaagcataccataatttgagatgctagtaatacttgcctgccaaataaatagatgaattataattggttttttttttaatgtccttttttcaaaattgaatgtttacctttcttcaaacatgttgctgatatagttaccaacaacaatgttcactgggagcactgtcaaaccaagacatgcaagaaagattgccacactgcttgtggaccatacaaaatagtatccagtgacgacacttgattcagccagtaaaatctccattgcatacttgagcatgaagtatataaatagctgaacctggtttagccaaaatataatgactcaagtgagagagatgattgtatatatactgaaatttagagcccaaataaatggaaagcaaaagaataaaacatactagtcaatggaaacatatatagaagaaaaggtatatgaacaaaaccatagaactaattttatgaacctttactgatggtgttagtaatctgtaagctgatacaattgaatcaactggtttctgtactttgtcagaatcttcatcagcatcatcacaatcttggagatcatcttcttcttcttcttcttcttggttagcttcatagttaattagtaatggttgtgtgcaaccattctccacagcaacatttatgcattgttctccttcaaaataaaaccaacattagctaaaaaaaatgcttacttcaagtgaaaaggggtattgaaagtcacttaccaaagtccttctctattttggcctgaattttgcgtggagatttccctgtttgttgaaatcatttgatttaaatttcaagaaaattgagaaaaatatcaaagaaaaaaaaacaaaagatataacaaacaaaccagaattagagtcgtgggaggatagatctttatagttctcacgataaggctctctaaaagaagtccaaagccagatcaaatagaaaagccatgcaagagccataacccaaccaggtaaagtgtctccattgaatgtaagcttgtaaattttgaagttagtttgaaacaaacaagcaagagcagggccacatgccattccaagggcactagcactgacaaacccagcagatgcttgcattcttagttttaatggtacacaatcactaatataccttctattaattgctcttgctgaacctaagctgtaaattacaacatatataatatcagattttcaataggccaatgatttaaacaacttaaaagagcattataggatatgaaattacttacccacaacataatcggccaattagaagaactgatatggaattaagatcataagccagagcatataaggtgtttcccaatagaagaatgatgctactaaatactagtggcctcatgtacgatctatttgaccatgcactgaaataaactgaagagaacacttgagctacggccattgaaccaatcacaactccacacacagtggctgcagctccaagggttagggaatagtggtctgctgttggaacaattatatatgtatttaccatatatagaaatgtgtttgccaagttcaagagaagtgatatgaaatgatatctctgttcatcatcaacatcgtcctcagcagacggtgttggtagttcatctgggaaaataagtgcatgtcttcccaaaaattgaagaaaatttgttgagtttgataacctctcaacagctgtgtttatggaatgaacaacaggatcctgttgaaacagatcattagatatattcattcatacgacaagaactaattaaaatgcatatgatacttggatggattatgagagtaaaccggaatggaaagttcaggctgatcgtatatggatacatagctcccacgattgtctttaaggtcttgaagttctgctagatttcgagatatggctccaacaactgccccaacactctacaccatatggtcacaaaaaagagctcaattagatgaaactaattagagacaaattaagatgaagttgtagggtactatagggtaggagcatgagattattaccacatgcttgaagacttggcgcaattgagaataaggatgattagaacgagttttgacatagtaatcagtaaatttatagccaaggcgtttatcaaatttcttcaaaatcttgcgtagaccaatagcattgatttcaacataaaagataagccttagaagatctctgcctacatctctgtaagcttcttgcacttgatcacatacttgttttccttctggctgttgtatgatgttatcatattggtctctgagatttgatatcctgcttgcaagcaatccttgttgttccagaagaaacaaaacaatcttctcaatctggagattaatgacatatgcatgttggattaatgtagtgaaaatgcatataggtgaaaagaatttaggcaaatggaatttcaaattttacctgacaatctagtaatctggagaagtctctaagaaccaaaggacgattttgttctccaacttgaatttcttgtgtatatctgtttacctttttcttcatcaatttatagttaatgtagtatctgaaaaataggcccacaaattcagaatagtcaagagaacatcaaatgtgacatatatgaagaaattaacaaacaccttaatgaacaagaaagacatctaatgcaaacataccctttccattcttgaatctgcgattctcttaacttctttccaaacgcaaccatgattgttgtacagataatcaaagtataaatcactgacaaaattaaggattgaaaaacaaaattcagcattaattacttattgtttgagatcaaaacatgacaacacatttagctgatcaagttttaatttcaaagaaagaaaagttttaagtagagaaatatagtagttgcagtgaaagtggatattaaaacacgtagccaagatgagagagggtctcaaatcaatgtctgttattaattaccaaacattgtacatgttaacaagaaatagagtggaatgcaagaatacataagtggaaaaagcaagaagccaacaaaatgcaaaacaccattatatatgttataataatgacacctgatcttttctttgacactcgtcttaaaacatttctgcatacaacaaattctgcctattatgtggagaatggaatgacaataataatactcgttagagtatttcccacccagaacgcacacgttatacatacacatatgtattatatactcatgtcatatagcggcaatgataattcaatcagaaattcacttatttatcaacgtagtgtgtgtggactatgatataatacttgaataacttcaacaattagaataaagttacggtaaaatgggattgataaatatcaataattaaaacatattaatatatattgacatatttttaatatacaaaaagtctaatttaaaaaatatactacaaaaagttagatttttttttttgttttaaaaaaaaaaaactaaaactaatatataattgcaccaaattttttattatatattattcatagtgtatgaactttttgaattatatatttacaaacgttacactcgaatttttatacccttactttgtaataataataataatatagagttggtgtcttgatctcttaaaataataatgtaaagggaattctcttttctaataagctaggataacaatactctatttaacaatatcttaggggtattataatctattctagtggtttagaatatgcttctaagttctaataatagaatgtgtatacaaaaatatatatttcaaacgctttttttccaccaaaaattcaactttattatattacatgttttggattcttttatattttgcacaaaaaaaaaaaaaaatcagatacccctttctttatcattctttaagaaagaaaaaaaacatgatctagtgacaacttttgtaattatgaatatttgactaccaaataataacaataatcatgatcaagtgattagaaacaactttgttatgcatatgttattttatatctatagttttcgaaaatgcaacagaaatctttgtcatcatgcatacaagttttttttgttagcacaagagctttttttaaaagaaaaaaattattgttatatatgtcaacacagacctctcacttttcctatttcccattcttagcggaaacaatttcaacttaaaatatacatatcaacagttgatatactaagaagtggtagtttttctttaggaaaaaataaaacaacttaaatttcagtatgcattatatttggagtgagaaatgaaagtctaagccggcctggaaaatctattgaaatcatactaatttaatacaaaaatctagctgaaattattaggctagaagtagttgtttttttaattctaattgataataagaaatatatagttcttcgtaggttcatatcattatgtgactctgttttgttgaaatttagatatatatatattatatatatataatatatgtatattatttatttcatgcatgacatgtgctaattaagcttcaaaccaaaactgttgaaaataatgaaaagtaataatgctaacagttaaaaacaaaagttaaaccagctttcttccattgcataaataagttataagtatatagatatgtgtgtactcacaggtttagaaaaactgagctagcagtggaagttaaaacttaaaaggtcatcagagtacaaattcttcagtcagacttgtcttctaatctgttattgaaatcagtttaagaacaattacaaaacaaaaatgctaaatgcagagaagagaaggaggcgagtggaagtggaagtgggtgcatggtttgtagaataatacatatatatatgcttttgaaattttatgataatataaaagcaaattaattaaaggggcattttctacatttattttggaccagacactcacttggtaagtactagtctcttcttttgacttcagttccttccatgctgaccatacacatgcctcccatttttgtggtttatagcttgatatagcaagaaaaaaccccatgcttgaatttataggagaggggggaacactcaaaactttgtttggcaagtgccacttaattaacataattattgtttattattgaattttaatatttacacttgagagagtatattcccttttctaattatttttttattgatagtgaaaaaagttaaaatcgttcatgattcatctccttttaattaagagttaattactagaaagaagagagattgtgtgggtgagatactagacaaacgacttttggagcaaagattatctatcaataaagttccccaaagacactataagacaaagtccccaaataaatatccgacacgtagtaggcatatcatacccattacccacatacaagtagcccaaataaaattcagcaaaaagaaaaaaagtagcccaaataaatatccgacacgttttagtgccatgtgatcccatacacaggggttctcacagtcactaccatttgttgtggtgtagaaaagttaacaaattaccctagctagtcaatgtcaacataatataatattattgctttaatttatgaggggactagtttataattaggtagatttaatgtcatgtacttggtgtttcatttgccctaaaacattatcttatttcttgtatttacgaatattcttcagaattttctttattccatgtatataaaattgtggctacccatgcatatagtatacttcctaatttcttgatattataactaatttaataatgtgaaactactcatccttattatataccctctttagtatttttcttttaaaataattatagatatttctcatggcagaataaaatattttctcttgatgtggtttccatttgtgtgattatgtcccaacatgtaatatatgtacatttaatttttgttgttttcacttgcgttgaggcaaaccatatatgttgatatatatatataaatataaataaattaaaattttcgtagtttttcttaagctatatatcataaatgaaattgttctcgtgtaacagacctaatttagccatgtatttatctagtgtatatttaatacttttcctccattttcaagatcctaagtattgggagaatggaatcaatttcttttggaatcccgaatcccccaaatccttatcctttggagctcggagtatcctagcttcccgtgatctcatacgtaaggaatcgtgttttcttatcgcaaatgggagatcaactaacatgtggcatgcaccgtggattccttggctggattgggatcattttagagttgccttcaatcctatgatagtttcgaattccactcttgtttcttctctcttgaatgaggacagggagtgggacttccaacaaactgctacttggatggtcccaagtgtggcaagttctctcaatttgatacccatgattcccaataacaatgatgataagttgatatggaaggatgcaaccagtggggaattctcccctcgggtggcttataaatcaatcatcaaaggtcgaagggctgaaaaagatcctatttggggtaaaatatggaaacttaagatctcggaacgaatgaaactcttcctttgaaaacttgggagagatatcttgccatttggagaaagacttcaacgcatatttggcaacgatgtggtgtgtgcaatttgtgatgaacaagaagactttgtggttcatctgttttgtcattgcccgctcgctaaatctctctggttggcaagcccgtggggagtccggagtgaagagttgaatttcaacagctctttgcagtttactaagtagctgcttgagcctacccctttgatgcaacatggaaattttgaggtggaggagttcaggaaatttggagtttctctctgcttcattctctggtcagttaggaaccaagcgtatcacgatcatgtccaaccatccttcttcatcacctttaaccagattaagagcttggtagctgagcttaattcggcgttaactactcctcaggacacgtcactgggtcaatctactctgaatgttatgcagggattgttgcaggaggattttgtggtcttcgttgatgctgcttgcaaagatctcaggtcagccgcgggtatcatcgtcactaagtctgactccgagtttgttgaagccttctctgttcagcttcaggctactctgcccctggaagctgaggcttgggctttattacatactgtgcattggtgtttaattcagggatggcacaatgttacatttgctgtggattgccaacccctggtgcagggcattaagtcgcgaaagactctggattggagggttgcaggtgtgtttgcgcggattttggatagtctggatcgtatcccgtcggccacagtctcttggattccacgttctgggaatgaaaaggctcataagcttgctaagcggtcttttaactcttatcgttttggttttttcaatgctgaggagttggcacctcttgttgccatctaaaacattttgtgtgttttggtttgtttgccttttcttttaatgaagtgatctttctcagcaaaaaaaaaaaaaaaaagatcctaagtcatcatactttatattttatataagcgtgtttttttttttaatttaaaccgtattattttatttacttataatatattcgatttttaaattttatattttagattcaatttaattaacattatagttcaaattcaatctataataatattgattgtattagatattttaaattaattactttttaatatttattaaaatatattttgtttcacataactaacaataatataaaataaattcttattattttatgttttcaaaaaataacaaactcaaaaaaaaaaaaaagagtatattttaaaataatatatttaattttgtttcaattatattttttttatatataaaaataatatattcatttttttaataacagataataatttattaatgtgaatattcatcaatccaatcttaaactaagagcaaatagataactcaataaaattatgattagaagaataataagaggctcacccaagaaaataaattaccttactaaccgaacgtttaacaaaatataataaaacacccacaattttctaacaataaagagcaacactctcaaatgacttgtccaaaataaaaattcataaccatgcactactacgaattgcttgaactaccacaagacaattagtctcaagaatcacattgtaccacccattcgacttgattgagcttagagcttcttttacactcagaatctctgccaagtactcaagttgcgtaattcctcgcctacacttagagatagcctcaaaaactttgcatcatagtcatgggctacactgctaaaactatgacagaaacgtctttaaaattataacaccaacattaatctcttgatggtattcgctaaaaaatatgaacccatatgcactcatactcaaaacacaagttttaaccatctctgccaatattttatttcaaatattaattactaaataatattaatttttttgtgtaattattattttaccaagcaaaacattaaatattcatacatatttaccctcttatctccaaacgaactttatattttaaaatatataatacaatggaatattagtggctaaactacttaaattttaaattttttaacacttaatcacaaaaattaattttttagggccaaaattacctaaactcccattctgttttgctctgtaccacttcgtttaaaaatcacagttaagtgccacagtgaactactcacgtgtacacacttatatacatagcaaattctttagtggcccacataatattaattttaaaaataattataataaaaaatttaaagttataaaaataaaaaaattattttcttttatttttcttttttttttcttcttcttaactaaaaaatcccttgcaaatcctagcacccaaccccctctcacactctctctcacggtgcacaacgtcggcgaccaccacgaagagagagagagagagaga

SEQ ID NO: 15388 - DNA, 1993 bp, Cannabis sativa
taaataaatatattaattatatgtataaaacaaaatttatgatagctaaaatgaatgttgaccacctactttaaagtcatacatgaatgtaattcttaatattattgtttatacagatatagaatttacatgtcaatcttctgcttatatagttgtctattagtttgctttcgtaaaaaaaggaaagaaaactatttagtttactaaaaatgttactcgaaacctgctgtggcttaaatcgagagtttgcaatactttccacagaagcactttcaactcttgttcccaaccagtgatgaaatttgcagacatatctaacgaatccaaggtctctacccctatgcagaagaaacatttggggatcttgccttcaattttgttgttggaaagatctaaaagttttagctcaatttgggtttttaggaacttaggaaactctgtaatgttacatgaagccaaacccaaataattcatcttaaagattagagtggaatttgttattgtatttgtcactacagaaagattgttatctgaaagataaagagctcgaagttgactcaactttgagaacatgctcatctcaattgtgccacttaagtcattttcactaaggttgagttcatccagttttttcatttcaaaaattgaccttggaattttttgtgttagcttgttcgaatacaaataaagatttgtcaattgggatgagaacggcacatttgggatggttagagggcccctatactgattaaatccaagatctagatattgtaaactaggaagttcgaacaaaattgatggaagttgaccattaaagttattagaacccagatcgagaaatgagagacgtgacaaatttttaactgaagatgttaatctgccaaaaaaaactattagattgaagattcaatgactttagtttactatcagattgaaaatttatgggaagaaaaccaatgatatttctattgaatgacacatcaatggcttcaattttaggtagatgaaaaatattttggggaaattcaccatgcagattgcagccactaagtgataaagatgtcaaggaggatagatttgcaatggatttaggtagtggtgaagaaagatccacatagtccaagtgaagtttttctaacttggtcatgttttgggcaagttttgttgttgtactatataaaagatggagactcatttcattaccagagagatcaagggaaatcatattggacaataaagtaatttcataaggcatctgaccagaaaaaacagagttagagaggttgagatgggttaaccttgaaagttgagcaaagcttgatggaatcttggaaggactaaagtcattgtaggcaaggttgagtcgttgaagtcgacgtaagctgaataggctgctattggaactcaaaggcccttgaagagaactgaaactgagatcaaggcctataagttgtcctgttatggtgctgcaggtgacaccatcccactcacaacaatcttttccttccatccaagacttcattttgtaagtattagaatctccaaaagtgcttccaaagacaatctcttgctttagttgcaacaaagcaaaggatgtgtaagggaggcatctcattggagaggagctagtgaaagatgcatttagagcaacaacacatgatcaagaagttaaacatgagtgaggaatgcaaacgattcttcatttttttgttaagaatgataataagttgtaaaagatgaggagattgtttggcttagcaggagcacttaagtacttttattttcctttttttattgacttgttattgtttataagaaaagtgttataaatgatatgacaagtatttttttccatattgataataacattataagcacaagactcattcatgagtcttgacttaaatagatgatcataacatttctatacagaataatgactcagacacccccaaattacacactatttttacacacaattaaccacacaata

SEQ ID NO: 15389 - DNA, 3411 bp, Cannabis sativa
  modified_base (2538)..(2540): a, c, t, g, unknown or other
ttttttttttttttacatttagtctcattttttaaaggaaacccgagattaaaaatgatatttattctagttttctctcaaaccgagatataaagaggccttttatcccaatttttctataataaccgggattaaaagtgatttttatcctgctttttataagagcttttatctcattggcatatattctggtttttattaaactgagataaaatgtccctaaaaattggaataaaaaatttatttttgtagtagtgatacataatcaccaaaaaaaaaaaaagaactaaaaaactaatatgtatgccgaaatatagaggtctacctaaatatctcgtgtacttataaacttacccataaatactattatatataaaaaatttcttaggtgagagcatcatttttttttctcacctgtaagggtattttttaaactattgatttttaatctgatggtaatggtttgttgtagtttatttagttatcacgaggttacacatagagaattaccatttatttatttttaactccccctattttctagccaggatctgattttttttttctttatctaaaatgatgtacgatattattattattttttgttaactttaatgagatgataatggacgaggcgggtcgggactggtgcaactgggttcatggaaaaatagtgatgaggtcgtggtttaggtgaagagaagtcggcgatgatgatgagatgagaggaaggtgggcgaagggttttctaggctcaagttaatttctgggtttggtaatattggtggggaaaaaagagaggaataatgtgattggggtctaataatgggatttctggcgaatggacgtggaggggtagatggtggtcagggtgatcgtggtttaggcgaggggaaggtagaggcgaggtggctgtggtggttaggatggaataggaagaagacgagaaaatagagttttatgagaaaaagaaatttaaggtatttgagattgttttggttaggatatattatttgagaaattatgtttaattagttttggtttttttatgttttttcgaaaattctttcacatctcgcaaagaattccaacttacgcctactgtagcaatatttctgcaaaaatccaacaaaacatattgctgattgctcctttaacttgaaccaattttgctagaatattgcttcaacagttctccaaatcaacgacaaaagctttttgttcatgcctagttttgctgtagcaaaatttaataaaaaatttagcaaaaatttcaaacctccaaatcacatccaaaactccaaattatgctccaagaacacgtgaaacaccaaaccaagtgcaaaatccaccaaaaaactaaaactaaaaatgaaaataaaaaaaaataaacatccataaaaaaactccttcatatataattataactttaataatttattaattttttctttaacaaaaatatttacaaaacttgttcttcttccaaaattcggttgcttcaaaaaggaattgacaatccaagcacaaggtaacccaactacttttcgcttcatgcatcctccaaagtgagtcaggtctttgctcgattgacctcactccccaaataatactttagacgttgctattcattttaaattcttttctgaattgctcattacaaacatccacaactctatggagataaacttagttctctcatgagaatcatgatttgttacaatataattatcacaatataatttataagctagttttgaatgataaatataatgatttgccaaataatttcacatgtggtatttacttagatttatattcagtatacaaaaataatgaacctttgctacaaacatatgaagttagaattaacaaccacaacatgaaattgcaaacgtatgaagaaacgagagaaaaaattgtttttaaaattttaattttaaattagaaaaaaatagaaaataaaatttagttaccgatcatacttgtttttttctttaaaatttttaccaaacacactgtaaaagatttctctaattttgattaaaaaacaaatatttaattttaaaaaagctaatataactaacattatatatatgtttgtatgtacattaatccattttaatttattgcatgtatctttattatttagccaattaaaataataaaaaaaatgttcttataagtgagagtaaaaatatatataaatattactaaattggaaaaaacattaaaatgagaataagtatataattatgtacatacatatcatagtgtaattataattactaattaaggttccatctcaaaaccaattggttaccatttattctatgagggacaatgttcacaacattcccctttaagatgatggctattttttgctcatcaatcttgaaccctatcagagtggacatgatcactatctgtataagtgcgaatcggataggatcacttgctcgcaagggatatggctctaataccatattaagaatcatggggttccatctaaaaactaattggcaatgagtggagtannncatgttcttatatatggctcaattctctatcatttattgtatgtgggacaatatcgacaacaatcattatactatatatataggcagtagagatttaattagagagtaccaagtaatgatttttgtttgctttaaatttttcaaactatacatggatctcgatcgaagagaggaatctggaattggaattggttttggtcgaaattatgtgtcagattcaataatggcaatgagcacgaacaatggtctaaaaaaattcaaaggttgtaacactatgttcaagttgcataaagggtagtaatcattaattaacaaggtacgacatatatagctgttcattgacatttaagttgactgcaaaacattatacccttcccaatatatatgtttatatgagacatccaatcatttctactaacctatcgttcaaatcccatatagctggtcaatttctggtagaacacacaccatatatagagaaaaatgtttgatatatagtatatctatggttaaagactatctatgttagttataatagatagattacaatggaataataaaataagatgaataaaagataaaagacaattacaactctaaacaaaatgttacaaggataatatattaaataaagagttacaattctaaaaatacaaataaaaaaagagttataactcaaaactcaaagatacaaataaatataaactatataaaaacatatatataatagagtatatatatgatatatagcagagatataaataatttattatagagagtgtatatatagtatgtatataatatatataatactatatattcaagatatatatatatataggagagcttagaggagaataagagaacaata

SEQ ID NO: 15390 - DNA, 10595 bp, Cannabis sativa
  modified_base (9195)..(9197): a, c, t, g, unknown or other
actgatttccaaaacgtggcttctaagagcgtttgggctctcctttgtgatcactaccggaggcttaggcttgttcttggaacccgggggtctgccacgtggcctgcgattgctgcttcctcctcctcctccacttccacttggctcgaagctttcgtgaccggctgagttggggtcgtcgccgctgtcgtcgtcttcgaggttttgatggtgatgactctgcttttgggggctgattttcttggtaggaggagttgttgttatggtaagattgttgtcgtttatgaactcttgctctcttcttggaccgagtttgttggcatcttcatctgtgtttcttagctgaagtgatggaggtgaagacatggaatcgactcctctcatggccacattacctgcccaccatcgattcgtcatattgctctgaaactcgttagcttaagggaaagaaagaggaaatgaaagatgaaaaacaaattcaaagtacttcatttggttatccctttctctaccttcttgttattcttttgtcttttggactctttctctctctctctccctaaagaatttttagtgacgaataatgacaaaaatagaatagctagctaattaaagatggtagcttgtatgcaccaaacaaggaataataatgctacagattttccctctctagcaagctctctctacgtttcttttcattctatcttcttgtttcttttgtttcacttgatgttaataaataattgagatgccaaataagaactcccccaaatctaccatatataataaatccaaaaaatcttatcttttttcaactcttttcttttcatcaacccaaactcagcaagaaagcgatcgagaatatattgatattatgacagaatcggacatgggttaccttgttttttcatcaaaaccctaatcctctttcccaaaacccaaatactcagatcaagtaacaaaacccctgtaaacccataagaaaaataaaaacccagttatctagacactattccaaagctccagccactttctattagcttcttttttcttccttagctatgaagacttaaactattatacgacatacgtgcccctaaacagtaataaaaagagaggaagtacagtagtagagcaatatgcaaaatcggctggtcagtacgggcgaatcagaagaaacaaaaacagagcaaaacggagcagcgtcttcagttatctgaggctgcaacagcaggggcccctccaaggccagttttcggaacctccgcgctttaccagacctgcggttaagtgtgaagcgtacgttaagggacccagtaattctaccctggcgcatgataagaagggcctgtacaattttaataaaagaaaacccaacgatgtaatatagatttaaatttttactctgtaaaatcctcttttttttttttttcttttctctctgtgtaaaaaagaaaacactaaaaaggtggttttgcagaagcctggtttacttttgtctgcctctgttgaacggttttaggttgtactacttttcaagttccgagcaagcaagttggaacgagctgttctatcctacactccttcccatcatatttgtgttgtacacttctagacaaatgctaaaagcactggttgtgtgtttataatttgtaagtataatttttaattgtagataaatatggaagtttaatttttagcactaataatattaaagttataattttgaaatttttacaggttgctagttattttgggttaagtaaataatttttaattagtttaaatcattaaatttctatttttttaaaaaaattaatttaaatatactaataagaaaataacatgtgaataatgatttagtatttaatagtgaggtatagttccaaaaatataatttagtaatattaccgccaaaaattaaacttaattatttatttataactgggagttaaggttagatattattattagtattgagtattatatagtataatgtaataatatttaaagagtatcactaattaattacaagataacatgtctaaaagtactaaatactttaggtgccaataacaatgctcttaaaataatatttaacatttttctgctctcaacttataccatattgatggtgtgaattttgtagtaagtttagttcaaataataagtttatattttagtcaaatttaattattatgcttcaattcattatgagtaaaataaattttattgtaatagatggttataagaaaatcaataaaaatatataaaaactatagtaaatatacatataaaaatataaaaaatattaatcatattaatgagtacgtagtaaaaactaaatttaaaagtgataattattgtagtataaaatttattccatattatattttattctaaatttagcataatttttgatataaattaaatttagaccatataatacactattattagaatttaattttataaaaatagatgtataccatatttaaaacactcaattaaagatgctcttaccatagtatgtatcaatcgtgttctttaaatatattgttaacatttttttgggtgcatttacacttagagaaatttagttcttctattaggcttcatcttattttgtctatttaaatgctaacgtatcattaaaaattaatatttttgtacttcaatctttgaaactatgaaagtgtactcccttcaaaaaatgagaaaaattaacttaatagataattcttaaaaaaaaaaaaaaaaaaattaaaaaaaaattgaactcttaaagaattagaaaaaagaataaaaaaatcatttggaatgattaagaaaattaaaaaagaaactaatattttaaaattaattcagagatttaaaaaataaattattttttattaaaaaattcgtttagatatgaaagaagtatattaaaatttaatttgtgtaaagattcaattttatgggaacaaagttgagtttaacttttttttcctcaaaatatttagggttgtttaagtaaacataatatttttttagattaactttctaaattttttttaagtaattttattttttaatagatttaataatttgttttaagatatgagtttgtaaatataaataactttgaatctttattttattttattttattttttggtgataaaatcttagttttttttaaatatttaatacacttttaataattttttattttttaagatatgagtttgtaaatattaaaatgcttgattttttttttttttacaaaatcttaatgtgtttaaaatatttattgaatttttaatatcttcatttgattcttttaaatgtgtttgcaaatataagaaaatttaaatatatatttttagaagtagtttaggtttgcttaagtaaacataattttttttactttaaattatttatttatttatgtaagaatattatcaaatttttaattccctttctttaatttttaaaaagtaatatgcaattataatttttaaaattaacttttttaataaaatgagacaaatttttgtgttagttaaagttaagggataaaaatattaattattagttgtaaaagaaacaaaaccaaaccaatagggcatgattatataattgttttattttgggaagaaattttaactagtaatatattttaagggatgcatttgatagtgttaaaagttcaagtgagaaaaataaaaattatatattcaaattagattgaaaggaaaatgttgctaattagactcctttttatactcgttatttaattttataacaattgtcaattaattattataaaataatatagaatagataaagaaataggagacgataaaagacaaagagaataacagaatgagagagagtaaatattatttttcttagtagtttattctaatggggttaactattatttatacaaaaaaatatgtgactagaataatgaaaaactaaatcaatgaaataaaggaaaatataatcaagcatttatagtactaattaatgcattgatttggacatctataataatattttataacactcccccttggatatttataaaaactgtctcattaaaaactttgttgtaaaaaactcggtcaaaaaaaaaagagtgaagtgtaaattaacttttcatcatttaggcattcgtagagatcttctaattgacaaattttaatcttatatgttgttttctaaagtgttaattttggtaataactttgttaataagcatgcatgattaacacttgattgaatatgttagacaccaattaatatcgtcattttcttgaagatcatatattaagaagaacttggtaaaaatatctttggttctatctcctttattataactttgtttctggttgctctactagggttccacgactcgatctacgatcggtgccatggcaggccgtgaacgtcctcggaaaagggcatcttagaggctaggtaagtcagagagagactcgaaattggaagctaagaaacaaaagaagagaggtccttcatcaactacagacgtgaagaagacgaaatcgattgatgaagtgatggggatcgaaccaattgatttttcaaaggatgaagatgatgaggatatgccttctggtttgaagcatggagaaccgctccaggatgtgtttcaagagcttctttccccaaaatcctcactgcaatcgattctgaggcaggatgatatacaagctgatttcacctattttctcaaggctaatcagcaatgctcgaggagcatttcacaaggtaatactgttattccccctgtcttaagatcaggtgcttttgtgaggaaccttgctagttcatttcagaatactgaggtggaaaagaaagttaagattgctatggaagatatagaggatgaggtagaattttggaaatccttaattttttgatatgtactaggtgctaatccaccattgtcaatcttggaaggattcattagaagagtttggaaggagaaagttgataaagttgaaatgttgtcatatggggtttatatggtgtgattttgctcagtagctgacagagatgaaataataaatggaggatatgtcttcttcaacaaaagacctgatattatgaaagcatgggatcccaataccaacttcaaaaaagaagacatcagaacagtcccaatttggatacaactccctgatttggatttgaaatattggggagaaaagtcactttttaagatagtaaggcaactgggcaaaccattgcaggttgatgctgtcacaaaatagagaaacaagctgaattatcctagagtccttatttaagtcaccattaatcaaaccgtgtcagaaatgatttggtttgaggatgaagttggctgtgatatttctgtaatagttgcatatgagtggaaacaagtcatgtgtggccattgcaaaggtatcggacatcgtactaatgactgtcgcaagcgggaaacaaaccagcaatggttagtcaaggcagaggggagaaaagatgcagcagccacaataaaagaaccagtaattgatgctgatggctttcaacaagttagaaaggggaggaaggaaaaaggaaaacaaaaagtggaggaaacccaattaagaaatgccttttcaggcactgaatcagatatcagaaactgaagagggaagtacaatgcaacaggctgctagctgctcggatgttgaaaaaaccagcaagctggacaattcagaagtggataatgcaattaataatacaagaggagggggagtacctcctcttcaaaatggatagagtgctaagttggaacatctgagggattaacgacaagcaaaaacaaaatggggttaggcaactgattcatcaacagaaaataggtcttgttggtctcctcgagacgagagtaaaagcccggaagcttggggctatgtatgtaaatatgttcaatggttggtgtttcacatcaaaccttgcatggcatgatggggggcgaataattgtggcatggaacccattaagttttacaataaacattcttaagtgtacgagccaacttaagcacttattggtgtcaacggtagatgggaagcagaaatttttcactacctttgtgtatgcttttaatgacatagagggaaggaaaattctgtggcaggatctacaaggaattcgaaccaaggaagcgtggatagtgttgggtgactttaatgagatgttgatgaaagaagagagaactgggaagagagttaactacaaaccagcagctgaatttatagaatgtattgagatgtgccaacttgaggatgtcaaatattgtggaagttacttcacttggaggaacaagcaacaaggcaatgacaaagtttattccaaaatagacaaggtacttgctaaccaacaatggctgatttctttcagcaatgcagaagtgatatttttgaacaaaggtttatttgatcatacaccggctgtattaactgtacatctagaagtacaaagtggtagaaaaccattcaagtactttcgtatgtggtcatctcatccgcaatatccagagctcatcaaaaagacttggcaacaaataaaaagagggacaaaatgtttcaagtggtatcaaagctcaaagcactcaagggggctctcaaagagctcaacaaatagagcttctccaacattcaaatagcagaagctcaagcaaaggctgccttacttgattgttaggagaacctccgaagagatccactcaatcttgaacttcacaacaaagagctagctgccataacgaaatatgcgaagctacataaagctcttaattcatttctccaacaaaaagctaaacttaattggatgaaagatggagatgaaaacacgacaattttccacaacagtatcgggcaagacaaaggcagaatagaatcctctcaattgaaaacaaagagggcattagagtggatgatccagctcaggtataacagtcattcctatctttttatcaaagcttgcttggtgataaaatgatcaataagaaagctattattaagagtgtaatttggcaagggcctttagtttcatcatctcaatccgagatgttgttggtcgatttcacaaaggaggaagttaagaaagtgttttttgaaatacctggggataaagtcctgcttattaattcagtgctgctagctatacactcttactggagtcagattatgatctagcctaagaaaattatcaaagaaatagaagctatttgctgagctttcttatggaaaggtcaatatatgctacaaggagccgggctgattgcttaggaatcagtttgtcaatctaaggcgaatggaggggctggttttaagaagatagatgaatggaatgttgcagcactagtcaaatacgtttgggcaattgctaacaaagaagacaatctttgggtgcgttgggtacatagtgtatatctcaaagatgaagagtggtggtcttatgaaccacctttgaacgcaagttggtactagcggagattagtggctgttaaagatcaatttaaacaggttggtttgtagcagatttcaggtgtcaaatatcacatatctcatggctataagttgctatgtccttcccaaaacaaagtccgatggagcaatgaagtaagggggagattcaacataccgaagcatagttttgtattgtggattgcgactgaagcaaattgtgttttttgcaacataaacattgagtcagctgaccatcttttcctcctttgttctttgcctcttaaatgtcttcagcagatgaaaacatggctctcttggagggctgaatcgaaccagttgagcaatctcattcggtggattgggaaagccaaatgcaccaaattttgcaagcaagtttatttagctgcaatggcatctcttgtgtatcaaatatggcgtgctagaaatgacatagtgtggaatttgaagggagcaaatgaatcactgatcataaggaaaataaaaaatgatgttaaaggtagaattgcttgtttttgtcctaagaaaactaatgttatagatactaattggttctccaagttgtaaaaaaaaaaagaagaggatagagggggagaattgaatgcttatatagtgattgtatttttttcataggcctctattgtaggtgttatttgtttgtaaagttgtttttggagtaatgaagaacttgttgattcatccaaaaaaataatgatactgctttattgagtgtaattcatatgtttcctgaatatgttatgaaaataatctcactcttatacattttctacatatttcatcaagtgtaagtatgttagcatgatttaaagttatctcgttaaaaatcttgttagaaaaatccagtgagacaaaatttgagctaagggaaaatgagggcaatatatatttcatatttataattatttgcaagttgtcacgttaaaaatcttgtcaggaaaacttggtggggcaaaacctgagctaaaggaaaaagagtgcaacatgaatatatctccccctcatgcacatatgatccataattattttggtgataatacacctcataagattattattatcacttttaaaatatcatcgtgtatattatctatgatcatacatttactataactcttccaaagtatgtgtggaattctaaattatggatgagaagttctaagaacttcaataattatccagtttatcgaaacatgtgtgtatgtgtgtatatataatgtggttcatatcaaagtttcaaattttaagtagttataaacataacacattgataatataaatttttatttgagataatgatggtactccaaaactatatatttgttctattcttgttgtatgatcttaatttttatataaaatgatcatatatctataattcttgatgcatatgaagtactttaggacttctctactaatacttatggacaaaatatatacatttaacattttcaatacacaaaaagaaaaaaaaaattattcttcaatcatatcaaaatcttttcaagagtctatcacaacgtataatttatgaatttatattgcatagacaaccatatgtatttttcatataataatttccttaaatgtctttattatttcatacaaaacatctttctcatatagtgcgcgtaactttgaatttattattgggttttgtgccctannnaaaattcatttcaatataattagatttactaattaatataatatcagaaatcaattttatgaaatcaaaaagagtataaagggggagaaatataaaaaaaaaaacaacaaaacaaaagaagcttgctacatatttggagtgttcaatgatgggcgctactggatgggttataaagtccactctagacatttgctccacggtctccctgtaaaggtcgtggatggccatcatacttcgtatgaggcgagtctacttagcgtagttggttttccttcttcaagccctggatttgaagcttggcctcagcaagtttggcaagaagggtgtcattggcattgggcaagttgcggttgtccaccctggtctactccagctctgtgaccaccatagtggcttctccagcagccctctccgccagcaaagctacctattgtaataagcaaaaataaaagagttgaataccatgacaagggtccaaataaaaaaaatagggggaaaagaaaaaatcttttggaactttaccacaactgcctgttgcttggcaacatgggctaaggtaaagtagtcaacactgctgcatgatgccaaagtttccaggggtagctcagaggcacttccagccacctagtccaagagttcagctaaaaatggcgtaacttcaatccccaccttgggggccagatgcttttctaagacccccacttcaattattggcccgactgcggttaaggcatgaaggttgtttgagatttcaactttccttacaaccgaaagcacggtggcccttctgcataccagtcccttctctgctttcagtcactcccttaaagccttgtttacttccttctccctctacatgcgagtgggtcaaggggtatggtctttttgggaaatgtgaatcccacaaaaggtatttttcgaatggtagaagggtgatacgggtggtgtcagcccaacctcagctgtgggtcgtaatgcggggggtggccccctgtaccaatagcagcttcttgcctctgtcttttcctgtcaagatcactgtcacccacggctttagaagaacagactttttccatggcaaacctaaatgtacctgcaagagccagcacaacattgagtgggtcagtgcatcgtaagaccctaagtctcctttttttaacaaggaccatacaattaggaccaacatttttagattagtgtatcgtatgtaatgcacaccatctctacgtcaagtaaacagtggaaaagaattcttagtgattaacaggcgagagtatcatgggggatggttactgttatctcaaaattggcactctgaagtggcatcacaagaatggtgacacgtggcatcaacttagagcacctggtcggattaacatgccgagcaggatgcctcgc

SEQ ID NO: 15391 - DNA, 3662 bp, Cannabis sativa
ttatgttctgtgttctactggtgttttataaaaatacagtatttttgaaaacatttccgttggacagtattttttgtaaaagttaactcaaattccagtatttataaattttcctatattatactctgaaaaaatccacattattcagaacattatttatttattttactagctgtaagcctgtaaagtgtgaagtatatatatgggtataaataaaatacctaattttgtattcacttccaaaaaaaatacaaaatgttgaacaggcataataatttaatttaggatgagtttagtaatattctttaattaattttttttttaaattaaaaagatgaaaatattttctaaaatcatattctataaaattatttttacatttcaattttttaattaaaaatttaaatttttaaaaaaatcattttcaaaaattttttaagtagttttttaatcaatattttagactccaactctaacttagaccttagaaactgaattcaaacctagccccatacttggacccgtccctggtaccaacttcagactcggcttcggacctgaattaaataaaattgacaaataaaaataaaaaaaaaataaaatttacaaaatacacttttattttatttttttttaattaaaatttttttgtttttcaaaaacaaaaattttatttttatttttgtgattgaaaaatttaaaaataaaaacattaccaaacaccatcttaatttttctcttttcattttaaaaagtagtatattagtgttgaaaaaatgcttgtcattagcactatcaaaagagagttaaaaacatgcacaataaatttgaattggtattttgtacaaatttttttcctgattataatattttcttacaagaaataatttcttttaaaaaaaaaaatctaataaagaccatattaattttttttttcaatcctcatcttttctagacaaaagaatattcttttacaaaattttattttgtttttcttattattttctagatcatattaaaaaaaattattattatgaatgcttaaaaatttttttaattaagaatctaaattttaaaaataaaaattttaaatttaaagtatgtggttaaaaatgtataaaaaaaaaataataatgccacaatataaccctgtttcactaaaccatttcttgaaatttttttgataaatttgtacatgaaatttaggtttatagagatggatgaaaggttagaaatgatagcacgtgtgagagtgtaagtgttagtgttagtgatagtcgtagattttatgtttgtcagaagtagccaaccaggtttggacacaagtccgtttttaattaacgtaaaaaccaaatctccgaaactgaatgaatggctctttagaaaaggtaaaagccccttttcgtcatttccactctcccttcggaatctctgctacctttctcttcttcttcttcttcttcttcttccgttacatactttcttttctgaaaccgaacatcacacattcatctcagtttcatttcctattcctctctctctttctgttctgcagtttaactaagaatttccaccacaacccagattcagttttcctttttttttacattttcaaggtatttttcatttcaaatttattcttctttttttttttgtaaaaaataaaaaataaataaaaatatgtagtaattaatgcatgagtagttccattgtttatgcatcttttttctaaaagaaattgattcgaattgatagatctggttagaaataacaaaacccagtaaacgtttgtaccttaaagcttctggttttccctcaaataattcatttttatctgtaaacttttatggaggatttcaggtctggacttgattttttgggagtttaattgatttctgactttccattgatcttcctcagcgagatttctaatgttgatctcttcactctgtgggggtgagatggtgaaaaagtttaattcttgagcctttaaattcatatcaatggaaattgaacttggatttcaaaattgaccattttatattttcagaggagttccaccaaattactagtctcttatttttttttttctattctttttcgttttgtcatttttatgattactactgttcttcctctctactctagttacaggtttaaatttaccaaacaaaaagttttcttcttcttctccgaatgaaaattgattttttttttttcttgagtgtagcatagtggtattacaatttactaatatgggtcttgggttcaaacccataccctctccctttttcctccgaatgaaaattgaattcgactaagtttttctaaccatttttatccttatctaactatatagcttagtgcttgaccttattttgggcaaattagagcattatttcctcttatctttttagtttcatacccatagaagatttggaataagaatctattctactatatactttttgctgattcaaattgggatgaatatattttgtgaaatgtgaaatcttattatcaaataacaaaagctcttgatgtaagttacccatgttatgttactgtctttactactgcttatgaagtttattgatgtaatttcttgttactttcattttgtttttaggcattatatagtaatgtgttagaaagataaggagtttatatagaaagcttgtgagatggaagagagttactgtgcttcgagaagatgggaagacttggacactgacatattggtgaagattttccagtcatttgatatatttgagttaacaaaaggaattgctcatgtgtgtagcgcatggagacttgcttgttgtgatcctttgctatggaaaacactcgatttatcgatgttgaaatcgaatttcataaaaatcccattagagccttatgtttatgttgatggtcgatcggataaaattttgactcgggtgttgaagatctccttgagtctcagccgtggaagcattttgaccttgatcttccattttaacttgtacgtgagcgacgatcagttgacttacacagccgaaaggtaagttgttaaactgttttcattttgagtttttgttgggttgaaacttgtttaagtcatttgattttttttttttatagtatttggtattggtgagttcatatgcttctacaagaaaaagagtgggaattcatgatatggtttactttttcaaacattatgcatgtttagtatagtgtttacaattcaaaggctaaggctatagaagaagataagatagtaagaaatcataaggaagaaaatatgagagaaatgagagtgactttcacttgttgtgtttggtataaacgagtcctttttctttattggtaagaggcaaaagtagaagcagcccaacccaatcatatatatctatttaaaatgggactcattatactaaaaagacatgtcagatcactgtcagtaatattttagtgcttattttgtgtgtgctcatatagaaagatcttagctatggaatactattgaggtagctcaaatggtgaggcatatggtttgctctcacatagtctacacaacaattgctatagtttcctgatctcgggatattaagactatgtttggtaggaaggaaggagagtacgatagatgaagagtttaggagggatggagaatataa

SEQ ID NO: 15392 - DNA, 2691 bp, Cannabis sativa
  modified_base (1870)..(1877): a, c, t, g, unknown or other
aatgatttattcagcttcaggatagaagccatggtcacaagtattttaccaaataaagttatgatcactaacctccacatatgtatggtccaggccgtagcataacaaggaaaccttgattctggcagtgtttaagaaatgatactaaatttgcaataccaccaaaattaaaagctccaggctttggttcgtggagattccaaggaacataagtttgaatagtattcagacccaaagcctttgctctcaacaacctatcatcccaatactgcaatcgcacaaagataggaagtaatctttctgttaaaccaagacacttgaatcttggtgaggcaagagcaaacgccaaatcagttcctccaagaaaaatagagtacagaatcattttggcaaatcaggaacttttacatttttctttcacaaggtaaacttattcattgaaaacattacagaagcctatactaagaacaatccccattacatggcaaaacaggagctcttcaatgaaaatcacagtaagaagaagaatacctcaggaagaactcgaaaatagtgcaggtctcccccaatgatttggaatgcccgaccatctttccagaatttgtcagcagaaatttcaaatttcttagcactaacctggtaaaatttcatgaaaactcttaggctaacagcaagtaataagaaaataaacaaattggccaaattttagtatggtcatgaatctaacgaaaagagtctacacctatgtatctttttcatttctcatcggagggagcttgccccctagaaatgagagactataatcaaaattgcacttaaaagagccacaaagtagacctctcaatcactagttttattcacatttggctttctcaacaccatcgagcaggaaacttatgatcagctaacgtagacagaagatcataaaatacaagtaaagaaacattttttcagtgaggcatatgaaatgttccaaacccaagtgacccagaaagaaaaaccgaagaattacacggccgaaagaacagtttcagttcataattggaagaagaagaaagaaaaagacgactgacctttttaattggggtaggatgatgagtggagtgagaagaaagaggaggaaggagagcaaagacagggacaaagataccgaaggctacaagagaaagaaaggtgatgacgaataaggtgagcctcgtggttcgcctcttcgccattgctgaaactttggagctccaaatccactccaactttttatgattgccactactaattttcattcagtcaaccccaccctttcctttccacctcacctcacctcatctcgccaaaccaatagccgtttggcttagaataatctgtgtgattttccctttcactatttacttttcacatattttccttttgataaccttaatttgtacattttgacattttgaaaacaagatttttttcactttttttattaatattatgttttcattttaatttttggggaagttttttgttggatttctccgaccatggcgaccgacaacaaaaccgataaggagaccaacaacagctatggtgatgaggaatcgagttctttctcactaagcaagtaaaatttctaataaatctttgaaggatttttcgccggataagtcttggcaccttaatatcaattatagagtgcataatatggccgggccgccattggattgcctttcacggcacggcagcgacattgatgagccaatttgccggaatgaatcctctgtaaattttgtttgagtgtagcgtaatagtattttacaatcatttaatagcttaatagctttaaggtcttaggttcgaaccatcacctctccctttttcccatccctcnnnnnnnnctaagctagccttagtggcttgaatcctctgtaaatttgattcatgaaaataaaaacttacgtaaactactacttttagtaagagttttactaaatttctttctacaattttaaggttttattaaaaacaacacaaaattatattaaattaatcaaaaaaatatttaaataatattaaaataacataagaaaaaaatcatatacaaatgtcaaaaagttagcataaaaatatcttataacatcctattttatataaataaaattttaaaaacagtacaaatgttttaaaattccataaattttttgttattttttaatattttaaaataatccaataaataattaattataataaataggccttcctaattttgaagccgacgattatataacaaaaacttggcctatactaaatcggctctgcataattttgaagcataactttttcatttttttttaattgtgggatagaatttttttcaaaaataccgtgtaatttttatactgtgtactatgttaagttttcacagttgttttttaattgttctactgttattttaatagttttgttttgttattttatagttgttttataaaacagacagtatttttgtaaaaaattctgccctacagtaaaattgtaaatttttacccaaaatacagtatttttgtaaaaaccctcaagaatatataactgcagattttgcctcgctacaaattgggcctgcgtaattttgaagccgacgattacttagtttttcgaggaaattacactctataccctttttatactgtcctcttttatttttacctt

SEQ ID NO: 15393 - DNA, 4142 bp, Cannabis sativa
gtagttataaaatttaactcaattgtagtagtagtagtagagatcgagttaggtgatcaatgggtatttataagccagctagggcaagttggaattttaataagcatatagaattatttgaatagcgtagtagtggctgctcttgggaaatgccaggtttaatatttgctttattcagtgtaaaaagttaaaataccaaaggaatttgaaaacatcacttatatgtctataaatattttgaacataataaccattcctagttcgacacgtatcgttgtgtctttatgaacaatttgacacgtttgttgatgttgaaagaagttggtctgccaattaattaattaaaaactaagattattaccaaaaatacatttcccagttttgttttcgtatcagaacagaaggaaagtgattttgtttgttttatgatttgaaaaagagtatatattctttcctctattgagagtatagcatataattaataaggcaaatccacttgcattgcaaatgacacgtctttccaagcttttgcttaaatcactagtcaaaggattacgtgtcgattttttgatcgttgaaaccacatagcatagctcagctattctattagactttagccataccgtttctgttgcttttcatccggttttatgtatattggtcggtaacgtagttacaaaatgttgtaaatgttatcaagatctgtcgagcaagagtacttacaattaccactcaaaccacacaaactatcaattatattatatatagggataccattttttttcggtgttgggtgatctactttcacgaaatgtattttgtggtatattagataactcattaaatgagtgtcagggttactattttttaaccctaattacccctagatcaatctcagctctcagatcaaataactccctcatctaacggctgccgtacatcacgaaagatattccgtaaaaatacaatcaccgaacaaaatcatatccctatatatatatatataaattttagtacgacaactacaatacacaaacaagataagtcttaactcaaacatagtttggtaattgaattagtcatatgtgtattgaaatctgaaaaaatatatataaataaaaagaaggaacatatgcaaatacaagggaagtccagcagagacagttatacacaattctttattacaaaatacaaatgtaaatttgtacaagttaccacccagccattttctaaaattctttcggtacactcgaggaaatatctttaggtttatcaaattaacgttaaacacccaaatttaaaagatgagaatgtgaaaagcattaatatgatgcacctttttaatgttgatacaaactcttaactcttcttattttgataattaaaaaaatatattcgattattatttgtcactaataatttgttaattttgtagtaaaaattaaagagaattaagcattttaaggaaaaattgacttcaagggcaaaattataattttacaaaaaactcgaaaaatgactcgtagtagactccaagacttaagaaactcaagacaaaactccatgaaagttttttttacattttcttagtcttgtacaatgatttgcaagtccacacttaaaatttctaagtataaaatttaactcactaacttgtgcgacaagttatttcacaaaaataatatttaattttcttaattaacttttaagatcacatatcattaaactaagataattcaattagaatttttttaaataagataaacaagctaggaattataagtgttaaagtgccgacaaattgacattttgtctctattaattttcggttaatcgtttaccaaatggtaaactgtttctcccaaaaactagattgccgtcgaggaaatagtgaactgaaattccttgtagtgtctcgattttcgtgtttaatagctataaacaactactttttattcccacactatataaactcgtttgtcactcaaaaaaaaaaaaaattggctgagtatttattccatataccaaaaattttcaagtgaatttaagagctcccaaaatattaactcattcaaacacttttcacacatttcgagcgaaaatttgtatttatttcttctaagtgtgcttgttaatcactctaggttcttccatgtattattacatagtttctatagtgagtttgcttgtatcacaaacacatttccttattgtgttgaggtgaggttggcactagtattgtaaacaactcgattaaagtgagattgacactacaataatctgagattaagattgatagtccttcgcggtgtaaaattattgtaagagctttagaaacacaatgatgaaaaattctaggttgtaatggttagtcaagcctattaactatgctcgatattggaactcaaagctaggtccatagctttgaagactaaggacataggtgactttgttctactgaaccttgtaaaaacaagagtttgaaatttcttacccttaaattctttactttacatgcttgattatttgctcagtatattttcttgccatactatttggattcacttgattaatttgattaattgcatggttttgtgttgaaagttttaaattttcaaaattagtttaaatttctaatttaccccctcttggaaacatatcttggattaacaattggtatcagaacaatggctcatttatttaattagatttcacaatctagtgcatggcgtttccaagtaattcacaaaataccatgttagaaggtttaagcgcaaatatagcaccatacttcaatggtgtagattttccttattcaaaaaattataatggaaacttattaccttcaatctattgattatatataatggttcttttattcccaaacatattataaatggtgtagaagctgttaaaacttatgaggcatatgatgagaatgataagaaaatattttctaaaaatgctagagctaaatatgcacttctatgtggtttgaatagagatgtgtttaaaaatattaaacaagcttctaccacttttgatatgtggaaaatgcttaaagttattcatcaaagaactagtgctatgaaaaagactaaaattcaaatttattacacttaatatgagaactttaagatgaaagcggatgaaaccattgctaacatgtatactcactttactacaattactaatggtttgaactctcttggcaatgtacttactcaaaaagatttggtgaccaagatttttagaagtcttaccaaagcttataaaggaaaagttgttgccatccaagaagccaaggatctctcaacactttccttggaagaactaattggttcactcatgaaccatgagattttcatgagagcacaagaagaagaggaagttgagaagaaaaaaaagactattgcattcaagtcttcgtcctcccatgccattagtgaagaggatgaggatagcttatgtagtgacatggaggacttggcactcttctcaaagaaatacaaaaagtccataaaattaagaagaactttgaaaagaagccacaaagagggagtgactcaaaagaaaaaagaaaaaaagcaaaggtgatccaccaatttgctttgaatgcaagaagcctagacacataaaaatggattatctaatgagaaagaagaacaaatacaaaggaaggaaaatattgacgttgactcaatagtgataaggaggactgaaaaaataaggagaaaaatgaagtagaaaacatgtgcatgatggcacttgatgatggggtaagcacttctagccaaagtgaatgtgatagtgaaaatgatgatgataacttagatatgtcatatgatgtgttgtctaattaatttaatcattttgatggttttagtaaattatttgctaaaaccaaaacccttacagtgtaagatgactactttagtaaaagaaattaagatttaaaaattaaatgaaaataaactttaacataaatctcaatgtgctacatgctcctcatataagaaagaaattattgatttgcatgctaatgtgaaaatcctaaacaatgacatatatacatttactagaggtaaagaaggttataaacttattctaggaagtttatcatgtgattttgcaaaaagtgg

SEQ ID NO: 15394 - DNA, 11142 bp, Cannabis sativa
attaaaaaataagattatttgataagaaaatgcaaatatagaagaatacaatgtgaatatatgaaaagtgtgaaattacacttctctctttctctctctctctctgtatatactctctttttctctctcttctttctctttctggtttcctcttcttttgacaaaatccttttctccttttttttttttttctgttgtttgtgccgccactgttattttttttttatttttttttatgagactcagcctttcttcttcttcttcttctttaccgacctagggtttctagggttttcagagaaaaaagtccgctgggctttctagggtttctcgagctggattccctcactttcatcagacgaatctctatgcgccgctggttcagcggcttcgttgactagttcttggaatcgcactcttttctagtattccatttcctttttcttcgttgaatcttcaggcgttcatcggttgaattgattttttttttcggttatggtttctcgattggggaagggttgattgatgtctttttgagctctgttgtttctgtttattgaggccgttttttttttgatttgaatggcattgggggatttgatggcctccaggttttcgcaatcttctgtggcgttggtttcgaatcatttggatgaagagtacgtttcgagtcatgatgatgttgttgatttgagttctcagagattggattcggagactgccagtagtagttatggcaatggtacgaatgccaccaccacgagtatggcttatttgcctcaaacagttgtcttgtgtgaatttcgtcacgaggctttcgaggcttgtattcctgctggtccttcagatactggtttaatctcaaaatggcgacctaaagatcgagtaaattcttatctcttcaactaatttcatttctttctcttaatttcttgttgaaatgggttgggtctgttgtgaatgtacctgcatcaatttgaaattcagttgatatattacattcattgattgtgccatattgtagagtagaatgactgtactggttctaaaggatacggattcatgtactgtatggttaggaattgcccaaatttggatatacaatcatttcataatgctgaagataattgactgcataaatccactgacatagaggacaattagaaatataggttcaaagcctcaaagcaccaatttcggttgaaattttcggtttaaagctaagtggatggtgatcttcatattgaaaagctaagtggatggaaggtcataagaatttagtttttattggactggactgtttttgctcccttcccaagtcttgcaacacattcgggttttacaaaaaaataaaatatattaaggatcttataaggatatggataggatgatgttgttacacaagtaaatgtgcaaccatctgaaatgcttgtttgcatgttagctgtgaatctgtgatagaagtgttatctacaggaggcacaaccaaatctgctggagacgtttacttttaaatggattttctttttttgccaattgagtgacttttgtgtatgatatcagtctcatttcaatttatttcttcttatatttattgatcgacagaattttggtatctttcaatctttcaagttgaacatgggtatttatttaaaaaatgagagtttgattaatgaatattatgtaaagttgttttcagttaatatgaaatttccatataatttatcacttaaatgcctgccttattctctctttccttgggctttgttatgctgcatttattgtctggatgactgctttattaaacttctgtttcttttcctgatgcagatgaaaacaggatatgttgctcttgttttatgtttaaacattagtgttgatcctccagatgtgataaagatatccccttgtgctagaatggagtgctggacaggtgctttattacaaagctaaattcattgtagtgcgcatttgtatgtgttggcacatgtgtcttcctatattctttttttatttttttttatttttcatgggtaactgggaacataatgttagtgacttgcttctatttacaagttgggcttctattatgatgacaagttaaaattgtaaattctcttttaagatattaactttggtaactgatgatcgatatttgattttttgtgatttttatttgtacgagtgcattgagttttttgtaattttttgcttctagatcctttttcaatggcaccacaaaaagctcttgaaacgattgggaaaaacttgagtgcccagtatgaaaggtggcaaccaagggtgaggatattattggcttgtacagtgttcatataatattgtcttagatttaattttatttaccttgaagatctttgagcaggcacgatataaggtccagcctgatcctactgtggatgaagtgaagaaactttgtaatacatgccgccgatatgccaagtctgagagggttctatttcattacaatggccatggtgtgcctaagccgactgctagcggtgaaatttgggttttcaataaggtctacaattctgctcaggttctttatgtggtttaattttaagatcaattactagagtgttgtttggtttctcatgaatcgtactgcagagttatacacagtatatcccattgccaatcagtgaccttgattcctggttgaagacaccctccatatatgtttttgattgctctgctgctgggaatgttgtgaatgctttcattgaggtaaaacattaactcaaacatataatgacttgatgtattatgtatgtattgataattaaggttacttacatgaattcattctgtaattcagatatatatatatttttgtataatgacttgatttgatggtttggcagcttcatgattgggctgcttctagctcctctggatccacaagggattgcattctgcttggagcttgtgaagcacatgagactcttccacaaagtgctgaatttcctgctgatgtgtttacatcttgtctcacaacacctattaagatggctttgagatggtgagcttctttccttgttcttctgttaggatatacatctttatttaacgtcctgcagttttatggtgctgccttgtgatgcttattccatattggctgcgtcttagttatctttagcttgtcaactgaaagtcttttagctgtgatcattttgtttagagctgtaggaggtttgaaatgtcagtgatatatactgtagtgtattgtgcatgattagcatgctatgatactgtaatgcattttatgtacttgttcaaatgtatatatttccatgcttaagacatatattcattataatgtcatttatggaatctggttacatgaaataaccatattttgaccatgtcaatcaggcttttcttcaaacgtttggatttgtgcttatctcatcatacgtgtttttttttatttctctcaaatttgtgatcagtttctgatggatgcatcgtgtaactatcggattttgcttggttttattttgtatggaatttacggtgattgatagatttttgacaatactcacccttatatactctgtgggttgctgatgggtatgttcttctcttccatttgaccataatttgttcaaatgatgagtgctttctaattttgaacacattatcacgcttttgtcattcccagttttattttgggtgtagcatccttgttgtttgactcattacagatctatgagatatgtctgttggataaaaaagaagatatgactgcctgatctttttagtaaagtaattatctgcttacattcttggtgcctataaacagattaccctagtttccagaggttgctggtttggtattaacggatgatttgaacatttgagctgtaagtttgagtgtagatgtttactgatgtgtttatttcaatgtttagcattcaacactatctttagttctgatacaggacttgcccatagctatcagggtctgtctagtttatatgtatggatgatagatttgatctgaccaactggattatagtgcttttatttttaaagagttttgtaattctgctgatcttaatggaggctgaaatttcagttctggtagtacttccagtttttcctttcatctcttgatgttgctgatcttgcttcctccttcggagatttgtaaacgtactattgagtgatcttcaatgcagtttttcttgtgttatttgacctttctgtacccaaatcatatttggattcccattgatgggatggtagcagtttcattgtgcatcctgcttctcaggttttgcagacgttcattactacacgaatctcttgatgagtcactaattgataaaatcccgggccgccaaaatgaccgcaaaacacttttaggggaacttaattggattttcactgcagtgactgataccattgcctggaatgttctgccacatggtaattttttctttcctgtggtttaatgctctaagttataatttctttgaatttgaagttcctgtatcattctttttggtgctatattttcttatacatttgtattctgctacagagcttttccagaggctgttcaggcaagatttattagttgccagtctttttcgaaattttttacttgctgagcgaattatgcgttctgccaattgttctccgatctctcatccattgttgccgcctacccatcagcatcacatgtggtaatactacaagagatactaatgaagttaatacgtactgttttattagttcgaatgtcactctgtaactatcgcacactgcagggatgcatgggacatggctgctgagatatgcctttctcagcttccgtcgctggttgaggatcctactgcagagttccaggtgcatctgaagtgttttattattgtgtttctttacttatttgtctttagataatgtagtgttttctacaggtgcagccttgataccccattagccctcactcacattactttgatttttttgttcagccaagtcccttttttactgaacagttgacagcttttgaggtttggcttgaccatgggtctgaacacaagaaacctccagaacagttacctattgttctccaggttaggtgatttatctgttttttttaatcatttttgaggtttgataaacttatccaggagggtgtagttttgtactagaataactattcacaatcaagtgttgtatattttggtttaatattgttaccaccaatgtccattcctgatttatctagctcttttctgttaattaattgtgttgctaatctaagggtttagtgcttataatctggtacatctgtatgaacttcttagttattacatcgtaggtaaaagtggttttttctttagcatgaaatgttatttttttagaaatgcttcagttttttcttcatcaaatggaatgctagagaactgttttcttgcatggccaatcaaattattattgatgttatatacaagttattaatatattcttgaatttattgtcttattactttgtctataaaaaaaaacatttactgcttctgcttcttctcctaattagtcgctgtggctgtaagaagaaaacaatgtgctgattttctgaaagcatggtttagggtttatctctatgcttttttcttgttaatattcttccgttgattggtgggaccgtctctgtagcccctccccttccttaattgggggacagtgcttacaattacttgcacttttctgtagactaacttgttgattatgccattttctctcaggttttacttagccagtgccaccgatttcgagcattggttcttcttggaagattccttgacatgggaccctgggctgtagatctggtacttcgttggcttctatgtagtgtggaattcatttggtagtaaagtttgaatgctgtagtttattttctgatcatcttctgtttttgcaggccctgtctgtagggatatttccatatgttctgaagctattgcaaacaacaacaccagaactacggcagattcttgtgttcatttggacaaagattcttgctcttgataaggtatacatgtgatttgagctataccttggtctaaaaagctttgtaatcttgtttagtggtttaacattatgccgacattgattgttttgtttgtggaatgatagtcatgtcaagttgatctagtgaaggatgggggacatacatatttcatcaggtttcttgatagccaggaagcatatccagaacagcgtgcaatggcggcatttgttttggcggtaattgtggatggtcaccgacggggtcaagaagcctgtattgaagcaggtttggtccaagtttgcttgaggcaccttcaagtttcaactccaagtgacgcacaaactgaacccctatttcttcagtggctttgtctctgtctcggaaagctatgggaggattttcctgaggctcaaataatgggtctaggagaagatgctctagctatatatgctcctttgctctctgctcctcaaccggaggtttaccttccatatatcaattactttacttttgtttaatataagatgggtgcatttctatttctgcaataaaaattgatgttggtacttttgtcctattttcaggttagggcttctgctgtttttgcattgggtacccttcttgatgtgggctctaacttctgtagagatggtgttggaggagatgaagaatgtgataatgatgaaaagagtagagcagaaattagtattattaaaagcttattaagtgtagcttcagatggaagtccattagtcagagcagaggttgctgttggtatgtagtttattgtcaaaaattgcctattcatttgttaaatttgtgtagttcttagaagtcgtttgcaccagctgtttaggcatttatggcatcttgtttgtactcgagattgcccaaacaaacatgctccttcgggggcagtatcttaattttctatctgagctaattaagtttcgtttctttttcatcctggcagctctagggagattttcctttggccacaacaatcatctcaagtcaattgctgcagcatattggaagcatcagtctgggtcccctttgagttctctgccttctttggctcatattagaagtcctagtagtgttgttccatcacagataggtcctatatcaagagttggcactgacagctcgccttttgttcgagatggaagggtctgcaccagcagccctcttgctacctcaggaattatgcatggttctccattgtctgatgactcatcccaactttctgattctggaatattgaatgacggtgtaagcaatggagttgctaaccactcagcagtaaaacccctggacaatgtgatgtattcacagtgtgtatcagcaatgtgtgctttggcaaaggatccatctccacgcattgccaggcttggtcgcagggtactggctattatagggattgaacaagttgtagcaaaacctctaaaaacttctggtggtagtgttcgacctagtgatcctatggcatcaagtgcttttggattggttcgatcatcgtcatggcttgatatgaacggaggaggtatttttctgtcaattatatgccgaggacaatataatttgttggagtatttgtataattatttatttaataaacttttattaacaggccacacatccttaactttccgaacgcctcctgttagccctcctcggcctagttatttgactgggatgcggagagtttgctctttagagtttcggccgcatttaatgagctcaccggactctggacttgctggtccgcttctgaattcaggagtatcttctggttctactgaacgtagtcttcttcctcaatctactatctataattggagttgtgggcacttttcaaagcctcttctcacagtggcagatgatagtgaagaaatattagctaaaagagaggagagagaaaagtttgcactggagcacatagcaaaatgccagcattcttgtgggttattatattattatttttgattttgcataatcattttcttttgcaaatattgtgttttatctgcaggttctaatatttttgttttgttgttttctatggttttggtcagctgtaagcaagcctaatactcaaattgctcggtgggatacaaaatttgagactggtacaaagacaatcttgctgcaaccattctcaccaattgtaattgctgcagatgagaatgagcgaatcgggtatgcgtagcatttcatttcaaaaataaggattggaagatcaaactattgcctttaaagatataaattcatttttatatgtataatgtgtacgatgaaagactgtcatgttttgtgtaacttatagaagctgtgtactgtggtggttactgagcggttatttataatgtttgccccactgccaatcttgtttctaagtaatgtttgcaccaagtggtctattgattcatgccctcgcacttgactgctcttttgtgaaaatctctgttttaccctaatctgatccacgtcaagtgacatttggtttctggttgccttgtagggtatggaactatgatgaggctacacttctcaacagctttgataatcatgattttccagataaaggaatttctaagctctcacttgtgaatgagctagatgacagcttgcttcttgctgcttcatgtactatactagactgcacagcctagttttatcatactttttgggatcaggggtttttatcagatgtgctgcctggagtttaactttctttacttatatgatccaggtgatggaaatattcgcatttggaaagattatgcttcgaaggatgagcagaaacttgttactgctttctcttcaattcagggttataaaccaggcattcgaagcttgaatgctgttgtggattggcaacaacagtctggatatctggtaattgcttcttagtgaaatgtaatctcgggattgatacataatgataatgtttatatttggtgataggttttaacaaatttatattatgtcttgttcctagtatgcttctggggaggttcctcgcatcatgatttgggatctggataaggagcaactttttaattctgttctttcatcaccagactgcagcatatcagcattggtcagttaatacttttgttatgtgcttatgtatacagctatattgataacattaattttgtaacttgcttatgtgacttttggctgattgccaagtatttgctaaagtgggggtccatagttttatattttgtatatatatactttttgttagtgtgtacttaaaatggttccacttgttgatttttctttactgtgttttctttgtagtctgcttcccaagttcatggcagtcaatttgctgctggttttgtcgacggttctgtaagactgtatgatgtgcgaactcctgaatcgtaagtcacccattaatccttcattttgcatatctagctagttgcatattttgacgagtgtgttcgatgcaacattaccaatgatttcatcttcggcattctgttttaaaaaaattgactgttttgactctgtaaggggcttttgtccttaactcatctaccatttatcataggctggtctgcgcagtacggccacacactcagagggtagaaagagttgtggggattggatttcaaccaggactggatccggctaaggtaaatcgagaatattatgattatagttttctgatttccgaaaaagttcactacttatggtttaaagtaatgggttgctttcgattatttttgtgtccagattgtcagtgcttcacaggctggtgacattcaatttcttgatatcagaagcaaaagggaggcttatctcacaatcgaagcccacaggggctcacttacagctttagctatccatagacatgcccccataattgcaagtggttcagccaagcaactcatcaaagttttcagtctggaaggggaacagctcaacacgattcgatactaccctactatcatggcccagaagattggttctgttagttgtctaagtttccatccctacgaagttctacttgctgccggtgcagttgatgctttggtttctattcacgccgattgacaactgagttgtcactcatattatatcgggaatgactgcatcttgttttgtggattacaagtttgatttggctttcttcttcggagaggtaactcagaatacatactttggactcgcattggagtccatccccgccccaacgcagcacgcggtgcaggaatcgtcatgattaaaactattatgctgctgagttacctccgttgtcaacgagtctaaaaaaatattggtagaggtttctttctctgccatacatatatacatataaatatatttatatataaaaatatagttgtatgctatataatattcattagcctccggtgtagagggtcactggtatgagaaaaagtgttgtggaaaaattcatagggggctttggaaataatcaaatctgtcacataggtacatgtatgtaaatattccaaccatccatctttttttttttcttctcttgcattttggtgtgtgcttattttttttttcttctttttcatgttcttcccaatttgtaaaagcacatttgatggtaaatttagtgtcgtatacagatagatggctacgttgggtgttcgttcccctgaaaatgatgatgatgatgatgatgcagtaaggaatctccagcatatttcctcgttgctcatcacacacgtccctaatcttgttgatttttctttctaattaatttcacctttgtaattaaattctttcagtttggtgtcctgtttttatatacaaaaatggttgtttcctttgtatatagattttctactttttagttcttgttttccactgttgtgtttttaaggggctttatcgccatctagaagttgaaccaattttaacagattatattaggcaggatgggaatggtaggagggagaggagtgaaaggagagtcaatttcacttgtttggcatgaaagaaaattggaaggaaagtacagatatttgatctccaaatcatttatttttaatctctccaaatgtgggatgattgaagataatacaaaaaaaa

SEQ ID NO: 15395 - DNA, 5669 bp, Cannabis sativa
taggttaggtttataacaatcacaataatcacataagttataatattgtttagactttctcataatttgctttgttgaaaagatgaaggtatttgtaactagttacagttgccatatcacgagtccagtaaagcccaatttatcgcccagttgaaaatgttagtaagtaactgagtccaataagcccaaaggtgtttcgacccaatatgaagaaggcccattaatttattctagagtggttaagcaattaattacgttaattaaatatttttgggctctaatggcctcaagtctcaaatccaaaagacctaataaaaccagaaaaggacaaagcgccatagtcgtctttgccgggctacgagtcagtcttcgacggaccccaaacactccatcggctcaccattatcaatttcttcacagatctcaattgggttttccaaaccgatgcttatgaacaaacctcaaagctcctttcactgacctgaccttaaagatcactcttttactcaaccatggcggatcaccatcaccatcttcaacaacaccgtcctcaccgccttaaagtgccttcacgcgccgccgcagctccccccactacctttgttgctactcccaccacatctcggccttaccctgtatttccgttcgcgtcttcaactccgactactttagctactccatcgaaacaccgtctttcgtccctaagcttgaaatcttcaaattacaataacaacaataagtcttcgctttcttttctgttccttcttctcttctctctccggtcactttattcactcctcccatttcttcgttcctctccttctttttctttgtttcctttctcgtttctggtctcacttctctcgtttcttctcacttatgtcttctccattttcacatcgttctcttcctcctcctcttcctcttcgagagacccttttcatcaaaagcaaagtcaacctatcttttctctgacctctctcactctatccgagcatagaattttagtcgccagatcgattctcctcgccgtagtttttctacttcgattccaagcgcttcggtactgtggcactgccgcaatgattctcgccgagttgtgtggaaacgtggcggcgcgttacgtcggtgagggacgtaatcggaacatggatgatcaaagtttatcctccaaggttcgtggatttctagctctgtttcttgggttgttttttttgtctctgagttgggatcgcattgaatgctttcctttttcggctataaagttaggatttttcattttcccaaaagacaattgtctgagaatttggccaatgttgctcccttttctttctggatttttgggttgttatgaacgtgtttcaatgaacttgggaagtgttaggcagatgggaagaaaaagggtacgattgatttcactgtttttcacaacggtggtgcttttctttcctgctgctattagtatgatcatgtttgaagccaatggagatggtttttccttcaagaatttggtttggccactggcaaacacagttgtttttggggtcttgttgactgagaattttagtgatgagaaactagtgagttctaaggattttcgcaaagagtttgtggttacctttgtttgtactcttgttttggagttgttttattttcctgagctatcactttggggactattgctctgtggtttactcttgtatatagctgttagggaattggatcctttttattcaaattatcttgaattgggattggagtcttctgaatcgttcactgaacttattatgaagcctattagacacattttgagtgagaggaaatctagaaagattgcactcttcctgatgatcaacactgcatacatggttgtggaatttgttgctgggttcatgagcaatagtttggggttgatatcagatgcgtgtcacatgttgtttgattgtgcagctcttgctattggactatatgcttcgtatatatcaagattgcctgctaataatcagtataattatggtcgtgggagatttgaggttctttctggatatgttaatgctgttttccttgttttagttggatcacttatagttttggagtcttttgaaagaatattggatcctcaagagatttcaactagtagtttgttaactgtttcgattggtgggcttcttgttaacatggttggattagtgttctttcatgaggagcatcatcatgcacatggtggatcatgctcacattctcactctcattcccactcccactcacactcgcatagtcaccaacaacattcgcatgatcatgttagtcatgatcacaaaggttgtgaaaagcatgagagcatctgtgtttctcatgaaagccatgagcctcctcacagtgatgaaattcatggacatagtcatcacatgagctctggaagcttaaccgataaaaaagaggctgggagtaacaagtgtgatggtcatgatcaccatcaacatgatcatcacggccatgaccacgtccaccatcatgatcatgaccatgaccacaatcacgatcatcaccacggtcattcttgccaacatgaccacagccattcccatggggagagtaaccggcacgatcaccatgaccttatttccaatggagaacaatcacataaggatcgtcatcgccacatcgaccacaacatggagggtattttcttgcatgttctggcagacacattgggaagtgttggagttgttatatcaaccctcttaatcaagtataaaggatggcttgttgctgatcctgcctgctctatatttatatcagtcttgattgtatcttcagttatcccattactcagaaattcagcagaagttttactccaaagagtccctagggtgcatgaggaggatttgagaaaagccttagctaagattaagaagatgaagggtgtgtgtggcattcagaacatgcatgtatggagtttcacaaacagtgatgtggttggaactctccgtcttcgtgtctcagccgaaacagtcaaggcatctgcgaagatggaagtgtcagacatactaagtgaagctggaattaaggatctgaccttgcaggttgaatgtgctaagtaaggagcttattagatcttgttaactcgtcaccatttgagagggtattcaaggagagagagagagagtagcatattctcttacaaaacagcatagcatgacaactgcatcaatcaaatgtatatcttaagagtccagacaacatgagatgaaaagcttcaaacactgtaagttctgtgatccaccatctctgcctaaaatcactgcatcttttcgtctctcctaaggatgatgattctttttcattctcaccgtcctaaagtacacaacaatttaattggttttatatgttttttatgcatacatgtaagaaatactctaaagggaaggatttattttcaaatctgttgttcatggctcatttagttacgtccatacccaaatgatatataaactcactttctatgaccaagtttcaatttttgaattaacaaacataattacattaagcccattaaagttaacataattactagtagtttcatttatagctttttggggattgttcatttttgacgtaaaaaacacaaaatccatatctttgcttttgggaaagggcaaaaaaggaaggggctttagctttatttgcagagaatcaaagaaatgaagctgttcaaatcccaatgggccatatatagtggggactattgggacatatatagagtggggagagagagagagaaagagagagatggcattggagaaagaaaatgagagaacatgaaattaagcaatgtaatttatacttccataagagaggaaaaaaaatgtaatgtataaacttattatatattagtggtatctaggcatcatcaaagtcatcaagccaatgaccaagtgtgggagaaggtgtcatggtccacaagattttcttaattttatatgtaaaatataactaaaactcaaaataatatttttttttatgttttacatgtatccctattaattttggatttcgatatgtcatttaatctagtgattctagtcaaataatttatttattcacacatgggcaattaatttatggttttatcaaaaaaaaaaaaaattatgttcaatcacattgactgtgcgtaatgtcaaattgttaagaggtctaaatcaacaatatgaataacaaattgtgaggaaagaatccaatacaacaacactacacttgtcataaagcaataattattaaattaaatcaaatgaaatataattgtatgtggtaccactaattttttttagcatttttatcaagggcattgtcattatgttttctatgggtgtatatcggtagatttgatcgagttgtattattatactcgaaattcgactatttatcagaaattgacatgtgttttacaaaaggaatatgaataatcccaaaagaatatagtaattaaattgtattattaaatgtgatttaaaataactcgttccatataattaaagttgatagaaatattcaaactcgttaactacataaacatatgcgagataagaataataactattaacagatataattgacgagactatatgtctgcctcgggataaacaaagtatataataagaatgtgcaagacgagacattaaggatcttgcagctcattgacccacatacttggaaataaaagcttgcaactcattgacccacacaattatacatagagaagattacattcatccatctcgctcttaacgctacctcgcagataactttataatatgaagaacaatgcgagaagaagaatatctatacttagagtttttcccctcaaaaagacggatcacaaagataactcatattcagcgagaaacaatcttcttaattagcataaccgtttaaaagataaagtcaaagagcggttgggtaattattagatattatctcatctacatataaatgaaacgtgagaaatattcacgtttcatgagagttgtaagtgaatagatctcaataaaaataacagtcaccctatacacctataaatagagggagaattcatagaaaaaggagataaaagaattgagagaaaatactatcatttaccttcattgaaatttgtactctgcatatttggttaacgaaaatctaggttaacatgtatatttttactaatttaatataaatgttggttgcaaatatctaattataacccgcctaatgaaaatatagcaaatttaactcgcctaataatttcatcaatttagtttggtcaacatgtttaaacataagaaaatgtatttatttttttattattattgttagtttttagtgtttaaataattaaatttggaaaataaattctatatactttaagattaaaagtgttgtaatctaatttaactgttaaaaattttaaacaaaacattaatataaattaaataaatatttaagtattacaaaaaaaaaatctttaaaagatagaaaaagatatatattaatgtaaaaattttaattttaattttatattatgcaaaatatcatagccaatttgaataaaaattatattaatcggtttatttaagtagattaaaataatatttaaccggctcaatattatatattcattgaaatgt

SEQ ID NO: 15396 - DNA, 2318 bp, Cannabis sativa
atgtctactgtgacaaagttgcgttgccagaaaacaagaaaaacggtacgccacaaatttcattttcattgattacattttggccattaataaaccatattttgataaataaagactgtataatcacttatgaaaaaaatactacccaacgtatcaataaactttttcaaataatatcttcaaaaaatacttttttccaaatagtttgttattgttcaatggactacatagtcggctctcacgacagactgagcaggcatgtggtcatggttctcacttagtcaggttccttaattataaattactatttttttaacgttaaaagtactttcatttttcttaaaaataaaatactattttatatataaaaattagaaaaatctcaagagtggccttgtaatttggggattgtttcacataccaaatactattttttatacatatggtatccccaaacttcaattcaagtgagacactacttagtaaaattgaatctaattagatagaagttattgaatccaataattttaatattttgggaaatatttttaacacttaaaaatttggacaagacaattaagtacatgttaaagttagaagaataccctaattaactaatttttgtactataaatttactttaaaataaatatataataataaaaagtttgtcaatagttcaagtgttaaatataattttttgttaataattttcatctttaataaaattaaaatatattgtgtacattcttttagacctcttacttttatgatgtaagtgtatatttgtacagacattcctaattaatattaatgctatggatgattatttttttacaaatattaatgctatggattattgtgtactccttaatattttaggaaatatagttttattgccctttattaaacttaatggggacttctattgtaaattttttaaataatagtgaaatgattagtaactaataaactatggagatagcattagaataaaaatattattatagaacttttatttaaaaaaatagtctcatttaatatcactaaattgaaaaataataatgcaaaaaatgtaaagaactttcttaaacatctcaaaaagcatatatcattatattcaattatttgttcatctttaaatacttttccagatataaaaaataattttttgatataaattcttaaaatttgggactattatagaaaatattatgaccatatttttttgtagatttttattaaaaaaattatttaattaaaagaaattacaatagtcatatctataattactttatttaattactactaataaagtaaatttatgtaatattaattttaatagtataaaaaaaaaaatagaatatcaatagtcttatggaaaaatattgattattatagtgtccatattatttttaaatttatttattgataaatgtatatacaatagatgttaatgtatattaaattaatgattttatatttttaagtatttaattactttggtatagtttcatttaaataaattaatttcaaaatattaaaaaacaagcaaccaatgaaaaagaagaaaaaaatgtcaaccatctaaatatgtaacaaattatttagttaatattaattaattctattcataatttttgtggtatgtaattcaaaaaaattaatataaatttttacaattatatatcgtgccataaaaatatatatcatatctctactattaatttttaattggtcacgtcaaacatatatatatatgtatatatatatactgtttaagtttatttttttttagtaattttgctaacaattttattgattgtcaattttagtaagtacatggatctctttcttaattacacttaatattcgaacttcaaactcaactctttctgatattattttgttaggtaaaagtttcttcaactcactttatatatacatatatatttatatgtatgtatatttatatatagatatttatttataagtacgaaataattatgtattatataaatttgttttagacttagttataattttttatagaaaattcataatttggatatagctacattataaattatttatttattttaatatttgtttatgtaaaataatttcatatgatttttttattttatttgtaattaaatacaataaataataaatttagctgataaaagagaaaaaaaatatatgatattttttcattttataactcatttataatatttattaatattatgtgtaaaaaaatttatgttgtttttatttataatgtctagatattattatatgtacattcttattata

SEQ ID NO: 15397 - DNA, 2702 bp, Cannabis sativa
ctggtttctgcagtaacagaattacattctgcttctacagacgtacacagttttatatttttatatatattattgacatttgtaagaactcgatttttcatcttcattgcaaacatgtaaaccatttcttcaaataaaaactcaattattattaaaagaaataatgtagcattgttgaacacgatttaaacaaaaattaagttctttcttatgaaattaaaaacataataaatgtctttaaggaataatatttattgttcaaaatataaatttttgactctcctactgctctaggtgaaacaatgcccccgtcctaactcttagtgtcaactctccttcttgaagatctctccaagaattaagcatttgtaaatcaaaacaaatatggttagtggctctcgaatctactatcaagttatagccattatgttccactaaataagcctctgtgatcagtaaatcttatttacctttctctttgttctgcaactcctccatgtacttcttatagtttctcttcgagtgcccttctacattgcagtggaaacattatttttttgggcatagagttggcagttttcttgctttttcttttgttaatgcttttctgggttgcatttttatgaggtgaatattttctaacattcttctttctcttcttgctagaagaaggacaagtatgttactcggcaacatttgcttcaacaatttatttcttaaaatattcaaacctttgaagcttattaagaagctcagttaatccatatttcagtttattcttaatataatttctacaaaaatgatgaaaaggatcaagtaatattgaatgatgagagccacttaagtagcttcatctattttagtcccattagactgagcgtcatgaaaatatgttataatagatcttcttcttcttcttcttcttcttcttcttatctgattgctactagggagaaattgttggtaggatagtgcaaaggtatcaacatcgactgggtgtgacccagcccccacgaccctcgcctcacaaccgtgaccttcagaacagaaagagagagagaggaaagatatcagtgagagacctcctcaagatctacaatgtttgtgactccatcaagatccacaccatcgtcgtctccatcaacacccatgctaatgttgtctccatctctgtcgacacccacgatatcattgtctttgtcaagaccgaagaaattgtcatcgatgtcacatgctgacaaggaagagcagaggcaaagagctttcttgtgagagaaagaactatgtgatttttattttatatttttggatttcctcttttttttttaaattttttttttttttttttgaaaaataatatattacttgttgctattttattaattaaaagaaaaattcttttattttaaatttatttaatgattttattctatttaaaaaaaaaaattgatttggatcaatattatactaacatgtgtggtcatctcacttagctgccaatactgtagtaacagatgcaacaaaatgataacatttgataaaaaagtaaaaaaaaaatagataaagtgtataaaatcaaaaatatttatttatatcgtaaatgttcctctatacttagtaggggttttcaaatcttcacctctaaacccaaccaataaaaatcaagacagatctttaagctcggatgtaatgcaagttccaaagcaacctaggagagctcaatgctaatcataacacttacaattaaaaccaagagtcctatgtttgtatacccagttaaccaacattttcccactaaccaaaaatcagaaaaattgatgcaatcccattggctccaactccatgcacaaaataatggactctgcaatgttgaaattggctttgctgttttgacatttcatttattcaattcaatagtttattataattttggttttagtgagagtgattatttattttgactttcttgttgaaagtaatgtttatcattgcgttcggagtcaacttcccactataacatacctaatgtgcttatctgagttatctcatgttaattttgagtttgtggacaaaacaatatagttttgttgctacaactttcccctcttcttttagcattgtttcatttttgggacttagctttatggttcatgcccacttaagatcccaactatttgagcctaactaatcactttaacgagtaccttgagaaaagtaatcaagtgtggaagtttttggacttgtcaaaaagttataaaattaattaaaattgctacattaaaaagtcaacaaaggaacacaatttttaattcttctttatagtgcaaaagttctaatcaacaaagtaaatgcacaattatagcgattggttccttgcacggtttgagaagaggaattttgtagtcggttcacgatggcggggtttttctttgtcgtgaattttactatatttttttttaattgggggtgcttctaaaaattaaaaactttttagttgattgtcattaataaatgtgatctgtcaaatgttcattcaagatgaaaatctagtactcttcataatattttgatatttcatagttggcggcttgtgggtcaattagttaaaaatactgttagaacaatacattttacactacaaaaaatatgacacttttttcaaaaccccaaaaatacccccctgtatctactttgtctctctc

SEQ ID NO: 15398 - DNA, 5373 bp, Cannabis sativa
  modified_base (1661)..(1677): a, c, t, g, unknown or other
tagaatcttttcagcttagtgtgtcattctttttgtgtattaacacggcttataatacaggtatctacctccaaatggccatgtgaaaagcctgtcgataattcctcttcatcagcgttggaatggcgtccttttgagtcttctttagcttctacaaagtcggtttctgcagcaaactcggtttcagctgaagaccaggcaagattaactgtatttcggtcacaacatgttgctataaaagcctgccaaaattatttcgaaagaaaatctaattcagactgcagtgaagatgaggatgaaagtgaggacgaagattcaaccgaggttgaggaacaagatgcatccaaggattctaaattgttcaatttctttttgaatttatttaaggaggaggatggaaagttgagagatttttacatcaagaattgggaagccggggagtttttttgtctagtttgtggtggaatagggaagaaggtagggaagaggtataaggattgtgttgcacttgtgcaacactcgaccgctatatcaaagacaaagaaaaagcttgctcatagggcttatggccgagttgtttgtcagatactcggttgggatattaatcggctaccatcgattgtgtcaaaaggtgatgaagctcttggacaaccctctcgaaatcccgacgatatggaacagggtaaactcgaggaagatttcgatcctcataatgaggtaatagttttggacaaggattttgacaatatgcaaggtgaactcgaggaagatttcgaccctaataatgaggtaatagtttcggaaaaggattcatgtattcatcagaacaaaacaaaaattaaaggggatgagtaaatttctataattgaaatagaatttgcattgaaataggctaataattgtaatgtaaataggcaaaacaatggaattatccaacactagattggtgatttatttgatctttttgtttacttctcatgttcaagtttttctttattattatttgaaaattttatataattgatcaaatttttcaaaaaaaattatacaaaaatacttcaatatgtatttttttttttttttttatttttatgttttgaatttttttttgtttacaaaaatgaaaaaaaaaatatactagtttatttatagttgtattatagttgtcataccaatatggtgatttttttattgtattttagtgttttttttactttttgttgaatgtatttttataattttaaaattttagaaatgtaattttatgaatgaaaattttaaatggtaaaattgtaaataaacataaaaaaaaaatattttaaaaatttctgaaaaatattttgactatttttgtaattatgttatattttaaatcaattttttttattattattttgattctaattgcaatttaattggggaaattttatttacactttaaaaaaatttaaagaaaccccattttaataattcttattttatatacattttttatctttaattgtattaagttttttaaattttttttctagtttatattcttaaaaaatatacctatcaaacaaaattaaattatatatttttttttgagaaattattaaaattaaaattattaaattatattttaaaaaatatgataaaaaattaaaataaaaaattannnnnnnnnnnnnnnnnaaaaaaataaaaaaaaaatatttagaaaaaattacgaaaataaaatcaaaataagtattgaaattaacataaaataatgtgaagaaaattttttaaaataaatgttaagagtaatttttaaaaaaaatttaagtttatatttttttttatacacaaaattctctctcttttttttttttggattttttcattttacacttcaaaatagttttttttttattatttttacagaactctactgaaccgtaaatttgaaaaaaaaaataatatatgggtaattttttttttttttttcattttttcttagaaaaatatagaaaagggtttatcttttacaaaagaggaagtaggatgaatatggtgactcaagatttctctctctgtaaaaccctaaaccctaaattctctcttctccattgctcatctctctcaccattctccaatccacttcgaaagactctcactttcccacctcaaaatgctccaaaaccctcccacttccccaccatccccgcaattctcgcttccggaggaaaatcgcgagatctccgttcatacgccggccggagcaagaaaaagccgcccggcccaggcggcggctcctcatcgggaggacgcatcgagggcaacgccgaatttcgccgggaagttaaacgcaacgctcgccggagaaacaagaaaatggcggaatcactcttttaccgtttgaaaaaccctaacagaaaccacccagataatttcacagaagacgagctccaagaaattggacttgggtacgatagattggttaggtttatggataaggacgaccccaatttacgaaaccctaatgattggtacaagtacggcgaattcgggccctattcgtggcgcggtgtggtgctcggcgacccggttcgggggcgattttcggacgagagagtggctatgatcagcgaggttagggatgcagaggagtgggagaagattgagaaatcggaaatgggacagaaatttgggaagagattggagcaaatggataggaaaaagtttaagtatttttgggtttttgttaggcatccaaggtggagactttcagagcttccatggcagcaatggacattggtatgtgaagttgttgttgaaaatggttttgatcaaagattagataaatggaatttaatgggtagattagggaatatgacaagatcaatgataacaaaatgtgcagcttggtttagaccagatataatttatgttaagagacctgtttatcaatgtagatttgagcctcaagataatttctttaaggttttaatgccatttctcgatccgaaaacggagaaagattgtttgtttgagttggagaaagatgatgggagtgttgagttgtgtacttactatggtgggctttgtaagattttgaaggttagtcaaaaggtaggttatgttgatgatgttgttaaggcttatgagaaattgagtgatgaagataaatctaagtgtttggagtttttgcttaagaatcatccaatgccgttgttgcatccttatactaaggaatggaaggcgaaattggaggagattgaactcggttgtgatgccccggatgatgatgagagcgatatgcgagtgggcggtggttcgggtgagattgtggattggattgaggaagaagaagaagaagaagatgaagttgttgttgatgaggaagaagaagatagtgaagaagaagatgaagatgaagaaggtgatgataagtattgggaagatgagtttaaaaaggcattgacaagctcagaaggaatggagaatttagtgaagaggagtgtggagttgtctaatgaaaggtataaagagcatttaggtgctgcaatggatatggatgatgaagatggtgatgatgatggtggtggtgatggtgatgatgatggtgatggtgatgagattgagatgaggggtaagagggctaaagtgagtccagaggaatggaagatagttggaattggtccatggaggaagagaatcaagaagagtagaatcccacctgaactttttcttagagctgcagttagaccttttacttatagaaatttagtaaaggagattgttttgacaagacatggaattttggatggtgatattagttcaactgataatttattgtaagataaaagatttttgtagattagagtgagtagagtgatatcattattcttcttcattcatgtaatgaaatgaatttactttgtttcatattctaatctttaaaatactttaccaaaattcaattttttctattttacttcatacttttacttcaaaaaatagaaaaagaaaagagagaaattatcaaaatatgataaagcacaattttaacatatctttcatatttaaccttttaatctattttgaagagattgttgtgagtggtagagtttttttttcctttctttcttgctttatacaatataggtttgattacatgtaaagaataggattcatcagatttgtataagcatctttgtataatggttaaactttaagaaaatgagtgatgatacatgcacattacaaattacacacctaacaatttatgatgtgttgtttggtaattcatattacaaacaatattgaatataacaaatctaactaacaaactattgagttaaatgttgcagtattggttttgttgtgttaattgaaatgatgtagcattttgttgtatttagtttttgttatttaaaggctttgatcattcttgtattgtaagaaacaattaattcatactgaattgagagagagtgagattgagtgggagagaaaccatttaagagaaaaaaaattagagagaagagagtttgggaaaactggatcaagactaatgttcatcgagctgagttttaggggcgttttttgtaattttctctacgatgcacacaaccattgaaaccttgtattcatcatattaatggagaagaaaaactcaagggagtaacaggaagtaggtcctttgtttcgtcgaacttgtataataatcttgtgtctcttttactttagttttcttacatttaatttttgttttcaatttgtggtttgattactgactagttggttgtgtatggattcattttaacttgttgtatattggctcttggttgagttttatgttgtaaagttataacatgatgcatcaagtaatttcaatcattcatcttaagtttcagtcatatatataaatattataataaatattgacataaattagttatttattggtgcaatgaataaataattgattagtaattaaagaatatctttttttactaacattgatataattgatatccaagaagagaatcgttgtggttagcaaccataaggtatcattttatagcgatattctgtaattactattaaataaattatattaaattgaatatttaattctatcaataacactataacactttatatggtactagacatcattcgtatattttaacattttacttgcaagaaaaataaaaacatctaatatttatgtcttttctcattttacttattttcattttcactactttttctcttgtttttttgccctcttacaaaaacataacctaaagttaatgttataaggtttacctgttgggttttatgccctaaataaaacttcatttcaatgtaatctttatcttttaaatatcaataaagaaa

SEQ ID NO: 15399 - DNA, 4395 bp, Cannabis sativa
  modified_base (4356)..(4368): a, c, t, g, unknown or other
attttttttatactttttgcctcttacctgtaatttaaaataaatttactttattagagttaaaaattataagttaatggaaaataaattttaaaattttgaatttttacatctacccatacttttagagacaccccctctaaaggtctcttatttgcctctgcctctcccattttatcacaatttttcaaccacacattttttgagttcaatttccaaacacgtagcccttttgacatctagtataaagtgcattccacgaagtttggattgtctcgtgggaacttaaatttggtttgcaaaagaagaaaattactgaagtcatatattttttttattagtgtactaattttttttgaagtattacaataaaaatttaatgtcaccgctagtctgtcccagatagtcttaatttctgctttgtttacggacacccaggtgaacttattcatgggaacggtgatgtgaacgatgagtttgaccatgttgaggaacttatttctatagtcatgtaatgccccgcagtctctggatagcatgtgaaggacaatttcacccctaaggtttctgggcaagtactatttccacattttgccctttgaacgctcctctaactctttttttcttactgttgccttcactttcactagagttctacatgttgactaagtttttagccaacgacacaaagttaagatttacaaaaatgtgtatgataatagtgaagtaacaaaagaatgaatttgatgaataataaacaacacacgagattgatagaggttttgtctcaattattaataataactcactcctctttaattggtattactttaagagaaattatgatgatcatttggatatgtgccaaatcagtttcccaataataaaataaaacaataatatatgcatcatgagagctctctgattttgaattcagattcccatttctgtgaaatgagctagtaattataggctaagatgaaataaaatacattaattacaaaatatacaattaatgttaattattcttcaaatcccggatctctaggcaaaccataatgactgagtttttagggatttgcaaactgatttagtggatttggaacaaactatgtttcctgttcggtcagaccgactagataaatactccatgtcttagttacaaaatcagacatttcccctggttggtcactcacttatcttcttccaaagtctaactaaactccgcgtgtaaacatacactgtctagccctttctcgtttcatgttgcctagattattttgtcatgccacatgtcactccatttgatgccacatcattcagaatgtttttgggataacatttatctcgaagtctgcatacaaccatctggactgatgttgatttctcggttctatgagtatgaccaatttgacgcgtgtacgacctcatgtgatcctctcactagggtttcatgatgtactatataaaatctcctcttgtctttacaaatccctacccatcaacattgtgtgccttggttattgtgcattgaagatcgtttttaacagttacataatttccaaaaaagtatcatgtagtaaatggaaacttaattttttggggggtgggagggagaagtaatgataacccatttagttttttcataccctctcactttcatattctattataaatacaccttaattttttttttctctcttttaccattttttagaattccaaatgaaaccctcgcaagaaaaaacttcttatttccttcaagtttttttcaagatatttcttagaatatcactatttcgagcgttgaatccttctcaactctagagctaacaatgagtaagtctcatttttttttttgctttctttacaaattttaaatgctttcttcaagtttcttgtgaaactgccatgtctattttgagttcattgcataaaatgtgttgtgttggtgttgatcgaacaattgttatttctgaaataacgtggtagataacttttttgggcttacatcgttgtccttttcatgtacctactttttgaaacttgaagtttcttggttttttcaaaaacactagaaatatttccaaacccaaagagttcgagtagaagtcttcttgttttagccttttgatttttgtctcttgtctggttggtctgacataagtgtttttgaaacatttatgaactatttggtagctcacctctctttttttgatttaaatgtaaatgatcacaagcgactttttgggaggtgaacaccagatagacaatgacgttctcaaacttctttatgaagataatactgtccaattttccaattcatcatcatccattgagtcatccattttttcaattagaatcgaggaagaaagtgattcttttggtgactctttgtaattggactatagacatcctcattaccttgaatagattggtggcaagccatacgagcgtcatatttgtgagcttcatttacttgttttatggtactaaatcaggtacgcagttgaaccataatttagattatcattgtaccacactccaaggatctccacatgtattaaatataaaataaaagatgaaaggaatattgacctcttgaagcaaattaaggtattaatatataatgtgttcttgagtcatggctggagctggagccagagggactccaaaggcttgctgataggcatcttggacataaactcagacaaagtctttgccctttcgctttgcatctctccccataacaaggagccaactgtgtgtaatgcccgtatttgaaaatttactagttcagaaataatcttattatattatatttatataacttcataaatcgagatcccgagtttaaaccactgttgaaaatacatatactatatataaagttacataatatttttttttacaaactacaggaaaaccacaaaatgaatctcgaaatgtaataagatcgaaaccctccaggttacactgttgcgatatgtacaatcctctcaagcccatctcactgctcctccagcctagttctacccttacctacacaaggtagcaaactgatgagtcgacagactcagtaagataagcatgtaacaaatcacatataaccgacttgtgtctaggcgcccatacacctattcacaaggctaattaaatgattaggaacgttcttaatggttggtgctattgaccatgatatcacctactaccagcactatgatcgcactgtgggaccgacactatgtttgtaccgctatgatagcatcaatagcacccaagagtttggccatgatatcactcttaattagtactatgcccgtactgctgaaccgacacaatggttgtgttgctatgatagtgccaatcaatactctctggagtgaatatcactcttaaccagtacgatgactatactgccgaaacgactcaatgattgtgccgctatgatatcacccaaaacatatacaatcacaaacacaacatgcatatataatatgttctacactaatcttacctcgtttccgtgctcaggcgtgcctgtcagcctgagtggaacaacagctcgatgctttatagagctctaaatcacaatatttgaaattttgatgagagacgctaaaatactttccgaggacttaaaataaaaattagaaatatccctttcgatggataacatgacgataccctaaatatcacaaaaatagaaaaaactagggttcaccaaaatgtcccaatcgatagaccagtttaccaactggaattcctctaactgaagcatgaaggagaaagatttgcaggaaaaatcactcattttatctgcaaatttgggacttttcttcccataactgaagaacaaccctcattccaaaaccattcccagttacccttttcttcttcttcttctttttccttccaatcaatcattccatactcaagatctttgtacaagtaaattgctccattactactcacacactttgtactaatccaactttatttttcccccaaaaacttctttttaacctcaaacgggaccttcccaaccaaaacccaggtatcatcctgactcgattcccacacggacgcacaatcaacacacgtgccacccacgagtgtcaatttctcgcttctcaacacaatagacgcgaattcaagctctttggaactctcaactccctccatgtgttcgacgaaatgtcaaaacccattaaactgtaagcacgagcatatattatccagtacatcaccccattacagtgcacattatcatttgggatttgcatattataatatactaatttagttttaatcacaacaaatattgtaactaaaaacacatttagtcacaataannnnnnnnnnnnntgactaatacttttagtcacaacacaa

SEQ ID NO: 15400 - DNA, 11365 bp, Cannabis sativa
aaattgttttccaaaaaacaattttctatttttaaaaataaaaaacaattttttagttataatgtcaaacatgcacttaattttttatttttactctattagaattattccacgttattaatgtgtgaaaattaattgtgatatataagatcaatgatctactcttcccattactaattggttttaatatgaacctcgttaattcatcttttattttgcgaaaccggagacataggagtgttgcagactcgtggagctaaggaaaatgacagctggggccttttcgattttccctttttcttctttcgattttcttttatataatatttatttttatgtatgtcctctgtaaatgattatatatttataggctctggtctagtcttcctgagagtgtgagggagagagaaatgtcttcgtgtctgatactgagcttgcagcagccatggattctgtctccgaaagttactggtggagtttgtagactcaacaccttttccttttcaaagaaacagaggtgcttattatatatatatatataatataatataatataatacatgtgtgtaatttatttatgtttagtttgattatgtatttatgaatgtgttctttttaattactgaattgaattgtaagtatgacattggcgcgtgttttaggtttatgattattggtttctgagtttgagtgtgttcttaaatgagtttacgattcagtttaactttctaaaatttaatgacaattttagtggatatatgtatatatatatatatatatttctgttttagatttaaggggaaaataaaacaaaacgctgaaactattagcttagaaataatgacaatgacaatgtttgacgcttctctgaactttgtattgggtttcatttctcatattgtgaaggttgagtatgggagattgtgtaggcagagttttacattttgtttttcagtagctttctttttttttttttttaaggagatcatgtaattaattggatcagtagattggcttggctatatattataattttttttgaaggtctatgatatggagaaaggattcttttagatgttttcttttcaaattctttaactttcaatataagggaggaacttactaggtcttgtgaagtgatattgttagaaagatcaagggttttgatcgctacaagtgtttttaacattttacacttgggtgagaagtaataatatggcgattgtgaacatggataatgcaatgaagggtccgtttttcattccatctctgtttttttgataagatttctgggtttctttcctttcaatttcattgtcagtttacaagttagggttacatttgttatgatcattctactttgtaatagtcaccaatcaaaactctgtatttaattgatgaataatgtgatgtatatatgtcctgtttgatttatgcatctacgtacttctgacaagagaacattttcatgagcaattacacagaatgcaattcggcgcttgatttaataatgaaggcatatactgcagactaaattttatatgaaaaaagaaatactgcattctaatcattatcctgattcttattcagatgaatagttatatgatgatgctttagtgtaatatgtttcaggaattcattaccatgccaatttcagtggcttggaagttcaactttacaaatgcataattttgttgtacagaataaaggtagcttatcatcttgttacatgccaatgctatgggaactgccaactgcactggcctagtgttttatgtcataattcagcagctttatgtgatttcatagaggcttcctgtgcttaattttgagaacaagttaaatttctttacaggaggcatattggtacattacttggtatgatgcagtttgataacatatatcgtgtactatggtaatttctttacaggaaaatggaagttcagttctcagtataaaagggacagatcgtgtataaatgttgctcatagtttcactgacaaattctctaaggcggaatacaatagtagttctaaggtgagaattggtgcaatatcgggaatacatctgctccactattgatttactaaagaattgttattattgttcaagaatttatccatgtaggtttttttttctttttcatttccatgtcttggattctgtctttctttgcttgagttggctccatatgaaggattttgcatacctacccttccacctgttggttcaaactgttcagaccagaatgttatatctacctttgcattatgagatgaaatgaaaaaccactcccttgttatggtcctcagctatgttatcttctgatcttcagttaatttattctatgattatgctatgatcttggtcctgacacatctagtgttcatcattttttttacatgtattatatatatatatatatatttatattaggtcatttattttatgtgtaatagtcaaaataacatgtgttaaaattgtgcaattcatggtatactgctactagtaacaattcgaatttgatctaaagtgtaatcactgaatgtgcaggtttacacaattaaactagtggcggaagtggtgtcctcttatttccttcttagggttgtgaagttaaattttttcattgctttcttaaagatggtccaggggaaacttttctcttttggggctgcaagctcaccttttgcttgtatgtcaaattcaatgaataaaccgacgcctcttaatttggatgtgtttttgccttcatttcaagacatcaagtggagctttgcacggctgctatatctatttaatgtacaacttgataaaaatgtggccacgtaagtgaagtatcatgcttgtttaatttggtcagcattaatgactgattctaaacttttttggactgtcttatttttttttcatccccagtattgtattgataatttaaagcttcgaaattcatatgtcatcttcttgttgggaataaatatttagcagcagcatgattttaatggattttggctaatagcagctttttaacatgacaatttctatggttgttgttatcatcatacatgggtcaatctgtctattttgggggtattgatatttttctttctttcatggttttattaatatattcactagatggatcctgtaaagtaatttgactctaggtttccttaagaaaatttgctatagtttttttcagaagttacaaaaaatggtacattgatgagagatttgtgactttggcatctctaatattgtttaaatttctcttaccatgactttggcagatcaaattttgctttttactttttgaaattcctatgcattcaattgccatgctttgttgatgtttgttgacaataactgttatttattatgtatttttataagaaacaatactaattgtgaaatgtaaaaaatattacatcaaaatttttatgttctcagctggctgaaccattatatatgatattttttgcaggttctttatagtgctccttgtagcatgcttctcatttgtcctaattggtggccttttgttctttaagttcaggtagctaacaaacacttttttgtgatcatatattggggggaggggtacttccttttgtatcaccaaggtgaaaaagcaggaagataaccatggaccttaatgatcttcaatgccttcagcacctttttttttagaatagatcatctagctgtaattcatgtagtttccattctgagtctgataatcttttgtggccttagaaccttgtaattggttgattcttaccctatattgttttctacatgcaatctcttgatatgtgtatgaaaccaacagaggtagttcacagtctttggaggactgcttatgggaggcttgggcatgtctaatttcatcctctactcatttaaaggtgaaatctatctggcgaactaataacctgattgatatgtgataataatttcttggttcttatttatgctggatgacttaatgtcatatggattgttctaagataatgtttctctgcggtgaagtgcagcaaaaaacacgtattgaacgtgttattggctttattcttgctatatggggcatattgttttactctcgtctactgagcacaatgactgaagagttcagggtaagcctcttttaaacagaaaattttagcattaatgctttacatagatggcatcctgttgaccatcagctggacagaacaatatgtacaagctcagagaaggggcacaagtgcaagttatggagtctgatcatatcatagtttgtggaatcaacagtcatttgactttcatactgaagcaattaaacaaataccatgaatttgctgttcgtttaggcactgctacagcgaggtaatttgctcttctgctgcccaactccatattaagtcattaatttttatattagtattctgaggctaacttactggttcttgtgttttttcttatttatgtatacataggaagcagagaattcttcttatgtcagatcttccaagaaagcagattgacaagctagctgacaatattgctaaagatctgaaccatattgatatcctttcaaagaggtatgaccactaggtaattttctttcaaactatgcatagatttaatgagttctttctttcttattactattattatatatataatgtgttccgttcattttactggtagaagttgtttatgatataaaacaaatatacaaacaacaaaagggcaaaagaattttgtcacaggtaattgtttgtttgtggggtgatgtaagaagtagggcctatagcttgagaacttatatctattaactttattatttatctggattaagacttgttttctctacggattgtaattggattttaaggcttcttgcgtatagaatatttgcattctgatatattgaggttcttttgttacagttgcagcctcaccatgacaaaatcatttgagagagctgctgccaataaggcacgcgccataattatactgccaacaaagggagatcggtaagaacttgataagaaaattgtaacattctttctatcttttagcattcgttattgtaatttgtaatgtgctgtctgtttgagaaatcatctagtgcatacccaagagaggtagctcaaatggtcaagtatgtggttcactcccacaaggtctgaggttgaatccctcctagtacctacatagaaattgctatagtttcgtggcccccaaatattgccgggttaggcagggatcctagtttcaaaaaaagagaaatcatctagtgcataatagaggtgtattgaagttgcttcacaatgtagtggttggttagttcttatcatttgtgtgctgggtttacctacatcttctttttagatttctgcaatgcacgtttgctaggaatactagactcagaaatctgatacataaacatgatttcatggttcattttacttcgtcaatacaggcataggttctgccgattacaaatgctcaagaaagctctatctttatcacactagcttttactgtcttgtctaatctacagttttctgtgcaaactttcccttgcatagccagcagccttcgatttcatcagtcttgaattgtacaaatcactctacaaaatcgttggctgtataattttaaaagaaattatcattggaaatgtaactaaggatatgaaacgaagaatacaacaaggatttatttttgttatattttatgaagagatgatataaaaattacataacaaggagaacaagaagtccacctaacaaaaaatagttatgaatggtttgtcagaactaatagcactttgcaagaaataggcaacctcgaatctagggtagacatacatgaaaagaaagactgagggctgttggttccaacagcaagagaaaacctgacactattctgctaagagaatataagaatattgtttttctgtcttcctttttataataaagatcactatgtgtaattttttttgttttttcaatttcactcagtcgatgtgtaaattgagatccttaatttcttaggtacgaagttgatacagatgcatttttatccgtgctagctctccaacctattccaaacatggaggcagttcctactattgttgaggtatggtcttcctaaatttttataggtctgtaaaatgtttgttgtgtcaaacaatccagtaaacatatcttctcaaaatgcaggtttctagtgagaatacatgtgacctcttgaagtcaatttctggattgaaagttgagccagtagaaaatgtcgcatcaaaattatttgttcaatgctctcgtcaaaagggtctcgtaaagatttacaggcacttacttaattaccagagtaatgtaccaactacacccagaaagaaaattattttcaacccagttcaccatagcagcagtgctttcgatgaatcaactgggagaagatttattatggtttgataaatatttcagtattgtagtttcctcttcagcactaattgagaataatatttatccattgcagaaaacgtctttaatctttgtagttttcctaatttagccggaataagatataaacaactacgacggggattccaagaggtaacacaatctgtgaaattgtagttcttatagtaaagtagtttaatacagttctgatttgggtgttcttccaggctgttgtatgtggcctccatcgtggtgggaagatatacttccatccaaatgacgatgaaatcttgcaggaaactgacaaagtaagtttttacttgacttagtttaacattcgttctttgaattaaagtaagcaacataaattttgagatctctagcgccttattaatttgagttcccagttatttatcttttaaatgttgtgcttggggttacctgatgctaatgtttaaccagacatggttctgaatgagataatgcaaaacattagtactattctgctgtcctttcaacagtgttccctttctcatgcagatattattcattgcacctgttcataggagtaagaaactgaatattgcttttacaaattttatccaaaaagccagtagttctgttcagagtttggacactgtagaaagacataccgacgatacaaatggaggggttgcagttacaaaagtacgacttgaaaatattgttcagcgtcctaccaaatcaggttccaaggtacagacttctgaagctatacctccgaaaatgacattacagagaggaatatttgattttctgaataatgtcgtttatttatttttcttatttgaatgtagacgtctgattggactgttggaccaactgagtatatacttttgctcggttggcgcccggatgttgtacaaatgattgaagaatatgataattatcttggacctggcagtgtagtggtatgggcttcttttcattcaggagtccttgttcaagggtcttctctatacttttgagtttttagattattgtttaactgggattgtactaaagcattgtgcctccctagatgcaaggtcatactacaactctaaaagatcaaatagatttgttcttcctctagcgagttattccaccaatttttaataaaaaaaaattgtgatgctgagtttaaattttgaattagataagttaaataatcatttaatattaagaataaaattattgaaactctattttttgtaaacattaccagcaattagtacaatgaatgcataataaatttaaattttggaagaaaaaaggggtcattttctttatcaaatgtttttaaaatacaaaggttggcattaattttcttttgcatgcattgtctatagacacgttaacttatctaggtctgaagtacaagggcatgaatgcatttgagagcaccagtaactgggagttagtggaacatggtcttcgtttattgcatgaaggagtattgttcaatgcatattgattataacgaaaagatattataaatgcattttctctcactctataatatatgtatcaaataaacatatatacatttatgtgcaggaaattttatcagatgcaccgatagatgacaggaaccgggctaacttagtttctggtcacgggaaattgaaaaatgttcgtgtttctcatagggtaagttctcacttagacaaccaacacataatttgtcttgtttctcttgtcagtcttgtactaatgcacctaatttgttataaagtccactgttattatttgaggtgctctgctctctgcagatcggaaatcccatgaactatgacactttacaggataccataatggatattcagaattctgtaaagactgacaaagatcttcccttgtcaattgttgtaatatccgatagagaatggcttcttggaggtggctgtgctttcagtttctccctttctcaattgtttttacaatatttcgttagcttgaagtagttttgtattaactagctttcttcagatccatccaaggcagacaagcacgctgcatattctcttctccttgctgaaaatatatgcagcaaacttggagtgaaggcaagtttttacattccatatatctgtccattttgagcttcttatatcttcattaaagaagaaagcaaggtaaaataaatggatttgttcacttcaggttcaaaatctagttgcagagattgttaactcgaaattgggcaaacaagtaagcatcccttttctgttttgaaatgcctattatttgtctgagcattttgccacataaattagtcatatgcacaatgtcttgcagatttcaagaataaagccagctttgacttacattgcggcagaagaagtaatgagtcttgtaaccgctcaaggtctcgactttttgttataatatatattgtattgattattttcttatgtatatgtataatttccacgtgtttctactttgtactgataaatagttattcttcgtgtatcagttgctgagagcagtgaactaaatgaggtctggaaagacattctagatgcagatggagatgaaatatatgtaaaggtaatcacacctgttgttttctacattttcttataaacggtaataaaaaaaaaaggtgtgttaccaaacttgatgagatatgagtctttgtgtttgcttacaaactaaatattttgtcatcatctgtgtcccaatacctaaatattattttcttttttttttctaatattcttaggcagagttagttacagtgtttctgttgtaatctgttagttgctagctgtatgttgtcactaactgttttgttggtgtaactaactctttccttagctctgtatataaagctaagctctcaattagtgtaattcattcaataatacaaaaacacttgtcttttaactctctgctttcctcctctcttacatacagtatgatattttttttccttctaacttctgaagcttttttgtattaaaataaaatatattttttaaaaagttaaggtcccgggtttggggagaatctacacacatgactgacccgcttatatcaagatctgagtctaatcagaaaatgaaagcactatcagtcactttcttaagtagtggagtcttagaattactgtaatgactattccaatttcaattcacttatgccaaccaaaggagttatttgcctgttcacttcttctaacaggatataagcctctacatgaaagaaggagagacaccatcattctccgagcttactgaacgagcgtttttacgacgagaagtcgccattggctatgtgaaaaacaacaagaaggttgcacaccattttctaatgtagataaaagagttttcgtactacaaattgttctgacttaaattaacaagttatggttgctgaacaggttattaatccaattcccaagtcagaacctctctccctccaaatgacggattctctaattgtgatatctgagctagaaggagaacaacctatcgtactgtaaaagtgcttacacctaatcttaggtttgttccatgttttgtgattatatgaattgatgtggaaaagcaacacgagttgttttttcttcctttatacttttcaatctcattattaaccacgagaataatcagttttggaaggtacgttaaacattattgaaattggaataatttaatgaaaaaataaacaggaataaggtagaattggaatcattatttatattgaataattttatggtaggtacacgtattttgttactaagatattttcttagtcctttatatatatgattttttttttaatcaaatcttgtatcttcattaataagagcaatcgattgctctctaaaattgataataactcagacagagcagaagactctgaaaacatatgatcagctagcaaataagaaaaaagaagaaaatctagcaacaaagtgcgcagctcaaattacagacgacttgacaaaaaataaagcaacattattaagggaagtcaaaagatatttacaatcatcaattaaagatgaaaagaagagcacatcttaatcccactacggacagctttcactatcactaaattgtccatttcaattgtaacataagcgtgataatctatcttcaactaactcaatacttcttttatccccattgtctcaaccactcctggtgccaccttccccgcaaaacacatcgcttgagtcgccactagaaaaccagtagcatcctgaatcacaaatccaatcctgaagctttctccctcaacaaaaactgttgcatctatgtttatcttgatgccaatttctggtttcgtccagagctctttctgtccccctcacaccagggacacaacggaggaatattacctcttccttgagcctttacccattggtcaagtgataaaactgtaaatgcaagaatgcccatctcagatctcttacgagattgctataccaactcattttgagctttccacaaagcccaacaaagcataaaaactcaaccaagacgacccacgtaaactcttttcatgatctctttcagccaagctcaaactgtaccaatatatctccctatcgatccaaacccaaccaaacgccaacgctcccaagcaaatgggtgtacaagacaagacaataaaaattcgtctcagcaaatacacaacacacgggacagatcatgggcacagacgcgtatttttcttgaagattcatatgtgatggaaggcatttagacaccgcccgctacatgagatccttgacttttgatggaattttgagttgccaaaactgtttccaaaagctcaattttgcataaacggataaaaatcactacacatcgatagggacggagggactttagcccatatgtaagcacaagtcctcactcaaatatatacat

SEQ ID NO: 15401 - DNA, 6548 bp, Cannabis sativa
aacacagagtccaaaataatatttatcctaattttgcaagataaaaataatgttgttttccaaaaaaattataagtaaaaattctaagaaaacgacggtaaatatatatataaaatcctaaaatagtaaaaaaaagataaataaaattttgagtaaatattattttggaccatgtgttttgcaaaagttattaattggaccttctgttttattaaataacaaaatagaccctgtattttgtaaaattgtacaaataggactctgaattaattttttgtcaaaataaaacttaataataatctaatctagaaatattatgacaaatttggttatatttattgtatctgttcgtgttagaaattatattaaagttagttatattaaaaaataaaattgttaaaaattgagtttagggttctattttttctattttaaaaagtatagggtctattttgtcatttaacaaaataaagaatctaattgataactcttacaaaacataaagtctaaaatagtatttactttaaaattttaggtgcttatttaaaaattaggaaagaaacaaataccttcaaatgttgtagataaaaaaagatcagaagtcgaagaatccttacacaaatagtgattaaaaaaaaacaatgataattctacagaaaactaattatataatttttaaaaagattatttcacaaatatataaaaataaaaaaaaattataaaaatacagttcatgttgcatgaacttttaaacatttttatgattttaataattttatttacaaaaaaatgtcttttaatttatttttatgttgtactcttgttaattttttttagtggtatactattttttttttatattgtttagatattattttttttattaattttttttttgttttttttcatattttttttatagaacacattataaatgtaaaaagaagatctttgaacattaaatcataagacatatgtgatatcataacagcgaagtctaatatagagtaaaaaatggtctctaagtgaccctctctggtgagtgatagtcgagtaaggactgcttcgtatgttggaacttgtaatcttggtttgcctaatgatgacgggtgaaaggcctgttaatgtggatgagttagtgaatatgactagcaagcttggagttgatcatgaagaggaatgggaagagaatgaggatgcagcgttagcctttggagcaaaatctttggttgggaagttaatttctcatcggaacatcaaagagactttgttcactactatcttcaatagaatgtgaaaaggaattgcagaatggactgtcaaactgaatgatgatgaaggggaggagaaactggtccaggctacgtttaagagtgtcgaggatgcaaagagtgtattggggaagcagccttgggtttttaacgggggacttctgatcctggagaaatggccattgtccggtaattggggggatgcatggttagacaaggtgttgtgttgggtcaaagtcaaaggactgccgatcaaactcttcacgaagaaaaatgtgtctcgattaggtgaaatggcaggggaagtggtggagattcgttggggagatgagaatcgcatgttttcaaatggttatgtgagaatgaggatcgggtttccgttaaatacaagtatctttgtggggagatttatcccatgtggggggaagaagcattggattcattttaaatttgaacatttacctatgctttgcttcaactgtggaatttggggacatgaacaaaatgattgtgttggtgggatgcgacgggaaactgatgatgctgggaatttagttccgaagtacggatcatggctgaaagatgatgacccctgtcccaatgggtttgtctctgttggaatagtgaactcagcctctcctatcgataatggacgacattgggggcaagaacgaagctcggggaatgaaggtgtcgtacatggtggtccggccaaccatggtggagagtgtacaactgagggtggggaacaaacggttattcgaggtgtggaggagggagttacaaaaatcttggagggggcatacactccacgtggaacccaaggaagtcaaggccacaactgttgggccaagtttgaaagcaagtattgggcctgaaattaaaggcccagagtgtggtattgggccgactatgagtaatacacaccattgtatggatcctactgttgcatctgggtcagttcactcaactttgcctgttgttgcgattgttgaacatgataagaaaaaggggaagaatggagaagcggctgttgctattggttctgaggaaattcagcgattgaggagtaaaggaaaacaagttcaacaagcatcaatgggagtggatggcaatgagaattttgcaattggggtatcaactggggagacaagaggaccggcttccacatcaggtcagcgtaagagggtgtccatttaaactagagctaggcttgcgaagagcaatgggaactctcgggggcattcgaaatcggttttggaggaatcgaaggcccaagttggtgttccaggaggtgttttttcggtggcagagtctcatactgggggaaatcatggtggtttgggtcttggggagaaggaggtgcagttgttggttcctgaggtgggtatttctaacgtgttggatttaccatctcatcttactaaacttgaagcggcgagccttgcgcagcaaggccgccgagcacaacgaaactcctaagttagaatgtccaaggaattgggaacccttggacattacgtgctctacagtcccatgtaagagattttgatcctagtattgtgtttttagctgaaagtaagcttagtagatctcaggcacagcgattgagtgccactctgcaattcggggagaacttttggtctgttgatcgggtgggattaagtggtggtctgttactaatgtggaaagaagaggttactgttcgggtggactcatcatcaccatgccatattcatgctatgatagctggtaaggactttctcccttgggcattgacttgtttttatggtaatcctgatgcttcacaaaggaaattttcttgggagctacttaggaatattaggagggaagttcatggagcttggctgtgtattggggattttaacgaaattgttagtttggcggaaaaggttgggggtaggattaacagtgcgggtgcgatggaagagtttcgggaggttactgatgattgtaggttgattgattttagttctagtaagacggatcttacttggtgtaatgaacatgagtccaatcctatcatggaaagtttggatagggggctttgtaatgaagagtggttacaatgttttgttggggcggatatcaaagttttagattggtgggcctcggatcatcggcctttagtggttgaaatgccgctggataatgatagtcagggggaagagcaaggtaagaagaagggaagattctattttgaggaagcatggtgtgaggaggatcaatgtaaggacattatagaggagcagtggagggatgatatggcagtaggatcggggagagactttaaaatgaaaacagaaaaggtttgcactgctcttgatagttggaataggaggaaaaagaagatgcttaaccagaaaattaaaaagttgaagacaacattgaatgctttgtcttcgttgtttgatcctggggcttgggtggaagttaaaaaaattgagagacaactgaatagggtgttggagaaagatagaaatattggcgtcaacgtagtaaagccatgtggttgaagtggggggatttgaacactaaatacttccatcgtaaggcttcggctaggaggaaaaagaatacaattaacgacttgatggatagtatgggcatttggcgaactgagacgagtatggtacagaagataattgaggagtattttaggaatatctttcactcttctcctgcagaaccggacatttttacggaggttgttttgggagttcaatcgaaagtgagtgaggagatgaatgagttattgatgggaacttttattgaagaagaggtggttagggccgtcaaagatatgaatcctaccaaagcccctggcaccgatgggcttcctgccttgttttatcaaaaattttggggtaagcttaaacaggatgtggttgggatgtgtttaaaggttttgaataatggtgctgatttggcttgtttgaatgagactattattgcacttacaccaaaagtggataggcctagtagagtagaggagtttcggcccattagcttgtgtaatgttatatacaagattgtgtcgaagtgtttggtgaaccgattgagaggtgtgatggggtcggtcctctcggatactcagagtgcatttgtcaaggataggctaatccatgacaatgcaattgttgcttatgaagggctccattgtatgcgtaagaacagattccaaaatggtgataagatggctttaaaacttgacatggcgaaagcttatgatagagttaaatggccctttcttcaagaggttatgctaaggctggggttcaaccgcatatgggtagataaagtcatgaggtgtgtaacttccacgagtctttcctttttgatcaatggtgaagttaaagggaaattaataccggagcatggtttgcgtcaaggtgatccgttatctcctttcttattcctcttttgtgtcgaagcattctcgaatttgatccaaaaagaggagagggaaggtaggctaagaggacttcggtttggccaccaaggtcttttggtatcccatcttttttttttgcggatgatagtttggttttcctggatgctactatgatgagttgtcaacagtttcaacaagttttgagcaaatatttggctgcctcgggtcagcttattaattatcataagtctgaagtttgttttggtcgaaatgtggctaatgagactcggagccaccttgctgagtttatgggggtgcggttagttgataaccatgggaaatacttgggattaccttcatttgtgggccgtaacaagaaggagttcttagatgagattaaaaataaggtgtgggcaaaaatgaaagggtggaagcaatccatgttctcgatggccgggaaagaggtgctaattaaagctattgtgcaagcgatcccaacatatactatgtcgtgtttcaaattgccaaaaaagactatttcaagtcttcatcgtatggcggcacggttttggtggggttcatccgataaggacaagaagatccactggtgtaagtggcggtatttgtgtaaaccgaaggataagggaggactggggtttcgagacttgggaatgtttaaccaagcgctactcgccaagcaaatttggagatgcatacgacatccccataatctatgtagccgggtcttaaaagcatcttacttttctcgtaaaggtgtgttggaggcaagttgcggggtcaatgcatcctttgtttggcatagtttagtgtggggtaaaaagctgatattgaagggctatcgatggcgtgttggtaatggggaattggtcaaggttttagaggatccgtggttaccaagacttgtcactttcaagatatatgataaacctccattacctgccaatctttatgttgctgatcttaaacgtgcagatggtcgatgggatgaggagtttataagaaatgtgttcaacaagacggatgcaaacttgattctggccataccttattcggattgggatttggatgacaaaattatgtggcactacagtaagaatggggaatatactgtgaagagtggatataggatggctagttcattggattctgaacaacaccattcggatgatcatgctattgttgagtggtggaggaagctatggagattgaaggtacccccaaagattaaacactttgtttggaagcttgctcacaactggctaccatctaatgctgttttggctaaacgtggggttccatcagggttgtgtgtgttcgatgctctagtcaagctactgaatccattggtcatgccttgtgggagtgtacaacaagtaaaaagttttggcgtgtgagtggttttctgcaggatttgaaacggtttgagggggaggatcacttgtcattccttatgcgcctggccagggagtgggataagaaaaaatttgagttctttctggtactattgtggcagatatggaatgttaggaactctgtggttcatggtggctgtagtcctaattcgggggacatggttgagaggtgtggtagttatctagctgaatttagaggggataggggtggcagtaaatcgagggagccgaggtcagttcagagatggacgcctccttgtgcgagtcaagtgaagattaatgtcgatgcgggggttaaacagggtggtacatgttcgggtttaggctgtgttgtccgggacttggctggagcggttcggtatgttgcagcaactatagtgcagtaggagcttcctcctttgcagctggagttgatggcgattcacaggg

SEQ ID NO: 15402 - DNA, 3499 bp, Cannabis sativa
ttaacctacattgtttattgagtttggtgtaatcttccttaagaacctctccccatcgtgtaaatcggttgaagttcgtcgttgctgttgtttcatttgctgtctctgttgaattgagatagcagcaggtatttactttttttttttccttatttatttgttggggttttatgttcttttagttatagcctcgattggaatttgtttgtgctccagcctctgatttcagttagttttcgatgatacattttgagattttgatattcatgttaatgcctcagcctaattaagctagttttacttttacagatggggggtcttttgtaaaattgggttttgggtttcttttttcactttcgtaattgttatctttttaagtaaaaatttggattggagtgtcactgtttgattttagtttcttgcctggctagtcttgatttttggatgcttctactttgaaagaagctcaaagtgatggacttggaacatcgaaattcatcatctgatgatgaccagcattttttgcttcacttcattatgggaatgtacttaggacctgatgtaacttttgataacccaagaagatctgcatttcaaagagtatctgaagattctccaccatatacatcaagtgatttaggctcatcttatgttagtatagttttgctggagaatttatattactatgtcttaagaaaagctcaccctagcctgagattgaagccaaatatgtttcataagtatctaaaaggcattgcagaaagatggcgtttcacaagcctttttcctttggatcttcatgaacagatatggtttcctgcaagctttaggattgtgaaaggggtcgtacttattaatgatcctgttatgtcaagcatggaacaaaatgatttaaataagtttaaggttttatcttgcataagtgattttaggatagaaatggacgagttacttcattatgaacacgagaatcagcaccaacaccgaagtaatggtgagaaaaattgcgtgaatgggaacgagacaatgatgggaggaagttccagtgagggtgattatttgtcactaagagatcaacataaacttaagagaaggcgggaatgtgaccctcttccgatgcctgcagtttcatactcttctcccatggctaaacatcatatccaagaaggagatttccaaagaacatgtatatttgatggacaagccgtcgtgtccattcaccctctcccagaattggagaattgtacctcagaaccaggtgcttctattgctatttctgggactgctagaaaaggaaaagttgggccaccagtgggagttgtggatgttggtgttagcaaagatgcatattattttcgagttgctctgccaggggtcaggaaggactactgtatgtttcttgtttcttttgacttatttacacttgtacatggtattcaaagtagctcctctgagtgtagtatatgattttgctgtggcaggtaaatttagctgtgagatcgaatctgatgggaaagttcatgttgaaggattggtgagtggaggcaaaagtataaagaaacctctgcgcatatttgagatgaacttccaacagttatgcccacctggaccattcacgctgtctttcagtctcccaggacctgtagatcccaggctctttgctcctaatttcagatcagatggcatttttgaaggagtaattgtacatcatgcaacaaagtgatgctgatgttactcctagaatgagagtccaatggaaacgtacaagtcttttgaggcattgtttttttttttttttttgaataggaagaccttatgcatatatggtttggatcatcatgtgatgatcttctctgtctcctgacttccttgtagtagttgaggctgcaatgtcctttgtttgtcatagtgaatcttggactgacaagataagaaaattgaagatgagagaatgtatgtttgtagattggggcacattagtagtgcattattctctgtccatgctaacaaattttgttatggaattacatcaattgtcaaatttcttgtcatctatgatattgaaaggcatatctctgtttgtttttcgtattcaattacatgaatactatcaatatttaatatgggaaattgttttattagaattgtattttttcttctataaatggttagctctgcaataacaacctctagagttgaaatattggtacttcatcaagcatattaattgtaattgcttattatttggttatgtgtaggtggaatcatctccagaatcaaaaggaaacgtatttttgttagtatggatgcgcaaaagtttgctgagaatcctcaaatggaagtgccggttgttcaaactggaactgcaaaggaaggtagtgctggacctccggtcggtcttattgatgttggcgagagtgaaggtgcttaccttttcagagttgcacttcctggtaacaggaaagatcaatgtaagtaatcgggtattcatcgttgattacatatgctaaggtttcatttgtagagtagaactggactagattgaattggattaaaagaatatagaagtttgaatgagttgataaccaatcactgaatgacttgaatgagtggatacaaagtttgaatttgtttcttatcattgataaacatgaaaatgatgattgaaaatggtaaaaattatctcaagttcttcactgggattaaactttccgaacgagtagtttagagaagtgagctgactcccaagtttgttgtttttaactacaggcaatataaaatgtgagattgaacgggatggaagagtccaaattgaaggggtgatgaataatgatgatgtaggtttaatgaaagagtcatcaaccccagatgaaccgtttaacatttggtttaggctgccaggtcctgtggatccgcgtttgttttctcctagttttcaaccatttcatgatcatggtatattggaaggggtggttatgaaacacacagctatacctccacaacaactttcctgatcattatctgaagcttttgatttgaatctgcccttgcaaagattacttgcctggactaacactaagacaattaattattattattattattattattattgtagaaactaactagatccttttgtacctgttttttgggtttctactttttagttgaagaacctcatggccaaatattatagcctctattttgatttatagttttaacttcttttttttttgatgtaatagttttaactttttttgtgtttttttttttgttttgatttaagcgtttacgtattacaataatgtataatctggaactcgaactcagaatttccaatacatacgcaccctctatggctatttaagccagtttcaagtggttaagtgcatatttggcatcataattaaaaaattgttttttgtttttaaaaatagaaaattgttttttgaaaacaatttggcatgtttggcttttttttttaaaaaacagttttcag

SEQ ID NO: 15403 - DNA, 6198 bp, Cannabis sativa
gtgataataatgatttgagtattttgtagcgattacaagtgttatacggtgatgaaaacgatttaatatatttttatgtctcaatttacatagctaaaatatatagttttttccttaaatatattgtaacttttttattcacatgatattaaattttgtagtttgtagtgttcaacatattcttaataaatcaaatccaaaaattgtggttttttattatttatttatttatttaattttgttagctaaaaagatttttaatttaaatatttacatagattttaaaattatatatattttttatttttattgtatcattcaactaaataaattgtttgttttaatttgtttgatgtgtttgtttttgtcaattaacataaagaaaacaaaaaattatcccaattaattaactagatttaatagatattattaaaaatatttatgatgtatgaatttaattttataaaagatatcaactaaatatatgtaagtgatatcataataaatattttaaaattataaatttaaatttctattttatcattttagattttaaaaatattttattcattaataataacttaaaaaatataaaatataattaataaataattagaaaaataaaaaatctaaagtaactcacacaaaaagtaaaaaaataattatttacatgtaatattaattagtatatacattaactagtactagtatatatatttataatttcaataattcaattcaaaaaaattctcataatgttatatattttttagtaattggtgaaatgcttaaatctatacatatattatattattttaaatttaatttcaaaatttgaatatccggaagatccaccataaatatctatgatcgatgtatcattataaatacaataattatgatgagattcgtagtcgtctagggtttttatgttgttatcatctttggtaaataattcgtagctagcgtacttgtagattcggcttcttcgtttacaagttaaaacaacaactacactcaagtctcaattcataataaaggtaactatttctaactcaacatgattatgattcccatcaatgcaatttttttcttcttcttcttcttcttcattagggcggtgacatgtcagcttttgattagtttaataagatcgagaatagatcctctcgaattcaaagatgaaagttttcgagagtcaaacaatagacaaaggaaacacacaaattaatactaccacacattcacatacaatattatatattttatatatacataaaagttagaataatatctgactcaaaaaaaaaaaaaaaaagagtttgggtacaggctttgtggaaagccacaacgtaaatgacacacaccgtgatcctctctacactctactctttctctattactagtagtagtagtactcactgctcactgttctctgctctctgctttttgtttagtttaatctctgggactggggtctgcacgtgctctctgcctcttcctctcacgtgcgtgcgttcgtgactcatcattcatatatacacacacactgtgtttatgtataatgtttcaaaattttacaaattaacagaagctaagagtagaaaaaaccaagagaagtgagaaagagaaagagaaaagggtcttgttgggctcggtagttgtggttgtggaacacttccctatattcgctgtcatcggtactcctcaaaccactgctcaaatcagattcttcctctttcttaacacatctacattaattcattttatatatactacactctatctctactattactactctatttaatttaatattcttttcttatatatattttagattgaattgaattaaaaggtattcttttaacttactatacaattaattatatatatttaaagatagacagagagtgagagagagagaaagagtaattcctacacagtcagattagatcaaaacctctatttaatttctttcttattactggaatagagatcttacagctacagaattgccctttggatcgaacagagagaccacccacccacccacccaccacattgtttttggttctacctgtctcgatcaccatatattcaaaccttcaaaggtgagttcttttcagtttttcttcttctttcttctacatggttttctctgctgcttttgcaatgtatataaattaattacatatacatatatacgctttctaatctgatatatagttttctgaaacacatgcaatgcaagctttaaatgtttttcatttggattaacaaacgtacggatcttactcaaaactatataatgagtctagctacctagctagttcctattcctatagccaataaagtttcagtactacttgtcattatgtagtatcgtatatcagttactgctgtcatacatattagaattctttttttttttggcaaagtatagatatatattagaattcataactctttctcttccactatcattatccatgtcttataacatgacactcattattaaaacacatttagtctctcttatttactatatatatgtacatacatacatacataaatgtatatatatatacatgtatagattaggaatacagacaatatattgaattgattggaggttggactggcatgatgagtcaagcaatgtctgattgatatatagtaaagactactgtctacaataatactagttgttgtgatgggatgtgctatttttagtacatagtataaagctaaggttgaaaatttgagttctgatcccagtgatccaaccaaactcaaatgctcatgttcttgtaagtttcatacaagaaaaatataactttgatcaaatgtgaaatattttaaacacatatatattatatacattattctattagcatgtaatagctcttcacaatattaaactagaggtgtaatgtaacttgtatacacttgtacaagtggtagtgtttttttacttcttttatttgaagtttgcctcctacaactccccatatacttctcacgagccatgtgattgggtaccctttagtttgactacataactacaacccatgtggaccaaaaaaaaaaaagctttaccccttttgtcatgatttagggagaaaaagggtttttttgagctagctactacacaccacacaatatttttggttaattaattaattaaagtagacattgataattactctcaatctactttaaagtctaagttaaagcaaaaaatagaaatatcctgtctaattaagaatcatctcaccatcatctttaatctagatctcatgattttgatttggacagtgtattcaggggacatccatgacctttcaacaattaggaaaatgatgggattgtaacctttacctttgtcatcctctataaccaaccctatccgagtaactttctatagctttaggccaaactttcttataggttttcccacttgtcatcttatgagaaaaagcattttcaaaaaagtggcttccattgaacaagaatcattaataagcaaaacccaataatatttatgtaaaggggagcttaagtatgtgatcatagtaagtacatagccaactcgtttttaaggtataagggatgaatggtctagtatgtaaaatagaactattaataaattgttttgacaactcatttcgtatatagaggacagtttgtttttttgttgggaagcattaattgtaattttttatatcttcatatatatatatttgtgtgtatatgtgaaaattgtttcatcaacttagtcctagtctatctaccttgtattgtctaactcaccctcctattttcaagctcaacatttttcattctttccatctaaacttgcttttccaaaactacccctccaagtacatattattgattaaaagcacatgcaaatacaaattaccaaactagaatggcatgtttgttattggccacaagaaaataaaataaaaggaagaaaaatattgccattgtcttcttttggtggaaactcttgagccaagtctctagaatcatatatgaggaccactttcagttcatttcaagtctacttacccagaccattgctctgctgtatgggacaaaagaaagtcgtgtcccctctcaatttagcggctattgggttgggcccatttagagatattattttatatattatctttcataatatctaatgttacaaatatagtttgtatagaattagattattattattatagtttgaaataacatatattaaaataaaaactctatataatgttatgattaattacacccggtcaatggtctaaggaatctcatctcagatgtggtaagtttttagttgtctcatattttttagtgagtatttagctacaagtaccaatttctcatcaaccaatataatagtaagattaataatattaatatttttatattttccattcttgttgggctcggttgaccagatttaaagcccgtgaatgttgtcttcctctatagtacacaagaaaacattcatggacgatcttacccttttgggattcactcgctaattaaaatgcatgtagaaagttataaaataaaaaaatcattatttttattctccattttatttctttttacgtataaacttataagaaaaagcctttgaatatgctgagactcagacttttttctttttattttcttttattaaataatttagtaggttttggagtttgaagtcaacaaaaaaaaaattaatggaagaagataaaaatatcaagagtaactgcccacaaccacctcgggtttcacgtaagaatgggaataggagccggaatcactcgagaaagacggaagggaaaacggatcaggtagatggcggagatcggatcaagtgctccggcaactcatgccgatcgtgtgcggcggcgctcatagccgattgcgtggccctttgctgctgtcccttggcggtgatcaactttttcactttcgcttttgtgaaggtgccttgggcggttgggaagaaatgtttgagacgatggaagaagaagaagaatattaagaataagagtaaatgcgagaaaggtcatcgatataacgacagtgaaggtagtgtcgttggtggagagaggtggtggagagaggagggtataatggagatttcgtcgtcttcaggggagaaaaacgacaccgttgaagacagtgtttggatggaattgtatcaggttggtcatttggggtttggcagagtctccttcagtgggattcaaccttctcaggttaagggcaattagggaatattacattagtacgattacgaaacaatgtgtaaaaaaaaatttctttttagttttttttttttttttttggatttttattttacccttttcacttgggtaattgggaaaagagaaaagttaccaattcacaattgaaaggttattattagtggcaaagttttggatgactttcttttgtattgttgtggaagaatggttgaattagctaagaaccagtcaccaaacgaaggcaacacacattctgtcgttctctgatgtgtttgtgtggctttactgtaaataaaaacccatatccatcttatttatttggcggtattagtgtgagaacttgcgtaattgagttgattcgttttgctaattgtgatcaaacttaattaacccctgataataggttagtaattgaattaatactatatatatttgattgaaatctatcaaaaaaaataggtgaggtgtttaagaatctttctctttctatataataatctttcaaattgttgaaggtattaatagctgattagtattatgttgtagattatatttcattatgtatattttgtgtcagattagtatttttattttctttagaatttaaatagctgattaatagccataattgtcaatagtattttttaggaagatagacatcatttttattaattactatacataggttaaatttatttatcaaataaaaaatatattatgaaatattagtattatgtaatattataatttagagaaagaaaatagaaaaaagatgagaattttctaagtgttatattccaataagtgatccctatttatacacatataagagtcaaatattaagaaattaggaaaaatggaaactaagaaaaaaagaatgttaattacattgatggtaaaagatttggacatccac

SEQ ID NO: 15404 - DNA, 3634 bp, Cannabis sativa
cctgggaaaatatgttgaacctcttgtttctctgctttcttgcaacttttcaacatccacactcaccccatttctttacgtttcagatctatagcaaaaatatttagttagaaggtttttgtttatctgtgtttgtatggcagggattgtcacttgcgtaccaggagagggtggtgtagatgataatccagtgatacagtgtttaaataaactgaaagcatttcccaaggatcaaaatttggattcagtggcgagattgtttgaaaatctggctgaactatgtagtgtacaaggatctggaaatgcagcaatagctactaaaaatggagcggttgaattaatttgttccctgtgttctgagattcaaattgagcaggaaaaggctcttgtttcgaccttaaaggcaatgtcttctgttcttcatggtatgtcggcatttcttgttatggagttcatactgtttgctaatctgatgagctaagaatattgctctttttttagtaaaagctgttggatttcaaattggggaggagcgattgaaccatttatagtgggacatattagaatgtgaaatgttgaaacaagaatattttagtggttatctatggaggtactcgttagtcaattctgattgcttttgtttgcttagtttagtgttagataattcaccctgaaatttttggacattattaggctcatctccttggtgctgtttataacatctatttccttctcaattctagatcttcaaagtacagaaacatttcgggctagtggcggaccatcaattgtggtgaatatcttgaatggtggtgtccaaaatttagatatcttgaacagtggtttcgctgtagttgctgcagctgtgactggtaatgaggttttaaaagatgaatttatggagttgaaaattgatgaacttattctgcatgcattgaatcgcccgggtgaaggcagcattcaaagtttgtatgatgctattcgtgttctcctaacacctgatgataaccgtgttttggcttcacaagtaagtcggcagttctcagaaatatgtatctgactctgattggcatacagttccaaagttggccaatgcctgcaattcatatgtattcccttttaagatggatgtgtaggattagcatcacatttggtcatgctctttttagtgacagtgttttccagggaaaccactaaatgccctgaataaggtttttgtttcaagtaaatctaacttctagtgttgtgtgaaatccaggtttatggttatgcaaggaaatttgcaaagataggaattgctgaagctctggtggcttcattgcagactgagcttagctcacctagtctagtgtcagctagcattgctttaaaggctgttgcagttaatgtaagtgaattgtcattctttaagacatcaatggtgcgtttggttgatagcaatagaaataggaatgagaatagaatggaatggacttaaattttataagttcatgtataaaaaataattattattattattattattttcaaattgcattcaaatggcctttttactaattttgaaatggaatagttattctaccaaaatattggaaaagtctattgaaatgacattcatatatattaaaatgcacccaaccaataaaataaaataaaatttgattgtttttcatacctccaaccaaaggcacacttaaggtttatcaatgcattgactgacgttctcagtgctacacttttatcacttatcactcgtaggaaatttatttgtttgatactgaggcaaatttcaatttcacaggatgaaatatgtagatccattgctgaaaatggtggaattgatgctttgcttcgatgcattgatgacagtggggaacaaggcaataaaagtgtcgctagagtttgctgttctttgctctctaaggtctaaaatttaactgattaagataattgattttgatcaagtaacaatcatttatttaattgttttgcatctaaaatcttatacaaggtttctgatttttattttgtcttattgtgaaatatatgatactacagcaaaacttctatgaatattttattcaaaataatttctgtaattagttataatttttcaagtcttgtatttctctataagaataattaaatatatatatatgaaaatatagaattaagaattttatttcacatttgtgtgcaatatatgtataatattatgtccttattatatttactgaaaataattttattacaataagatatttattttttctaatgtaatatatgatgtataaatattagatactaaggatttcttattgttattttggttactttgatgcttttttagtgttttgattatgttttttttaactaataactctatttatttattgtttccagaaaaaaaaaataattctatttagttataattagtttgatcccaaaagtatcagtaaaagttttactgactgcataataaacaaaaaatattcttgaataaggaaacggactgaatttgtttaaatttcaatagaaatacgaaagtttaaagcaattttcttgcccctaattgaactttttattataatattaagatgatactagataagaataattttacaagcagtattatagaaatttaaatcaattttgttcttggtgtttatttatattactgatttcagtgtcattttagattaatgatttccagtgttattttgttttctgaatctaattagtacctcttatgtctcttactacattttatttttgttgttgaataatctcttgtaactaattagttggctggaagtgacacaaataaaaacgttatcattgagaaaggaggtttggacaggctaatcaaactcgcagccagattttctgatgacccttctgtcctacatgaggtaagaagacagacaagtcttaatattaaggtcatatttacattgtattacaggcacatacatatgtatagatatttatatatagggttttctgcagtaggaactctgttttggacctactgataggaacttatctgtttaaagcacatgaattagggttagatacgtttatttaatttttttcctcaaatcaccctcttttttcacagtgagaatcattatgagttggaaggataaaccatgcagtgggcgtaccattacctatgttatctcacacttgtttacttatgtttacaggttatgtcaattatctctatactttctttgaggtcaccggaaagagcagcacgggcaatggaagctgggtctggtgaccttgccatccaagccatgcagaagtttccagcagcacaacaaatgcagaaaagtgcctgtctcatgatccgtaatcttgttgctaggaaccctgaaaacaggtaagtctctccctctcccatttgacatacccccatttgtcaaatctgcttttatgagatttccattatagattgcaatctaaattaagaattttcacttttgacagaactattctgttaaataatggcgttgagaagcatataaggaaaacgaaacaaaaccacgagttctgtagggaggctgctactgacgctctaagggatctgggacttgatgattacaactcataattctcggtcactgcc

SEQ ID NO: 15405 - DNA, 5543 bp, Cannabis sativa
atcgaaaggattctctctcgacgtctccctcgccctcagctgcagccccagccgccgacggcttccacccaaacccagcgtcgaccacgacaccaacttcgccaacaactgaacaaaccttaggaatctctcagtgacggctccaacctccaacggtattaaaattcgctcttcctcattctacgcgaagcaatctcttattcctgtctgattctctttttaaactttttcttagttagatttcataaatggtttgagtaattgaatcttttgcccagttttcttttttttttttgacgatgttgtgaaatggaaatatttttcttttatagaagtgtagattcaaatgttttgatagtgggtttagtttttggatggtaactctggttgactaaacttgtttatgagatcacatagaagaataagatagaataaaactacactcaattgctgtgaagtgtagctggttttggtggttgtttgttagtcttattattctttgagatgggcttgaatttccttcagtattgtaaatttcttactccttagttcatgccctttatagggtaatggaaatggaggcgtattatgtgaaattgaccacctattttggcctttggtggtaagaaattttccatgatggcttacaagtcaagttgaaatagcttttattcatcttgttttgtttatcagacttcatctcctgaattattgcagtgatcatcaccaatttcagttaacatgtttttcatcttattagaggagatctctatcagtaatcactgtttttgtagcttttgtattaattacatatttcattttcaacatctaactaaaaggtgttttggaaaagattactatttgcccaagtctatataaaatggcatgtattgattgttgatagattatttggttctgtatttgtcgtgaattaagccttgttaatgatgaacgtggatgttatgtgaaacttcagttcaattgcttgtagtatggttatctataaatttacttaatctattaattaatagttattaatcttcagttgaaccaattatatatattctgatactgttatgttttttgattttctaccagtcacagattcagtgttttaaaactaaaaaaacaatttatagacagtgaaccaatcacattttgagaaacaagttttcaataactgaattcatatttttatttcagaattatcgttttaaaattatagtttttgaatcacgaaccaatcagacactaattgtatcaaaagtaaagtttagatagttttgttgctaatcagcatgaggctaaactctactatttgattttattcgtagctcagtgcgtgctggcaacgtgtcacagtccacaaaatagacctaaaacacaaaactgagcaaccagtctgtggcttctatagctcacatacacccaatatttgaactgctgaatcgagaatagtagtccctgcattttgggttatggagttcttggatgagagattcgagctgagggagattcagaagcttgagggtcacagcgatagggtgtggagcttggcttggaacccagccactggtgtagctggggttccctatttatttgcttcttgtagcggtgataaaaccgtacggatatgggaggagagtcttaccactggttcatggaactgcaaggttcgacctttttttttttcactgaataaggaagtggcatttaatttgtgatcttattttctggctggttgacgagaagttaactttactgctgttcgtatattcatttattttctccattcttggttttgaatattgaatattgaatagtaaatagtaaagtgacttcaacttcgtgatattgggtcagttagtttaattgaattgagctttttgttgtaattaagctggccagatcgttttatttgggatttttgtgttgctcacaattagttttatgctaatccaatgaagaatttctgtctaatgctaaattggagagcatttttatctgggtttcatgattatattgtgatagaatttttaataatataatggtactgtgcaggcagttctggacgaaacacatactagaactgttcgatcttgtgcttggtcaccttcgggaaatttattggctactgtgagctttgatgctaccactgctatctgggaaaacgttgggggtgattatgaatgtgtttctactttggaggtactgatatccattagttgcattgcagtagtaggcaatgtgttagttgtacaagtaattttactagtttcgtctaatacctgtatagttttgtacattgagttcaagttaaacttctgaatatgcaagagtgatttgagaatgctacattggaagcttaagcactaaacaacatcattttgttctcaaattcacatcttgttagtttgtgtttcatatatttttcttcatatttgtaagtactgttagtggtggttttgttttttagggtcacgaaaatgaagtcaaaagtatttcatggaatgcatctgggtcactgattgctacatgtggtcgagataaaactgtttggatttgggaagtacagccaggacatgagtatgagtgtgttgctgtgttgcaaggtcatacacaggatgtaaaaatggttcagtggcatccgaccatggatgttttattctcttgtagctatgataatagtattaaggtaaaaactgacattaagagtttatttttatatatctgcggtcatctagataatcaatctatttgtttgttgtaccaactacaccagatttgggcagatgatggcgatgatgataattggacttgtgtacaaactttagatgagccgaacaagtatgatctctctctttccctatctctcaaatttttcaacttgtttgtaattgtaactacgccttttgatttcattaattcgaattatgtttttaatttttttcctttctgttttttcagtggtcactcttccactgtttgggctctttcatttaattccagtggagataaaatggtcagcagcaggtaaggaacacagtctttcttcaccttcatgcttttactttggatttcttgcttggtatgagtaacaaagtacatcataacgaaactgtgcatgctgaaaaaaaagaagaagctgaaatagcatttaactgattccacagcgatgaccttactctgaagatatggggaacagacttggcaaggatgcagtctagtgaaggttacacaccttggtgagaaaaatatcacatcaaaattagttttaatgtaattattccaaacttttgaaatgttgtattatattcatataatttttagagctctacatgtgaaggctggattgttggtcaaccacatgaatgttactataagctgtacttagatgcaggaattgaaaattagaacaattcatcattacattgcatatgcctgcttcgtcgtgaaggtcatgaaataattgttatgctgctagatagtgttctttgaacaaacagttcgttgttatatctggaattcggtgttccatattcctttttaggcagacaacaatggatgttaaatttatttttggacattctaataatttattttccattttttccctcttcaggagacatctttgcacaatttcaggttatcatgatcggacaatcttttcagtgcattggtccaggtattggttgtatactaataattaataaatgttgtgttttttatgtatattaatatatgtgtgacctttggagcattagctagatgaaggccatcaaaatgtgtacttaggtcccttagttgatgttcattttttaattaatctattgacaaaaataatgctctggacaacttttttgttgaaaaaatatgcatcttaattcagtgcaattgattatattttagttaatcaagatttgttccaaaagagatgtgattatcatctgtaaggatattgtatacttgaattcaattgccttggtttttactcttatatcttcaattcttcatatgtttttgcctattgaaaacttctttccttgttgcaatctaatcccattaattatctataattgaagggaaggtatcatcgccagtggcgcagctgatgatgccataagattttttgtggaaaactcagacaaagatggtttggtataattcatctgtgcttatcatcttacaattctgtatatatataattctattgctgattctctctactttttcatctatcctttttctttttatatatatgtatattaaaggttgatggacctatgtataaactgctattgaaagaggaaaaggcccatgagatggatgtaaattcagtgcaatggagtcctggggtaagaatttttcagaaatactttatttatctggaacccttagaacattcactttcttctactaccaatagtcgctggtgctgtgttttgctgaaaaagataatatcattttctccactttttattttcaccatcatcatctagctttcgcatattactgtgtttggtttggtcataccttatcatttaaaaattacaaaatcaaagatacaagattatgagagctagacatagtactagtttacacattgtttattgccttaaattgtgccaccatattcactttcacacttttatgtaatgttttctcatgtatttatcaggaaaaacggctacttgcttctgctagtgatgatggaaccattaaagtatgggagcttgcacctgtagcacccagctgaaaaaatttacagaatctcctcacttaatttcctcatgaattatgtgtaatgcaaaaatttacttttattggtccaattttgtcaatcaacagattaattatagtttagtggagaaacatggctgttgtaatttttaacaataaattgttgaccatttatttaaacaatgataaggttttgagtgagcttatttttaattcatatttacttattagcagaagttatcttgttctcttcttcttcattttttttttttaaaaagtaaataaatcatgttctcttctattaatcactatagttataggtcatttcgattcacttaagtggcatttggttgtgagcaatgataggaatgggaatagaaattaaaataaaaatggagtaaaatttaaaatatataaaaaattaataaaaaaattatttaattttttgaaggtttttttcttttatttcaaaatgaaacagtcattttattaaaatggtagaaagacaattttattaggatgatattttaatattttaaaatgcaaccaaacaaaaaaataaaataaaaattatttcttttctattttatttaatttcattatttctaaccaaaagcccaccttaacacttaattttgttgaattctaactctgttttgttaattggtattttataatattaacaaatccatatttaaccttcccttttcttaatttgaaagaaagaaagaagatgaatgattatgcttatgacaagagaactcccaaagtaaatttattatgattatataaggggcctaagt

SEQ ID NO: 15406 - DNA, 6224 bp, Cannabis sativa
aaaaaattaaaaaacaaaaatgttaccaaaaatatttattgatttttttttttttttttgaaactactttatgatacctcatatgacatagggtccggactgagtttacagagaactcaccctctgaaattttcaaagtcccaactttctctttccatttcctgaataaaataaataataatattatattagggagtcctaaacctatacaattatattcttgagatcttttcctcctgagttgctcagaccatcaaatcatatatatatatatatgctcataagttgctttggtgttcgtcacacaaggatacttcttcagtattgggcttcactgttttttccttgggaaaagtcagtgccctggaatatttaaacttattttcgcttgaagaagagttgatcttgctttgtgatccacactgatttcgggtttcttgtgctattcacagaaaacccaaatcgaccgttgaaacttttcagggaaaacctctgttaccatgatttgctccgtgaagcaattttcaccgatgaccactgctggatcagaaatatttcttcggcccaaatctcggtcaccgatacagcagtctctgctgttaccatctctattaattgagaaaccgaagcgatcatccatctcggtgcagaaacctctgcatgtttccatggtaggtgactctaatggaggttttgggtttttgaaagctcggaggagttcgatccaatgcgaggcttatgaggcggacagatcggaaccgatcgagactaatatcgaactgccaaaggccgaggggccatctgaggcggcaaagaaactcaagatcggtatctacttcgctatgtggtgggctttaaacgtggtcttcaatatttataataagaaggtcttgaatgcttacccgtatccatggttgacatcgactttatctctcgcttgtggatctttgatcatgttgatctcttgggctacgaggatcgctgaggccccgaagactgattttgagttttggaaggctttgttccctgtaagtgaataatttgattatgattttgtgttttttgctgagaaaataataatttttatttttcattcctggttggggttcttttggaaaaagtttaggaaaaggatggaaagtgaagtttttaactctttatgcgtatttcttttcttcttctttcatttattgatttttggtgtcttctgataagagaaatatatctcttgtttggttgttagataataatcaaagagaagtaaaaatgtattgtgtaatattattgtcgtagaacaagtcaactgagctaattaattaggataattgaatgaggcaaattccagttttgaaaacctaatgtaagatccacaatgctgtatttcaatttggatatctaaaaattttgttctgatttttttgttgaatctcttttccaataggttgctgtggcacatacaattgggcatgtagcagcaactgtgagtatgtcaaaggttgctgtgtcttttactcatattatcaagagtggggagcctgctttcagtgtattggtttcaaggttcttgctgggtgagagcttcccaatgccagtttatttgtccctcatccccatcattggtggttgctcacttgctgctttgactgagctaaacttcaacatgattggtagccgaaatcttaaatctttaaattcataaacatatcttacccaatttacgttttcttcttatatttgtagaagataaaaagagggtgatgtgggggtggtatctactatgacttagtcatgttatttgaactgaatgattcaggtttcatgggtgctatgatatcaaacttggcattcgtcttcagaaacattttctcaaagaggggcatgaaggggaagtctgtcagtggaatgaactactatgcttgtttatctattttatctctagtaattctcacgccctttgcaattgcggttgaggggccacagatgtgggcagcgggatgggaaaaggcctttcctcagcttggatctcaattgctttggtaaatatattatatattatgatatttgcggtttgtttgcttcattccttttaaagcatctatattaccacggggaaatttagcagaatgttgatgaatattagaactgtgtttataatcgacccccatacgtcgtcatctgtttcattttgtgataatactaacattttaccactttaatatttccattacaccattttcactatattttgctgaatgtttgaatctttactatttaattcattatggcatcgaagcaattgatcaattactcatctaatgagttggtttgtagaaataattcttttagattacgtccacaattttattttgttggatagtaattgatatagtaatgtcgtaaacttaaaagttgtgtttaagttggttggaattcaaattatagaggcaagtgttttctatatctttgtttcatttcgaatgttattcgtgctttgtattctctttgctactgacaccatctgttactattggtaatactgtaggtggatggtagcccaaagtgtgttttatcatctgtacaaccaagtttcgtacatgtctttggatgagatctctcctttgactttcagtgttggtaacaccatgaaacgtatttcagtcattgtatcctccatcatcatcttccacacacccgtccagcctgtcaatgctcttggagctgctattgcagtctttggtaccttcatatattctcaggtaagtcctttgtcgtcaatataaattgtctcattgttttctctctgttgtctcatcttattttctcaacttgcctttatttgatttgtcaaaaatgccagatatggacaaagtttcttttgactgtttgtacttcaatactttgtacagatttcacgagaaccacataatagcatagctctggaaccttaacatgacttctttccataacgttttattatatttcatctaaaaacaaaattacgaaaatgaaatatgttttgggggaccacagttcacttaaaccaaaatgttgtgtgaaataaatatttaagctcttctttcagcttagattagatggggataagtcaagtggaattagtttgtattgtttgttactttgttttgtgggggttggtaagggtgtttggtaagacggggttgaatttgttttagggcggcacttaactaccaattttgcagttaataatcttttagatgttaggtgaactagatgaggccgcaatccttgaacttggaaaatccactttttttttttttcagattctttgcattatttgttctcttagaaggtaagtaatacaattaggtcccaattagaaagacaaggactgaatatattaaatatgcttggtttattccattaatgccaaggaggccaggaaggaactgtaactgttcatgcatatatatataaatatatatgtattcaagagcactcttgacgggttggggttggggttggggttgttttattggctgtgatttttttttttttttgaagaatataactttttcagcgaaaaaggagataaaagaaggttgtgtttgagtttgatgttttttttagcttaaaaaagatacatattttttttaagtagttaaatttaaacttaaatttctcttttgttttgatgttaatatttctaaaatttatatttatagttaattatagtttattttagtagccaaaacctaatgagaactatacaaatataattaatggtttagtaaaatttttaattttagactcaaaataattataattaattatataatttaaaataaattaattttttaattaaaatatttaataaaagattttttacagttaattattataaatatttttatttttatttttatttataaataaataaataaaatcgtattaatttattaattatttttatttaattttcaaattaattacagctgttataataattaaaataagtaattgcatatttcatataaccattaaaactttttctatgtttatatatttataaaaattgattggagaaatattgttttcttcttcaggcaaagcagtagaaaattgagacggagaaacaaagtatatttatattttgttcatgtaagataaaaatcttggaagggagtttcttcaagaactggtgaagacgcttatagtaatggtagagtttcttttccagatccacaattggcggattctcgttcggatgcatcgatagtctcgtgttcttgtagataagcaataataaagagattgagaacaccatttatgctttttttttttatatatattttctttttttcttttgttatacaagtaattagttagtttatttttcaaataagagaataatctctcagacataccgtttctcacctttttttttcttaaggcattaaagttagaaagtgctaagaattttttattttgctttttttttttttttttcctacgctatcttttgcactgcaatgttgagggaaagaacctaaactgaaaaattaaagattacacgggaaatgttcatttccattccagatccatgtgagaatcgggccaaattatgagctgctgtgacctatggatatgagtgagggaatcagggggaaaagacaacacatcaatgatacagtcaactactctacagttagagaatttcactgttggcgtttacttcccgaactaaattgaggcagtcactcttaatatgatggatactaatttgttgatctttgttccagcggactgcctgaagcaaagcccaagcttccacattcatggggctcattaaacctggatagtatttggccgttcgttcaatgacatttccttgagagttcctgatcactcccatacccgacttgttctttatggctgaagctgccccatctactttcattttcagttttccttgaggtgggagataccaattcaagttttgagcatggaaccggtcaattagaggtgtcctggctaagtattgggcttcttggaagtgagtgagtatgtagtttctggcctttctttagcatttataagaaaagagtttagactgttccgaatcttccacaaaacacataaaaaccttaaactcattttcatgcagcttgcttttaattagtagtattgtatcaaaaatatttctgtgtttagcattagttaatagaagctaaaggcgtacttgaccaaaccttcttgacacccctacactcaaataactcatgtggtaaagtttctttgcattgattacatctagagtgaattgctgtgggaacaacctttcggaaatggagattgacaacactaggaagagtatcatgacaaaacctatagataaagtgcttgatttttcaaagaacatgcagaccccaaagagattttctccacttagagatgacagttgagttagaggaggccaatttagtaggtttggatagagttcggtccaaatgatatcttgatttaataaaacagttcccatgggaagtatactgccagaaaagactatcaccttcagacaggtagggggaggaagggagaggatatcaagaatagtgtttgactgaaagagaattgagaagaggacattccaatcttttgaaggcagtaagagctcagccacttttgatattagataggaatgaggctaaggaaggaaattatagttaggaatccatttatcatcatagatactaataattttacaatcaccaaccctccatctcaccccttaagttagtaactccttacctccttacatcatagatactgtttgtagcttctagaaaagaagtacgaggaaagtatttagccttaaaaattttggctaagagagaagaaggattcgactggatcctccaagctcgcttaggaagcatggcctggttgaaaagaacaagacatttgaattctaatcctccaacaaacttagatctacagagatcagtccacttccaatgaatcttaccatctccacaattggaaccccacaaaaattttgccatttccttcttgacaagcttgcaaaagaaaattggcagcctaaaaacagacatagtataagagggaatgaattcaatgactacttttaaaagcacctcttttcaccatttgagaagaatttcactttccaactattgaggtattgttgggttttatgccctaaataaaactctgtttcaatgtaa

SEQ ID NO: 15407 - DNA, 3744 bp, Cannabis sativa
ataaaatatgaatatttaaatatatatatttaaattatgcttcaaaactgcgcgaagtgcggttttgtttcctagttacaaaataatgaataataaatgtaaataaataaaaaactaggaaaagattccacatttataagaaaatatcccacaatcattgaaattgttgttaaatttggtaattttcttttctctattgaaatgtcttattaatgtaatcaataaaaacctaaagtataaatttattataattgtaataagattttaaaattttaatatttacatatattatattgggacgtgtttcgggagagtatttattctctcgccccgttccgaacccaactcggatatgaacatttaaactcatacacatttttgcttctgaagttcgaccccgccccgccccgccccattaggggcaagtatctgcaggtacctgaacccacaagtttaattaccatacttagtaaaatttaaaacgatctctcttgcatgccaccaaaatcacttatactgattactgaaccttttacaattttcttataaaagcaaaaaaaaaaatattcattatattattgagtgcgtttttattataattatagatgaaaaagataattccgtaataattgtaaaagctgtaaaaaatgggatcaaaataaaatcatacaaaagttatttagtaattcatgaagtacacccatacaaataataattacattctaaaatacattttcttagtttttccaattagacttttttttaatctaataaaaacgcataggaacccccacaagtatgtacataattctatgttatatacttaaacatataaataaatataagaaaaatttaacagtgattatatgtatatagaaaaactttgactttgacaaagtatgtcctacagttagagaatgaaatttgatgtgttcatcgtgaatttttgggtaattcaaatcattaataataatgttctcttattcttaatggtgttagaaaagtaaggtgaagtgatacaactttcatgttttgaatatttttatcaaaaaaatatcattagttgctttgaaattgacttgagaaaattctcacttttgaagctttcgaatgtgacatatattaactgttttgaaggcacaaagctaagaagaaaaattacaacttttgagttctaatattaacaaattattcaatagaacaacacaagtgaaaacacaaaaacaaaaattatttgcatccaacaaccgaaaattgtaatcttaataaaaccaaaaattgaaattccttggttgatccatacaaatgttgcctcaaaaatttcaagattctaaccaatttagttggtactagtaaatacccttgccaaactagggtttttcaagttgagttttgtctcatggcaaggattttctttgttacttcatcttcatctatcttgtcacttttcatgccctccaaaatggcatctacttctttaccatctcttatatgtgcctttaacaatgcataatacatatgtctgttaaccgggacaacggtcttcaataagtccacgaattctttcactgcttccgggctctcattttcaccgagctgactaaacaattttgtggtcactctaggattgagtttccacactacttccgaatgaagtgagtgaagtgagatagctacctttatcaattccaaagctttttctgtctccttcttttccaggtatttcaaagccacaatgctccaactgttggggctggtcatttttcctttctccaaaaggtcctcaagcagtttctctgctttctcacactctcccttttcagcataaccgacaatgagacagttcggtacacgaaaatcataattgttttctgaagactcccactccttcaatactttctcagcttcctcgagctcaccgagcctcacgaaagattctaacataacaatatagtccttgtttatgcacctcttacaagcacttttttgcagttcccataccctcaagacctcttccttattttccagtttagcgtaaagtgaaattaattggttgtatccacttgaatctttcttatctagcttctcttcagatttctttaaagcactggttgctttatcaggttggcctgcttttatgtacaaattagcagccacagcataagtgttccaatccatagtaatttcgggttggctctccatctccttgagaaccctttccattccttcaatatcagatcttacaccgtaagaattcatgcaaattctatagctgaagttgtcgggagaaacattattatccttcatctccgctagaacatcagggaccttctcatgctgaccaatatttacatacaagcacatgatatcgttgtaagtaagagatgaagaagcaaaacccttctctttcattttctgtagatgagagagtgacttatcagtttggcgctgtcgaacatagcaattcagaagggcgccgtaagtcttatcattctgatcttgctccttcagattatcgaaataactttctgcagcaacaaacccgtgaacttttccaatcagatccagttgcacagcatgttcagtaggtgagaaaacgcaaacacccttcttattcatccattccgagatctaccacaataaagaaattaagtaaactcaagtgccaaaaagcaaaatccaagaatcatttgcagtattctgatcaattatccatcatctatttcatgtccccatatacacatcccaatgtaatgaagctctgaatatttttgactaagttaaatctccaaaataaaataactctaataagtccaactgaaaatgtacctttttcatcataacctgtaaatctctactctaagtactaaggacttgtttgcaccttggattttaagaggggaaaaaatcatgtttgaattgaattctagttttagaaaaatcaaaacttgaatgtaatttaagtttatgaaatttagaatattacaaatacataaatcatatttatggaaaacattttcatccatttcttctttacttctctctaaataaattccctgtaaaatggaagattcaaacaaagcccaaagctatatatactatttacagctaccatcttcactctgcatagtattagtattgtgaaaattgattccaaaaatttactcctgtgaatgtagttttagaaaatggtgattagaacagaaattctacaagattcagtttttacatattacaaattgtccactataaaaactcataatcaacacaaacaagagaaccattgaaaccaacaacaaaaaaaaaagtttcgtcgtacctctagggcctgagaaaaacgccggcgcttgcgaagatcatgaatgatgcgctgaagctctccgactcgaacccttttccccttttgaatccagtcatcaagctcgggcacaacgcttgtggtaggactcccgagaggactgattctggagtagagtgaggccttgctggccgtgttggtgtagtaggatctgctcgacctcgcatttctaataaggatctcggagaagagcttcgaattcattttttcagtgaaatggagcttggatttcgaagatggaaatggaggttttagggttttggttctcagacaaaatttaggggtttaaggtttcggacctgatttcgaattttgtctacatgggctcattttgggccaggcctcacatagtagaggcccaatacaaattattctctttttttttt

SEQ ID NO: 15408 - DNA, 6369 bp, Cannabis sativa
  modified_base (185)..(199): a, c, t, g, unknown or other
  modified_base (5868)..(5868): a, c, t, g, unknown or other
taaataagctagtatatatatttaaatttatgtgtatgtgtctatgtcaataagaataattttacttgtgttttttattataaaacaaataaaatacaccaattcaatatattactaaataagattaaaaaattagaagtttgtgtttttttttaatattactagaaaattaatatatattatannnnnnnnnnnnnnnaaaatatatataattaagtgcggaatggattggatcggctgctttttgaggtcaaacaatatccaatctgcacaagtgcggattttagatttttcaatccaatccaatctgcacaagtgcggatattcgcattttgcggattagattggattggattgtggggattggattggatcgaatacttagtgaacacctctaatttttagttaatgaaacaactccattccatataatgtaaaaataaaagatttttctaattaaatagaaaaattaatcataaaaatataaattttcttaatatttttcattcatgggtaatactcaataagaatgcatatatatatacatatatatatcttaaattaaatgtggctatttaatagaaattattatcttaacagttttttttttccgttaaagttaacaattaaaattaacagcattaaatgattgaattaattatcttttttttttgaagaaaaataaatcaattttgaatatttaaatttaatttatttattaaaatattattttgataattattaaaagtattaaaaaatttaaataattatttcttatagaagtttttatttaaatttaaattagacgccgtactttataataaatttattagatatattgttttaaaaaattgtaattgaattgtattaaatttaaaagtaaaagagacatggcatattactagctaatatattcacatattgtatcttcctctgcaactttagggttctgtacccccacaggtgaattttatatgtgattaaatgtttgttccttgtgagtttcactgccattattgtaattcacggtagcaattagagtttaacgtgttgtggtgctaaatatccatttaatcgaatagtacaattattgtactaaatatctttcttttgctccgcattcttatcccggggagaaagtggtatgttacctttctatttaaatttgccaatctattgtttgctttttctcatgaacactctcttgatgagcttctgcgagtctggttgggctgtctcttgatgggaatggagcaagcctattcccatatgatatgttaacagtcgaggcccctgtgacaacactgtcaggcgttaccggatcataccatcctagctgtagatgttgaccttagttgcagcagcccttgtcagcctataatattctgttgtctgcagtgcagtatcctctagaacctgttattgtcagttgtaataaatcatgcttgttggataaaaaatatgaaccggatcaactagaacctgttattgtaaattgtaacaaatcatgcttgtcgggtaaaaaaaatataaacaaggatcatttttgtatttgttggtgtaggtggtgattccatttcatcagcttaaggcagttaatccatctgcaagcaaagtcaaccctgctgaaaaatacatacaggttatatctattgacaaccatgagttttggtttatgggttttgtacactatgacagtgctgtgaaaaatcttagaggactgttgcaacctggcagcttgtgagaaacattggaccaaacttgctatgtcatggaagaaagcactgcatgttagttgagctggcttgactttgtggttttggtggaattgtatggaacaattgctttagtgttgtgttttgttcttgtgctgccgttgtttttgtctggatttattcttatattcttttactataatatttgggggtatagggaagtaacatttgtattagttgtaaatgacattggtaatggttgtatacatttcatttgtacttggtaatgcagatttgtattgttatagggtaattactaattggcggctataatttaaaattctaataatttaagaacttaaacatttattatggtaaaaatagttaaatcatggtttattgtaatagtaattgtaatggaatcatgattattattataatgtttaagtttactctcaaaagtgatgtaaggaaattagaatgtaatgataattatattatataagaaaatattatattaaaaaagttatgtaatgatgattatattacaagagatcaaataaagtaaaattaaaatgacttgttctctcttgttatataaatttaaaaataaattaggaacaactttgttaatttaccacttattataataattaatttttattatgattcttattccattatattattattatcattactattatattatattaaatcaaacttcaccttaagtcgttgccattcaaatatttaacactgttataaatttttggatatccaaagcacacaaattagttatcactataaatacttaattgtatttctctttaattacattgatttagccttttattcttttggtcttatttttgtattaaccagttctctcttcatctactttctcttgattttagtatattcttaatagttttataataggataaatactcattggtaacctatatttaattgaaatacaaacttagtacctcatatttttaataatgatgattgggtaccttataatttaaaatagtacccatttggtacccctaaacttagatttggttaaccaattttttggtatggactaaagtgtccttatttacatgtaattaatataattaagcaattataattaatttaggtaaaatattttacgtgttaattctattttcggtatctttaatttgacaaaaatattttatactttaaaattaatttcggctatagtatttatttggttttcatattttgtgtattatactcttatatttttgtattaattaatttatatttggaagaaaaattgtctaacttttctatttataggaaataaggtataaatggtaagtttgatgactcatcctttctctattatctagccgtgttaatttgatcttgtgtgagttttttaatatgtttaatcaaatttcttgtggagaaaaccgaagcaagattttccttttctataaaaggataatcgcagttactgctcacatttctataggtataggggctgattgaagatctattttagggaattatctagtgagctgtggtcttgttcagaccgtgtgtaagctgtcaataaggtgtatattgattataaatacaccttatagcagctaggtcttgtatctcgttcatgcactttgaattgtattcatatcttaagaaaatagtgtctttgttttgtaaagaagaaagtgttcgtctcttactctgtttatatgtattttgtattatcttaagtttgtattcaagtctgcaaaagaagaagaacaatagtgctactttgaggagaaggttttacaagctttcgtgagattactatttaagtcttgtctcgagaggaagcaagcactctttaaggagattgaagggagttcgagcacttgaagtttcagcaagattcgattagaatgtggaacccatcaagcttgcggcatacaataagagagagtttatttatgcattagtcaattactttgtatttttgagatccatctaatgaatcttatctttgggtgaggtcccgtggactagtaacaatataaaaggatcgttgaaaccacgtatcttggagttacagagttgtcttctgtagctacagaaaaaactatttcagcaccagttttattattctgcatttacttaagaatttaattaaataataaactggtaatattaaaatatagaatctcaattagtatcagagtaagttactaaactcttagtgagatcttcatattattttatttcgtataatttattttgtgtgaggtgtcgttgtttgcagaaggaagatctattactcaactacctctgttgaatgattcaaattatccatattgaaaggtcagaatgagagcattcataagtcataagatgagaaggcttggagagctatacttacaagttgttcatgacctactgaaaatgacgataaaggtaatactaaggtaaaacttgaacataattggactactgaagatgaaaaattatctggttaaaacaataaggccttacatgctatttttaatggtgttggtgaaggctttattaaattaatttcatcttgcgaatatgtaaaggacgcgtgggaaatccttcaaattcagttgagggtaccactgatgtaaaaagatcacgttttaccatgttgcaaactagatttgatgaattgagaatgtcagaaattgaaactttgcttgaatgttatgaaagattatctaatatctctaatgagttttttatcttgggagaaaaattagatgaatctatgttagtttggaaaattgttcgtgtgcttcttgatagatctgacacaaaatagtaagcaaagtgtcttgagtgagaaaagcaaaggtgttgcttttaaagtttctaaaaatgatttttctgatgatgaaatggccttgttgacaaagaattttcaaaaatacataaaatctattggaaataatcactaacaataaaaaaggtattcaatgcaggaagtgtgaagggtatggccatattcaatctgaatgtgcctttgaagaaaaataaaaaaaaagtttaatgtaacttgaagtgatgactctaaaagtagtgaggatgaaaataaaaaagttgctttaacaagtgttttgcaggaaaaaggaaaattcatatgtttaaataacactttgactgatgtcaataggaaagaagatggatcagactcagatgattcaaaacttgatgataactctttggttgaatcttacaaggtaatgtttggtaagtagttggaaatttgtgctgaaaattgttccttggttaaagtcaataaagatttgtgtcacaacattaaagatcttgaagaaaagaaataaatatgaatctgaattgattttaaaagagtctgaaattacctctttaacaaagaaacttgaaatcttaatagaagtgtccaaatgctaaatccaggttccaacatttttgaaaaaaattcaaaatttaggtcaaacaagtcatgttggtttaggttttgtttcgactcaatccatacctaataccaaatttgttgatgtttttgtttctggaagttctatctctaccttgcagaattctgttattttagcaaaacacactgctgatactgaaaagaagtaacacggtaagtttaacaatttcaaatggaatagaagacgattcattcctatgtgccatttttgtaggataaaaggtcacattcgacctaaatgtgttactacgcaaaacatgtttaaatccaattattttggaaataaatatgtttctcaaaaataaaaaggggttgtcaaaaataaatgcttggtaggctcttcatgttttaaaactattgcttctcacatgtggtattttgacagtggttgttctagacacctgacaggtgaaaaagattatcttgacaacattagaccaatgcattatggagaagttactttcggtaacggtctagttggaaaagtcataggaataggatctcttaattttgaaggtcttcctatattgatgaatgtcatgttggttgaaggactaaaagctaaccttcttagcattagtcaaatttgtgatcagggttatactgttagctttgatagtaaccattgttatgtttataatattcttgatgaaattntcttgcaagggctcaaatctagtgacaattgttacactctcattacttatgctacttgtcattctacctttgataatactactgattatggcatgaaaaacttcgtcatatttatttcaaaaatctaaaaagattgtcaagtgcaggaattgttcaaggattacctaaattggataatgaatctgtgagaaaatgtggaccatgtcagctcggtaagcaactaaaaatttctcacaaaagtgttcctcatgtgaatacttcctgagtcctcgaacttcttcacatggatttaatgggtccaacccaggttgaaagcttgattggtaagaggtatatttttgtgtgttgataaattttctcgttttttatgggtagactttttgagagaaaaatctgatacttttgaggcttttaaatctttgtgtttgaaattaagagttgaaaaaaaattgtaacattggtaagattgttcgcattagaagtgaccatgggaaggaattt

SEQ ID NO: 15409 - DNA, 12022 bp, Cannabis sativa
  modified_base (2034)..(2047): a, c, t, g, unknown or other
taataaaaatatatatgattttttcttaaagcatatatagaaagaaagaaaaagataataaaaattaggtggggtagcattttcacattggaaggaatttaagaaagctttaaaagttgaaaagtagagtcccactcaaacccacccagtagccagtagtactactctgcatctgcatcatataccacaccactacttcccttgcctataattacatttacacttgcctataaccaaccaaccatatattatagagagagagagagtacagctttttctttaattactcttgtgtattgtacacaccttcgctacctacttactttctctttatttattattattggcctttttccctttctttcacctatccaacaaaccaactaaccaatctttctctctcctctttttacccattttcccatccttcattgttcaccccattctttattggaatttttataactgaacaagaacaacccttagaagtcactccactccatctccatccatagggaacaatctcaggaggctgtcaaattccaacatttaatatttgacaaaagttaaaaagcactcatagtctctaccactgaaatgtaatatcattattgatgtaacttaatatcagattctacttctttataaaattaattacattgattagtgtattggcgaactacattagtgtttgagaaaatttatttcatgtaattttaggttatccgagcttcagttggaataatatcataataaaagtgactcataaacatatgttattataattttttgggtcaaagcacaaaattagagactaatacaatgcttcttttttatacatttgttgtgtttacttatatggcattagcgaatgaaaacaaggaataagttttattctttttttttttttgttatttgagcgaaatattgttatgttttaattttttttaatggtaaaattcgttttttttagaatcgtttatatatagatatatttttttgaaaatttaaggtgtcacctggatatcactcttagataccaataacattattactattttggctttgaagttttattttcacgtatacacagctatgcagtctacaatgttcattcaattggtatttaacggtgatatttaattaacgttacaaatttgtaaagaaaagtaaacctaagagagccttttgctaaaaaaaataagaaaattaaagtgtataaaaattaaaacataagatgtttggttaccattttttttttaaattataaattgtcatttttgctctaatttaattgaataaaattaaaattttccaaagcatataatttttatcgtgtattctatatattttaaaataaaatattatgaatattcttctataaatgtatatatatatatattttatcaaattaataaattaaatatttaacactttttatttgattaataaaaaataaatacaaatttgttaattttttgctattttatttttatgtgttatttaaaaattataatttttattaatatgaaaaaataattaatatactaattttctctttaatatttctacaaaattataaataagttaaactttttatattatatatatttttaataattggtgaaaagaatcaatttatattgtaaattaaaaatatattttattataaaattatttaaaaataatgatctataaatttttgacatacatataaaaaatgttaaattaatggtattttgtaactcaatatatatattttcaagttgtgtaaacatataaacgttaatattactaaattctcattctagataatatttagtttaatgatgtgtaatgataatacatactaatatatgaaataagagtaataataaaaattaatgggtgttttacaatgcacctcctttaaaacaccctctatttgtttcgggattcaaaaaaatttttagtctatttttttcatattcatgtatgttacagttatttaagatgttctacaaaattttgaaaaaattcaaaataatttacaannnnnnnnnnnnnnttcaaacagtttattttacacgcgtataaaataaaatagtcatgtgtacaacacactgcttgaacgtaatttttagcatgttaaatttttctaattttttaaaattttgcagaatgtcttaaataagtataatttacatgatcatgagaaaaaatttgactaaaaaataatttcagatactaaaatagatagagatgtatcggtatatctcttttaaaaaatacattatagaatttcctttattttaaaaacaaaccaaacattataattatattcataattcttaggattacaaatgaaacataaccaattctcctaagattttgatattaacacaaccttacactaaatagttttttttttttttgaaatggtaaatacttaaatagtttttaaaaattttctttttaacaatagtatagtttataattttattataacaaaactagggaaaggtgaatctcaagaaaaatagcggtgaaatagagactattatttatgggtctatgtattagagccacttttgacttttgttcccaaagaagggtaaggcggtcattttcattttctttcatttcatttgtattttcaacgacatccgtaatatgggtcatatttcgttatctgaatgtcaaaatcgtaatttaataaaatcccagggggtgattcccaactccattccccactcacaaacaatccctaccctcgggctccacattattgccactctgcgatccacgtcaaaagaagatctgacacgaccacattatgctccacgtcagataatcacgccgtttagatcacgacacgtgtcaatttgtcccattaaattgactgtccctcccagctacctacatggtcccgctttgccgttaataaagcgcttttaatttaattttttttccctttattcagagttcacacccaacactgctgccccagtctctcagatcagactgccttttagagagagagagagagagagagagagagagaggttattttctgagttctccggcgcattcgccccctgcattttctcagactaagttatttctttccggtgtcgagtttgtgtttacgacgaatagtgggagctccggcgagggaagtagtctccactctccagcgagactttgtatactgttacgctagccgcttttgtttgttcgggtgtggtcggagtttcttctttgttccagttctgaccgttggagctttctatagctctgactttttctttttttcgcttcgaggaagagagttctagggttttgtacatttgaccctttaaaaacagagtttgccattttgggcagttggggttcgggttgagggtgtgtcattttgacaaagcttgctgttttcttgtttattggtgctactccatatctgggtgtgtcttgtattttgttttgggcggttccgaatctagccgttaaagaaagttggcgtttttctgattgttttcctccaaattttttcttttgttaagtaattttttcaagtgtttgttttgacagttttgagctcttgaagctaactgtaaaggtaatttaggcttttgggtcatctgtgtcgcctgcaatatcttttatggatttgcagtgtctttgagagtatttaacaatgccagcatatataagtatgagaaggttcctctggttattcacccttgccgtcttaactcctatttacgtgagatctctaaacccttccttaaacgacgacgttttggggttgattgtgttcaaggccgatatccgagatccgaagggaaagcttgcgacttggaacgaagatgatgatagcccatgtggttgggtgggcttaaaatgcaaccccagatctaagagagtcactgagcttaacctcgacgggttctctctttcgggtcggataggcagagggctgttccagttggaatttctcaggaagctgtcactggccagaaacaatcttaccggaaccataagccccaatatagcacgaatcgacaaccttagagttcttgatttgagcgagaacagtctctctggagttatatccgaggatttttttcgacaatgcgggtctctgcgagtgctttcattggccagtaacaagttttcagggaaaatcccagagaacttgagctcatgttcaaccattgcttcgattaacctttcatctaaccaattttctgggtcgtttccatcaggaatttggtctttgaatgggcttagatcgctggatttgtctgacaatctgttggagggtgaagttcccaagggggttgaaggtttgaacaatttgcgtgctatcaatcttgggaagaatcagttttctgggaggattccagatggaattggaagttgtttgcttgcgaggtccattgatctcagcgagaattccttttccggtagcctcccagagacaatgcagcaactttccctctgcaataatctaaatctgcgcggcaactctttcactgggaacgttccaaactggattggagaactaaaaagcctcgagagtttagacctttcagccaataaattttccggtcttgttccaagttctctagaaaatcttcaatctctaaaggttcttaacttttctgccaatgatctaactgggagcttaccacagtccctggcttcttgcacaagcctaatgtctttggatttcagtcagaattcaatgacaggtgatcttccttcatggattttcaactcgagtttacaagtggtttcgcttaccgggaaagaaatgagtggaagtatgaatactcctactttgttaacgacgactgcgcttcaatttctgcaagtcctggatttatcccacaattcattttccggtaagatagcatcaactattgggggtttgagcagcttgaaagcattgaacttgtccaataactctctcgttggtcctattcctgtgactgtcggggagttgaaattcttggacaaccttgatttgagtcaaaatcaactgaatggaaccattcctgtggaagttggtggactggtgtccctgaaggaacttaggctcgagaaaaacaagctttcaggaaaaattccaacttcaattgagaattgctcgtcgttaacaactttgtaggttcactttttctctatccttttttttcccgctaagttcgttgcttctccatttaggtggtttcctattaaaagtggttgattctctggttttccaaccatcgaaaagttggtagactctggttgcaattgcattacatattttctttactcggattagtatgaaaaaaatcattggatgaattattgtggatttgaaatgcctaataatgttgatatttgatagtatgaatgtttgggtttaaaattgatagttgataattttctgcccttttatgaatcgtatgctgtttagtgtttacccttttgaagaagtgtaaatatatatcttactgaattggcattgaaaatcacgagggcgtggaatcttaaatatccatcattgttacctgatataggcattttttaggtctttctaccgatttcagttctttttgaagaaaacatttaaatagaatcctaacattttctttatttctatattgtctctgttgaacattgtaggatcctatcacagaacatgctaagtggtccaatacctgctgcaatggctaaacttgtgaagcttcaaaatgtggatttgtcttctaacaaactcgctggaggcctaccaaaacagttggctaatctacccaatctcatgtccttcaatatttctcacaacaacctccagggtgaactgccagccggtggctttttcaacaccatatccccctactctgtgtccggcaacccatctctttgtggctctgcagtcaacaagtcttgtcctgctgtccttcctaaacccattgtccttaatcccaactcctcatcagattctgctcctggggagttacctacaactatggggcacaaaagaatcattctcagcatttctgctctcattgctattggtgcagctgctgtcatagttattggtgtgattgcaatcactgtacttaatcttcgtgtccgatcttactcatcacgatcagctgcagcgctcacattttctggaggggatgagttcagccattcccctactacagacaacaattctggcaagcttgtgatgttttcaggtgaccctgacttcagcacaggtgcgcatgctctgctcaacaaggattgcgaacttggccgaggtgggtttggagcagtatatagaacagttcttcgtgatggtcgccctgttgcaatcaagaagctcacagtttcaagtcttgtcaagtcccaaggagagtttgaaagggaagttaaaaaattgggcaaagttaggcaccaaaatcttgtagcacttgaaggctactattggacgccatccttgcagctcctcatatccgaatttgtctctggtggtagcttgtacaagcatctccatgaaggacctggtgggaacgtcctctcctggaatgagaggtttaacataattcttggtactgctaagagcttggctcacttgcaccaacttaacattattcactacaacataaaatctagcaacgttctgattgacagttcaggtgagcctaaagtaggagactttggcctagcgagattgttgccaatgcttgaccgctatgtcttgagcagcaagattcagagtgcacttggttacatggcgccagagtttgcttgcaaaacagtgaagataactgagaaatgtgatgtttatggatttggggttttgattttggaggtggttactggcaaaaggcctgtggagtacatggaagatgacgttgtagtgctttgtgacatggttagaggagcattagaagaaggcggagttgaggaatgtgttgatggaaggctgcaagggaatttccctgccgaagaggcaattcctgtgatgaaattgggtctgatatgcacctcacaagtgccctcaaatcgaccggacatgggggaggttgttaatatattggaactgatcagatgtccttcagaagaccaagaagagttgggatcatcaaattagagttttattatctttaaagattgattgaaagggatgtaacaatcggttatccggttatcaggcgaagaagaatccggttttcgtttttacatcaatagattagagaagaaacacttcacaaaattttcttatcctattcttcttgtgttcacttgtttatgttcattcatgttcaccgtgttgtataagttgtattactatctcagatagccggattccccttcaccaggtttctcattagattagatttgctactaatcttttgtattttatttatatctgtcttagttttatgcctttcttttttttgctaaactgattctactcctcataaagtttggatttatgtttcagtttcgtttactggagtctaccaaaaatgaatgtacttgtttttgtttttgttggttcatatacttcagacagatgtgatagtttacacgaggaagttgagcctttaacttgcattataaaattgttaaaaaaaaacaccccatttaatgcttgtcgtaccattctctcacatatctgccaaaattgaagaaagagtaagtaatgtacagtacttctctacgaagggcacaagttggtaaatgaccatttacccttcaaattcacggaccttgtcccatatgcccaagtaatgcgatgaccttcgcaaaattgctaatggtcaaatcatattcaaaatgtcaaaaagtgactcaagagccagtggagaccccaagaatctctgcacccacttttaaggaattaaatagtcttgagaaaattgagaaaattaaataataaaaagggtgaaaccccacaaggggaattgggcattagtgtggtggaaagaaatattaaagaatatatatatatatatatatatttacatataatgatagcatggcatcatgcaaatagaaaaatatagaatatgttgtcggaatagaagcaccagttgttaaatattttactaatttctttatgtttcgattttcacattgtttacttggggtgactatagtatagtgtggggtagcttgtatgagaaaaaaaatggttcttacaagaaaataattttttttttttgaatctttacctcagtagagtatagtaaaaagctaaagccgatagtgtaaaacataacatggccctagtgttttattgttccaatgaaatgaagactaactaaacacatttttataccttttccttttactcataccaattgcaacaattgcccaactctatctttcttttccttttcctttttttttttgttgatttatttcttatgaaatcgacatacaaaaatgtattgggcgggtaaaacttgctggctataatcatgaccaaaattagcattattctagatagttcagcaaactttgggatagtctcttctagatagtagatagtttagcacacactgtcccacatattctcccgttgatccttatcatcgattttgacacgtcttgtaattggttttcctttcactatttattatgtattgttaatttatatgtaaaaaagtaaacccacctaggaaagagggattcgaagaagaagaatgagaagaaaagaagattttcatggctatagtagccatgtgcgtagacaaggactacgattagttgtcttaattaggttgctcccaaggtaacccagttacattttataatacattttgtttggggcccaagaaaactaatagtaatttggcattatttttcacaaactagcacatgcctcctttcatttcataacaccctctttaaagttctttcctttgggcctaggaaaaggaatatcagagtcccttgatcactggattgacagaaggaagtacctactttgtcattgattgattgattgaatatatattacctaccattgttttttctagttgtctctatatttatttattaaagctttaaagtactataaacaaaatcaaaatcccagataagccatgtttgtaagaactaaagaaagagtttccatggtcatcctttttattatttatattatttttggtaatgagatttttctttttaaaaaataaagctttgattagcagtgattccaagggagcataccatatggcgtaggattagcgagtgggaagcgccatgcacattcttgcacctctaccaacaaattcctttccccactttttgatttggcaataattcttataaagtaaatgtatgtttgaaattttattccttttggataattataaagcgacatttgaagcttttttttttcttcctttattttttgtcatctttattccgaagaaaacgtggaaaagttgcaattatcagcgtggacaccaccattatgtttttaaagtggaactgagcccactcaaacaacgaatgtatttttagtaaagaaaaccttagtctcattctcataccaagtatgacagttgttttagtatagaaaagctttgtcttggttctgagctatccatctttttatgatatgtatatatatacaataattgtttaataaaatgcatcagttgtaatggtgtaatttgtatgtcattctctttgcctagaaagtagaaactcactcaaaatccagcataaatgtttggaaatacaaattttaattttaagaactccatatttccattgtaggaaagagaacacaaaatatatacacacaatacaaatacgaatacaaatgttgaaaattagtctctcgtggattttgaatgaaaatactaaatttccacacaccaaaactgttttctaatcctcaggtgttagcttgagctaaagaacacacgtatgaaaatgaataatgaaagttttcctatttctgtaagtataaccttcttgatttgctatgcttaactgggaattggacacaaaaagagagctttcatcctaatcatcccaattgttttcccatccatctgcatcggaagatctggaagtaagggcattggtcgacacaatttcattgcggtgagccataggagacttgactgttttgatttcatcccaatcatcgtcccaaccttgatcccaaggttcttctgtttccacatggccattgctcgaatgccccatctctagctcttgatatgggactccatcagtgtgccgtttctttcccccgaacaagcagcagcaggaccacatgcctccaataatcagtacagtaaagaaaagaaagtaggctccattgactggagttgcataatcattgtagttggagaaatgcttaaagaaaccataatcatgcttaaggaaaccattatcatgcttaagggaaccattatcacgcttaaggaaaccattatcaagagcaggtaattccaagtgaattatacatgctccatttccagcatttagttctactgatgaatttcctgtatctgagatactgacctgaaatcatgcataaaaatatcaatgatcaaagtccgaaataaaagttgccagacatcaagccaagtccttttacaaagaatgggattgaagtttaattaaaaaattaaaatgttaaaacccttccataaacacactgctctttcaatgttttacaactaaatatgaactaatttatttcacatgaaggtcatattgggcatagaacattacatcaatagggaccataagacgaacctctttaatgtgatgttcaggtatttgtatctttttcagagtattactggttgtaacatttacttccaaagggctccctccatcattttgaacacgaagaagtaactccatgttggctacaaaggaaaaggaacagcattattgagctgacaattcaaaaggtttaagaaacagtacaattatctatcaatcaggatgaattcccatggtttctctggcgctttacagagttatatttcccattccaatttacagagtgagacatacaaatagcaatataaaaggaactagtcctttttctgttaacaattgagaaataaactaggaggcattactgcaaatgtctgacatggcatgaaacagacgaatggtccacactaaatttcaattatagttttctattaaggcagtgaattttaaaatcagttttgcaaatttctatcatggtgaaaagaaaatgtaatcaaatcttgtgggtttgtgtttctatcctaccagcaaattatgattaaatatgcacatgcttactgtaagttggaacccaccataagctgaaagttttcaaataatcatggccttacttaattatagcaaaactccattatctatagtaactaagcaaaagattttccttttcaaaaagggcctaaaagagactaatagtagagccaggagactacaattttgcctattatagattacaaatcaccgaaaaaatagacatattcacaagataagttgagagactcaaaatctggaaacctggtgtcaaaagttccgaatgaaccaccatgaacaagtatacactactacattaatgaaaaattaagaattgcatttataaattcacagaaagagcaaacatgaacctaagtcccccgatcgctgggctttgggagtgttaaatagttcaaaatatcaagtacatttaacccaaatcacaaaagcctgaagtgattatcaaattatcaaagttctgtaattcttgctgcttaaagtagataatcatcgtatattaaccatatttttcagacacaaatacataagggcactgctgaagtcaaagtttgaaatgttagtccaaagcattagctgccataacttgtgttagtcgaggtaagtctgcttatgattgaaaaaagaaaaacatatgacgagttcctcacaaatcctttcaatcagtattcgggggttttttaactgcaaaattttgttcttcaaaaacataaagaaataattgttcaaagttctgtttagttgtttt

SEQ ID NO: 15410 - DNA, 4922 bp, Cannabis sativa
gcggtttgatgtacacccctacaaaaaatggtgctttatgtaattaaccctatttgttttttttttttttttataaatttgaggtgtcagctcaattttactgttaaatactaactggattattactgtattgacttcaaaattttacttttatgtatacacaagtgtacacagtggtaatctagttggtatttaacaataatatttaactaaatgcaaagaaaaataaacttaagggttttgtcaaaaaaaaaattaataatttagtataataaaaattaaaaacataagaggattttgccgctaattactctatattttttcactttctaaattaacattttataaaatttaatttagtaaattaagttaaagttaaatctgtagcatctagtgctgtaaattcatgcgtgtcgtgttagcccgaattatattttttcgtgcttttcaaaatatgggttgagttgtgctctaaaagaatatgggtcgtgccgtcctgtgccactattttcaaaaagtaggctcgacacggcccgtaggcctagtatttttgtgttgtgtttagattcgtgtcgtgccaacttatttttcttaaacatgccagccagttttcatatttgggcttgaattcgtgctttacttttttatattttcttacaattaataaattaattactaaactataagtatattttatagtttcaattatatttatgtaattttttaacaatattttatagatagttatataaaaaattaattaaaattattaaaatttaaatatttacttataaaatctcaaatttttatattacactctataaataaattaatatataatttttattttatattttataataattttaattatagaattataatattcaattttatatttaagtttaattattattttaactcatttataattgataaatacatacattattataattataattatcaaattataggattttttaatatttcgtgtcgtgttttacagatttatcgcgtgtcgtgccttttgatctgatctattcgtgcttatgtgtcgtgtttttcgttcttctagtctcgcgtgtgattaatcaaatatttttcatgttgtgtcgtgtcaatttataacattgtgtcatcctgtcatgtcgtgttcaaatttatattttttcgtacctgatcatgcttgtacaaatttcttgcctataaaaaaacctgacctatttacaacactagcatctagtaattttgtcatattcctcctttggtttgcatatcctaaataactaggtattgcaaggtatgatatgaaaattatcattattcattttcaaaaaaaaaaaaaattatcattattattaataaaataaaaatgagaagtcatcattctatgatgatggagactatatcactcacccatttccaatcatccaaatcatggaaattgcagagaaaaatggaaaatataagttactctaaataagatattttttctaaaatatatgatgatggagggcattttcggaaataaataatcaagcatattctctccctggcaatttggcaagcatattctctctctgtgacagaaaacaaagtatgaaaagttaagatcacatcccaagtcccaacccttattatcgtttttaaaaacaccacctttttcttttcctcttaattaaataaaagaaaatgttcaagttgtaaagactaaagtgtacattaattaataaataaatataatttctttttcataatttaaataagtaagtttttggtatcttttctattaatcatatagggtgtttttacgatgcacattttaaaagagatgtaccgatatatattttatttattttgaaacacgcttgcaacacactatttgaactatatttttaacatcttaaatgtttcttaattttttaaaattttgcaggatattttaaataactataacgtagatgactataagaaaaggattgaataaaaaattatttcgaatatccaaacagataagactgtatcggtgcatcatttttaaggggtatattgtagaattaattttccaatcatatatgtatcataattaagaaaaataatttgtaatataaatatttaagtttatttttaataataataatatttaaaattttagaatttttgtgttaagtgtaaacaaatatactaataaaaaagtgatacacgaacaataattttatatttaatgattatttatttatagaatttttaaaaatataatttaagaattgttattgtaaaaaattaaatttaaatatttatttgtaattaagagtttaatttgtagcaaaaattattgaaacaaatattataattttttctacacttgcagggatatttttcatttggctgcttctacactcacgacaagtgagcatcaattttttttatgtttgctctggaagatttggtattgcaggaatgaatttcttcatcacaagcgggcattgataccagccagtattgtccaagcaactacagattttctggaccaatatcagcaaaacattagctaccacaacacctcggggaccatccattcttgtgcaacctctgacagttgggctactccttcagcatttcaactaaagctttctgtggatgctgcccagaatgtaacaactaacaagacaggttttggtatggtgctctacaacaacaactaggatgtacttttgactatagcaacaccgtggcaagaaacccaaccggccttattaatggaagctcatgctctccactatgctctttcatggtgccaaaaacacaacataaaatcagattaaattgtttctgattgtaaaacccttgtgaattatatttgttatgatgctagtcatcatatacttttgaacaaatttgctaaagacattaaaagcttgctgtcttttctttttaatgctacttttagacatatttctagatgggataataaaaatactcatcgtcttacaaagtatgcattaggcttagatcatcaaattttttgaaaagatcaaaattttatatgtaatttatatcctgaactttaatttgtctgcaatggatacaggttttctaaaaaaaaaaaaaaaattataatttataccacttattattggagtagccaaaaaaatattagacattgaaataccaagttgagatatcctcttcattattcactgacaaaaacaattattacaacttttttactgtatgaaaatcagagcaaggttaaatctgtaatttcactacaaactgtgaaaaaaagaagatgataggaatgggaagacgagaaagctgtaaaattaattatgccctaattacagtaaggtcagaaagggatgcgtacttcccaagcagattcgttttgtgatattctctaaatttaatttaattaaatataaatcacataaaattatttaaaaatattactaactatttgtggtatcacttaaaaagtattagacgcaatcactactatgctgtagtttttctaaaattacatattattaaattttatttttaagattataaattatatgaatttttttttaaaaaataaataaattttttatttgccaaactttgacacttatataattttactttctacattatttgtttatttattttaaaaagaaataattttaaatctgtcccattaaagtacgatgacctatttaattaactcaaactagctaaaatgactttaaacattcaatcattactctaaaattacaaatatatcatctcaatttttattgttagaatattctatatctatgcaattactttttacatagactctcaaattacaataaaatagtcatagattggtcttattacaaaatataattcaaatggtaacaataatataagtgccaaaatttaggagaggaaaaattttatttattctttttgaaaatttacgagtgcatataggtaatttttacataaaaaattaccaaaataattattttaagagaagtgctaccatcagtattctattacaattttctagtcaacttctgttttccgaaaaacacatgttagattttttttatgatggtgttcattatagttacaacatcatctatataaatgtttgaaaaatttcgaatagtttacggtgtttaaaataagtttgaagttttttaaacacacgtggtaaattagaatatcaagaattctatttttgatactataaactatttgatttttttttaaaaaactagagaaataatataacaaataatattctgacatgtaatttcgagcacaaaagttaactaaaaaggtataatagaaagttataagtatcactatcttactataaaattaccctatagtttattattttaaaggtaaatactattttagatcttatattttgcaaaagttatcgatcagatcctctattttgttaaatgataatcatttagattctgtatatttcaaaataatacaaaatagaccctaaactcaattttgtcaattttttttaaatataacaaacctgaaatcaatctctaccacagatagatgtaaaaaatataatcatttttgttataacatctctatgtcaagtccctattaagttttaatttaaaaaaaaattgagctcaagtctattttgttccattttgaaaacacaatatcaaaattattatttaacaaaatagaggatccaataaataattttacataaaaaaataagatccaaaataatatgtattattattttaaggagaattattccatatactatttttaaacttttttttttcaaatttatgatttgagtttttacggtagcttctatgtgggttactatatgaattttagttgcgatttaagttgcccctatgtgtatttctataaaattacaaaaaaaaaaa

SEQ ID NO: 15411 - DNA, 6218 bp, Cannabis sativa
aatccgcacaagtgcggatatccgtactttgcggattggattggatcgtgcgaattggattggatcgactattttatgaacacccctactcattatcaccatcacaactatcatctccaccaagactaactgccataagtagtggtggagcaaggtaaccaccagaggtttcaaaccccttgatcaagtgtgtaatgtcatgaggatcaacaagctttcatttcgagccatcccaaccttaacaccagcccccttagggtgatcttgtccagcccatggccttaaacacagactcatcgctttgcattcctaaatctagggataggtttggtttctgaaagtcccaagagatgaccactggttttctagctaagtagggatggcacctcctcaatggtaggaattctctttgttgttttatgagagataaacccttccaccgttatgcaaaagattatgactcttaattttggaagaatgtaatcaaatgcaaaaacactctactgaaagttgcttgtgttaagtcactaaaattaactaagtggtgagggagggatgggaaaaagggagagatcatgggttcgaattcaaaatttttaagctattaagttactatttaattgtaaaataccattacgttacactaaaaaaaagctgcttatgttgagaattgtgcccttaaatctaattatagttgactaatgctttaaatgaaataaataattaaattgaattaatagatatatgtaaacaatgttggatattatgtgattgatattaaatgaatatcagaatattcctaagttcatcaatgttgtctcattcttatataattgtgagaggattgtgattgagataatgaacttaaatagttagtagtaaaataaagttatgaaatattaagattaattactactagtatagtccactagtattatgaatacaggggacctaaattcgaattattagtgtagtaaaacactttaattgatgtattacatatatattagagaatatataaaattagaccagatgtgttttattaatacttgtttaaaatactatttcatagtattaatcgaacacatcaactgatgattatatatacattagtctcaattattatgaacccctatatatgtcatatgatcttttgtttcatgcgctaaggttttgataaggccaaaagtactttagagattcaatgatgtatatagttgtggacataacttaatatatatagaatctataccttcttatagattgaataggggtccctattgtgttgacttttagaattaaaaagttacgagccctaagtcaaaaattagttgtgacacaatcttcactagtaaagtcaatgttactcaaggaagaagatataattaaaatggtaaaatggtaatttcattaagaatgattatgaaccattaatagaggactaacaatgtatgtaatgattatattaatggatactttattttttaataaagtactttataaatatatgcatatatttattgagagttcaatctcatatttatagtgaaataatcatgataataacaaatatataattattgaatcgaagagttttgagtagtaataatacaatatttattggagcttgaaattataggtctataagtccccaaagtggctctatcaacaccatatcaaggtaagagttgatacttgattattatataatttgataattatagaagaaagagcattgctattaggtacattaaggtgctcaacgccatactgatgtgtcgcacagtaattagttagtggttccccatattatttattaaattaaattatgtgggacttgatattaaaatataccaataacggtatgctacctcttgtggtaattgacaccttaaggtgccccttagcatttttctagaaaaaattattctttatgtcaaatatacaattatatgataattggggttgaataattattaattatggaaaatatatttatttttataaatataaaatttttaaaattatggtgaaaaattaaaaggattaattttagaattaattattttataagtgaataaaaataaataaagtgaaacaaagtttgatttatttatttaataatgagaaatacaaatatgatcatttgtttgaatttgatttaaattttgaaatatggttgttatatttttcttaaaaatacgataaattgtattttatggttgatctaattaaataaaaaaaaataaggaaaaaaaactcaacagtacacacacggcacactctaaggattgtgcatgtcgtgcgtgtaattagtatatatggactagtgttggttttgtggtaataaatcaggtgtgcagccaaagcctttaatatgattatcattgtaccacacctctccacatgtatatatataaaatcataaaataaaataataaaaataaataatttacctcttgatgagctatgaaaattccttgctatctttttgtaagttgtccaaggaacggtactgacacagatcaaccaaaacacacaagaatcagtgtggactgataggatacacaaaataaagttcttggtttaatatcaacacacgagtaagagcactttaactggagagaaaaataaattatacgattaactttttttaggtttctaaatatattgtatatatatacttgttatatgtgttttcggatggttgacacatgtgcatctagtgttctgaattaacttatatgcctgttcacaaagcctagaaagatcaacgacccagcctaagaacggagctggacgaggggtctagatccactcacctcagttataggcaaagtcaaaccgatgaactcggatggttaacgctactaaatttgctaagtatttgaaacgtcataaacggatgccccatgcgtatcccagatttgtagtcaagggtgtcacggagatcgaccctctgggttcaatccgacgtggcatacctctaacaatagatcccatagaatcaggggtttgttccctgtgtcggacatgggaaagacgcacaacataaaaagcaagctaccttttttcttacaccaccaccctaacagttactgtacacgacaggcgacacatgaccatatgtcaacatcacgttgtacgaacctgtacggacgaaggttaccccttaattgagcctcacctactcggcccaaagtcaatattatattgtattttaccccatcagtgggtttatttcatttttacaaaacctaacgggtctgagttttcccataaacctaacttcaacctataaataaagcctcaacctttcatgcaaaaggttacgatgttttgctggacactctgtagaaatttgccaagaacaatcttgttcaaaatactccatagtcgaagagttcaataatattgactcgtggactaaggcacattaacacagccacgtaaaaatctatgttttcttcatctttaatcaattttctttaagctcaatctcttattaatttagtttctaaaaatctcggtaaatatttttgtacttttattgagagcttgaattaagtcttcaccattgttgtcttctacagccatggttgcaactagaaatgcgaatgaaaaagccattcgcttgcaaggacaatgaaaatgctgcaaccaatgatttgaactggccctctctaccgaatgttcaagtagacgttgtaggggacggtgaaacgtctgaagtagctagccgtccacctcaaaaaggttagcaacaagagaaatacgttgatgaaaatctcattgacaaagaagactaagaaggcaaagatgaggaccaaagggatgactgcagaaaaaacaatgacaaagattacaagtaatactacgaggaggacctgaaggtggtgacattaaggtaaatagtcttagaccagcaaaggaaagtggtagagcaagaagaagctatacaagaaaccctcttacagctgcagaacatgttatcaaaaggaaacctcaacgctagaaacccactagtggaaaagtttaaccatctcagggttggaccctctaatctaaaaaatgacaaggggaaggccaaaatggttgagcctcaaaagaagaactatccaccaagaccgtgcaagacgctcctagggacaacagaaatacaactgatccactcttgcaaaaagaaagggtcatccatgccatagggctaaactgtctgattgatccacggagtaaagtggagcaggacaataggcaccatgctcaggcaccaaagcctaacattcaggaaataaaaaaccaccccagtatttttgttaaccagagcatcaaagtggaaaacttaaatcccaaagaaagcatgtcaaaaatggaccttaaggaccatttgaatgcataataggaaaaagcaagatgtgaaaaagtccggcctcatggaggagacctcatgaacatcataaatgaccaaatttgaggaattgacgtctcaggtaacaacaccagaaggttggaggatcaaattacagccttaaccaagatcacagaccgtctggtctgtaaacaaagtggtgttgtgtctgactttgaaccttgcaataggaagataacccagtcccccttatgtgtttggtgtgatagagaggttgaatcagttcctcatgccttgttcttttgtaaaagagttagaagagtttggaaaggtacaattttctatccttacttatttctttcaactgctgtttcttttcatgaaattgtctttaatattttttctaacttgaacaaagaagaagtgaagttttttctttgtatatcttggtttatttaacataataggaacaaggagattaagcatcaagaccatggatcaacctcatgtcatcctcaacctcgctgaaaactacttggctgattataaagcaacaactgcttttcatattacaccttctccagaagctaagtctgttgccaccgtcacttgaatacctccccacatggccttctcaaactcaatatagatgtgacttcctcaaacaaccacattaaagctaatcttggtggagtaattcgcaatagtattagaggtgttgtggctgcgatagcttctcctcatacaggaggatgagatgctgcaatcctcaaagtaaagtccattctcaaatctcttcactggtgcattgaagagtgctttcctcttcatcagatagaaactgattgtaaagctatcacagacgctttagctgctatcaaagaagacctctctctatttggagatcttatcaagcaaattaaatcagctttatctcattttcctaatgtctcgatcactcgtgttaagcgctttgctaagtgcccacaagcttgctaatttagtattggggttagacgaagctacaatttggatcgaagatagcatccttcctcttgaaaaaacaaatgtttatataaaagcccaaaactaaaaaattaccatggccaaatttaaaattgccatataaactttttaaaatccatattgagtgtgtgtatatgaccacaccactaagatctcccctatatttaagtatatcgttctaaggataacaagatctccctaataaatgtgcctctttacaatcttaatctattacatttattctgacaaaaaagaacacaaaaaaaaaacaggtcactttttctttgttcaaaaaaatggagtttgagtttgatgatcaaaccctcttccattatagtcttatcactctctacctcgtcggaccacccaccttcatctccctccacttcctccaagctccctacggaaagcaccgccgtcccggatggggtcccaccataccggctccacttgcctggttcctcatggaaagtcccactctctggctcacctttctcctcttacccttcggaatcaacacctccaatcccaaatccatcttcctcatctcattcttcctcctccactacttcaaccgaaccgtattattccctctccgcctccttcgccagaaaaccgccggcgattttcccctcacgatagccgccacggctttcggattcaacctcttgaacggttacttgcaggctagatcggtgtctcattacagcgattacgacggagatgagtggttctggtggagattcgtggtcggagctgtggttttcttggccggaatggcgattaatgtcgggtcggatcgggttttggtccgattaaagga

SEQ ID NO: 15412 - DNA, 1880 bp, Cannabis sativa
taggagggttttttcgtcttctgcggtatgcaatgtcttagaacgagcgggctttcatattgcctaggttgtaacacatatgataccatgtatcctctattcttattgttattgccatttttcttttcctataggatttgattcggaatcatatatttttatgaaagcttacacaagcttgtaaaatatttgttgaaaatggttttgcaaaattataaacatattggagattgacttgcttagtcgttgtggctggatatgattagtggttggatttcaactctccaaccgaaagtaaaatgaagcgatttttgtttaaccactatttgtttcttcatttttgtagaaggtgagaacattccaagaacttcaagatatgaccatgcaagaacgagccgacctgcttactcaaatcgctggtttctcatcagcagaagtacaagatgttgagatggttttagaaatgatgccttctgtaacagtcgaagtgaactgcgagactgaaggtgaagatggtattcaagaaggcgacattgtcacaatccaatcttggatatcacaaaaacgtgctaatggccttatcggtgcccttccacatgcaccctacttcccatttcacaaggaagaaaacttctggtttttgctggccgacactgtctccaatagcgtatggttttctcaaaaggttagtttcatggatgaagctgcagctatagctggtgcttctaaggccatcgaggagacaaaggagggttcgggagcaaatgttaaggagactggtgctgcagttagagaagcagttgagaaagtgaaaagcgggtcgagattggtaatgggcaagttccaggcaccagctgaaggaaactataacttgacttgttattgcttgtgcgattcttggatcggttgtgacacaaagacagccttgaaggtaaaggttttgaagcgcactcgagctggtactaggggtagtattgtaaccgaagagggaccatttacagaggatggaattgaagaggaagaagaaaatgaagaggaagaatacgatgatgactacgagagcgagtacagtgaagatgaggccgacgagcaacaaaaagatacgaagaagaacaaaggccccgctgccaatggaacttcccaaaaacaaggatcgagctcagaaagttcaggctcagacgaggagtgatgaacacaaacaatcagaaacctcttattcgggtgaaaaagaaacaaaaataggaaaccacaacacaagaaagaatatttcataggattttctcattttcctagtcaaggtactgaaaaaaaaaagtttatttttggaaatgattctactttaagccaattagaaaattgtttgatagttagattgaattttccttaattcaatttgaagggtgagaatttggattataataaacaaatttaacattgctaatagtgtcatatgtgttatgggacagactaaaccattatcacacaattcacaatatcaaatcaaaaaaggtttttacctaaaaattatgtcaagattattagaggggaaataggtcaatttactaaactagcctctttgttatatatgtgctttgcttttcagggacaaactcaaatatatcaccaacatcttattatattcttagtgtttttaaaagaaaaaaactatatttttatatatatttgttcaactttaatgccatccttttccaatgatgaaaattttgttaaaattaaagaaaaatttaatacatatatatatatatgttcaacttttataaaagtatatagtgtaatttgttaatacttaagttataattttgaaacttctgtatgtacttagatgtaaattgttaaataaattgagacgtgacaattat

SEQ ID NO: 15413 - DNA, 4152 bp, Cannabis sativa
atctccctatcttttcattttgtgttctaagattctttctcgtttgattttagagaaagagcggcagggcctggttgaaggttataaagtctcgagaaattgccccatggtgtctcatttgaagtatgcatatgatactatgttctttgtcaaagctaatatgtagaatgtggaaaatctttgggaggctctttagaagtattgtcattggtctggccaacaaatcaatggctccaaattaaacaaaattatttctaagaactattaggtggaacatggtgcgactctggccaagtacctgggttttgattttatggatggtaaagaactcttcttcggtaatcctctgtttgtgaaagggaatcgttgtaatgatttcaatttcataattgacaaagtgagaaatagaatggaaggatggagagccaagttactgtcgcaggctgccaaaacaaccttaattaaaagtatgttatcctgaatttcgtcgtataatatggttgtgttcttgatcatagggaagattactaatacattggatgctttggtgagacatttttagtggacgggtaatttggatggaggcagattcttagctcttgtgaattggggtaccatttgcaaacctaaaaactgtggaggtcttggaatatgcagcttccgtgatattaatatttgtcttcttgctaaaatggggtggttgatggcgaagaataaggatgtgctttgggttcatgttttgaacaaaaaacactgatgtgattcaagttcttagagtagcaatctcccttgtcacgcgtctcaggtggcaagggggattcagaaaactaaacaatttattattgacaattgcttatggttgatggggagagactctactattcaagtgtggcatatcgattgatcatgtggtgatggaatctatatggatgtaggtgccctaaacccttgtgtggtctctaatttatcaactggtgatcttttgtctgacaatggaaaatagtggaattatgttgaaattaatcgagtttttaggccaaatacgactcttgctgttatgaactgcagggtcaatgaattcaatgatgatgataggctagtttggagaactagtcccaatggggagtttccatcaaggctccctttaagaatatgcataaggatgcattggttttggatgatgaagcaggctctaagctttggaagttgagttttcaagaccgtttgaaactttttctatggaaatcttactgggattgcctcccatttggattgagaactagctgtatttttgggaatcccatgggcacctattttctgtgtggggaggctaatggtgactccaattctcacttttttttcgctctgtcctatatctatagggttgtggctagatagcaaatggagaattcaaattgacgagttatctctgagtttggagaaagatgttgtgagttggatcctaaacccattctcctatcttgattcgaaccagctgactgatagggaggagttctctctctatgccactgtcctctatcacaatctatggttctttaggaatgcaaattttcataacaatgtcaagtggaggttttttgacatgaagaagaagattgtggatgacttccacaaccattggaaggtgccagtgagcttgagaagtgaggcttctgctacatatcgacttgcagttcgttggaggcagcctagacctgggagaattcgtgttaatgtggactttgctactacagaaggtgttggagctattggggttgtggcttggtatgagtttggtggcatcaaggctctttttgtgaccgaaattctcatggtttcggttactcatggtgaactggaggcaattagcaaaggagtcaaagttctctgcagattgggaatatgggaagcttaaattttgtccgactgccaagtcgttattgatgctctgatttttgcggtgacacctcattagactgtagcctttttttttctctaagatcttgaccttgttgtctaaattgtcgactgagttattttagattcctagaactaagaattactctgctcatgttttggctaaatggagattagttaatccttgtaagggttttctcagtttttgggaggtgaggccccaagtgctcaccaggattttatcgcattttgaataaagcagtttggtttctaagcaaaaaaataagaatcttgccattggtcaaaaatccaacaaatattttccaaaagcgattcacgatgtcgacggataagacccaaacaagagtgaaactattttctttggttggtcaacctttgaaatcataaagagaccaaccttcttttgggctgtaaacttccatggtggtgacgatcttccaatgagcatactccttggtggaataggtgactacgtcatgaatgcctgacttagtgatacaacttttgaaggtttcaaatactattggaaagaacataatcttaaatataaactttgagtttggataattaaaaaagatgaaaactaaaaaaatactatagcactatgtaaaaaagttacttttaagttataaaaaatataatcttactatgttatttataaaaattacattataagtaacacgaaattacttataaacttacttaattttattaaaaaatattatgcttcattttatgattttaataaaataatttctgcacaatgcccaacccctacaagctacatttttttacctataagaaataactatttttagcacaaaaaattatttttattgattaatattaaaaattttgatttagtatacttaaatgtaaaatatactgtattaatatacagcccaattagaaatagtatagctatacttttaatatatttttctcctaaaaatacctttatattttgaaaaaaacttctctctctaactctctcacttttcggcattgaaccccaacccaaaacaccagtcgtcgaacacagacttagaactccagttgcaaggcctcactatcgtcttctctcacggcctctcttgttttttgcatttttttcttctagttttctagttttttgtaatatttagcgatgtatttgcaatgatagaccagcttatgatgataagcgatattttgtgtatttagcgatgtttagagatgtatttgtgatatgagaccaaaaaatacacatcacatcgctaaatatcgctaatcatcctgaagacttgagtgtaattttgcgatatttagcgatgttgtaaattagagacagttagcgatattttacgatgtagcaatatttagttatgtttcgtggcatcattaaatacaaaaaaatgtggaaaatgagccagttgagaactctagtgatgggtaacgatttcgggggtttcagtgttgttgagcacatggattttagggctttggagtggagaaaacaagacttagttagagtgagagagttagacagagagattttcttgaaatgtaagagtatttttgagaagaaaagatattaaatgtataagtatcgcatttgtagatgaacagtatattaaaagatcatattttatattggagatattggcagccaaatcacttaattttttttctttttaacacttaacagcataaaccaaaatttcaacggcaaaacctattgaacccctattctgttttgctctttatcacttccatccaaaaatctcagttaagtgccacagtggattacccacatgtccacaagcgtaaacatgacaaattttcattagtccacataatattaattattaaaatattaaaatatttttcttttcttttttatattcttctgaaatgccctaaaactaaaaactttaaccctaattccaactctttttttcatctctcaaatactcaggcaccatatcaaccttaatcaaccaccacatagatctgccatggatgatgaaccaagccaatttcagctgccataccaccactaggttgcactactctgagcactgcccactcgtcgtcacaagatacaatcaccacaaccaccggacctacgattgcaaatcactctgtcgactagtttggtctaagtcgtgagagagagagagagagagagagagagaaacgagatggagcaagagagatcggggagagaagaga

SEQ ID NO: 15414 - DNA, 3727 bp, Cannabis sativa
  modified_base (2548)..(2549): a, c, t, g, unknown or other
  modified_base (2588)..(2607): a, c, t, g, unknown or other
aagctgaatttgctaagtgttggcgttctgtgcggattgctcactgctcggcttagaggacttcgtccgagcgaatgtgtgaggtgtcctgttcggttcgtgccttgcgagcaaatactcggagtcgattccacgtgtcaccatcgagtgatgccacgttagagtgcaaaaattgggataacatttatatataatgcgatttaaatttgataaatgttaaaaattgtgccacatttagaataaattatagcatcagttaaaattttacactacaatcgaggcagcccttataaaatcaccatacttccacttatggcctctcgcaactgttttcgacaataaaacactcactaaaagggtgtccaataattccacaacaaaatcaaatatcctgcaatctttcatatttgagaggaaatttagatttctcctatcctttgatcaaagtagccttcatgagtttaagaaggggcttggagatattgatgccgacaagaacccataaaaccttccgaggcaatgcttggaagaattctcatcaactttggtcaccagtccaagaaagtcgccaagttctctacccatatgaattgacattcacgaaatcaaaactaactgaatctggacccaaaatttcactctacaaaatgccaaagaactataatcaccaacaccagtaggaatttcgagtgccaaaagttgatgttctaaaagccatggaccgccaccaaaaactttacatttatcaataagatctgaaaatcaaaataaaaacatattgttaccaactgccttgacagttacggtaccattaatcttttaaaaaaattcaatacttgtgttatatgctccctgaaaactaccttggatgaaatcaatttttccactagagtttttgcaatactatctttgccgacatcaacaaaagttacctcaagatctccctcaataacatccttataactatcatcgtagacaaatgaattgttcaaagccgcacatttaacaagatccatgataaataaaacaagcaattccaatagctaaatttttgcacccagaattttgaaaaaaagaacacaaattaaagccttggtgagaaaatgaaatcttttgattgaatgatatattttacaataattatatattaatcttatattagtatataacatgtaacatgtcacattttattttattttaatattatattattctaaataatataacacttgaaaaaagaaatgtactaaattttttttggtactaaaatagataagagatttactataaactatatttaaggattatatttacatattttttaaacgttttttaaattgttattccccggttaacaaaaattttagggacgccaccaatgctaaaattatggggcaattatgtgtctcgcaaaatagttttgtgcttattcttacattgtgcctttttctcacggagttgttaactctctttgtgaaggaatgtcgtcatacaaggcttgtgaagattggtagaatcttttgtgtgtgtgattttgttttatttatatatgtacatcgtggataattttttcagaaaatgtaattgtaatataaaagtttgatttcaaattagctaaattaaaatttgatactgcatttaaacaaattaagaaaaaaaaaatggacattttcaattttcaactaacgtatgagctaaggaaagaacagaactgggcgagttatatagaggagtcggtgagacgaaataggcatggtggtggtcgtggtggtgtcagtaaaaagaaaaggccgggttttaaagagccgtgaccgtttgtcagttataataaaatcgtaacactacgtgtcgttttctgatgacacaactaaaaataagctaaaaattaaattaaattcagtataattatttctttgtaaaataaattaataatttgtttcttgtcgtttatgtttaattacttcactttccttttttttttcctccagtttttgcttcgatcgactccctaaactttaccacgtcatccttacatatacacacatatcactcatttcatactttaaaaaaaattctaaaaataaagaacgccatttcatagatttcatcgagatttcaaaaagaaaatgaaaatatttaatttaatatttttgtaaaggaaatgttaaaaagtattactattctaagtgtcaatatcgctattggttcaattaaatatcgagttctatagttacaagtaataattttttagagagtatcactagctaatggtgttcatcaaaccgctcaaaccgcctgcaccacactgcaccgtaaaaaaaatgtaatttgaaaatttttagggtgcgatcgcagattgaatttttttcaaaccacgcaatgcggtacaatttacggttttgaattgttaatatgcaattcaaaccgcaccttactgtaaataataaaaacactaatttttatatatatttaggtccaatatgtgaatgttcaatccaaagtctactaattattttattgttgaaacttaatttttttttcatatttnntttcaagtcttatggtatttttgataagtgttgctcaannnnnnnnnnnnnnnnnnnngtttaattatttggtgatagtctaaaccgtagaaacctcaaaactgcactgtgctgcactattttttgcggtgcgggttttgcagtttttcaattttgcggtgtgagtgcagtttgggaaattaaaaaaactgtatgtgcatgttagtttaagaaaaggtcaaaaaccgcaccacgcaccacaaacacccttattgctaaccaatcactatacgacatgtcttgaaactcgttggcaccactttaataaaagttgctttatcaattatttttttcagcaatttaatataactcatttgttgtcggttcgtttgggttcagaattgtatttggtaaaatatgggtcaataacccaaatttcatttcattactttattatagaatttcaacaacattaaaccagtaatactcttaaataattttgtcaaaactataaaaaaaaaaagagagggaaaatttgtagcacagcgaaaaaaagaaatataaaagaaagtaaaagtggcgaaaaaaaaaatacaaaaacgattctctaagagaagaaaaaaaacataattccaatcagacatatttctttgtttttttttagacaattaatcagacatattgtctatttgtgaagaaaaaaaagagagagaagaagagagagagagagagaggtatttgtgaagtatttcagaagctcactgttttgctgattttgaggcatgaaatagagagagagaaaggaaggtagagagaggagtgcttcacaagtttagtgttacacacacacattcatatcatataatataataatactacttgttttttctctttctttcagtttttaggccagagagaagaacatataattttaccatacttggctcatttcatcctataaggctataacgtcatctttctgaagtttccagagttgagaaacaaagaaagaaagaaagaaacccaggtttccatttccttcttcttcttcgctcacattacctctcttttatcgctttagcattttaagctgcattctcgaggcttctctttaacctttgttttctttattatttctgggttttcattttcttttgcagttcaactttaccttggaagtttattattattattattat

SEQ ID NO: 15415 - DNA, 7175 bp, Cannabis sativa
ttgagactgaatatgagcttaaaacaggtgctgatggttcgattggagtccgacctagcacaagcactgcttgcagcatgtagaggagagttaagcgatgtatcactaagatggtctcccggatcagccatggttgtggtaatggcgagcaaagggtaccccggttcataccaaaagggaactgttataaaaaacctcgatgaagctgagcatgttgctccatctgtcaaggtgtttcatgctggaactgccttagactcagacggaaatttcatcggtgtaggagggcgtgttcttggtgtcactgctcaaggaagagatctagaagaggcaagggacttagcataccaagctgttgaacagattaattggccgggcgggttttataggcgagatatcggttggagagctctgcctcagaaacaatttgtatcaaaaaactaaacttgttcaataaatttaatggaaaaaaaaaataataataattatgagaataggtgtttttttatttctaatgtatgaactttgagaaaagagacttgatttatggcttaatttcttcttcttcttaacctaacaaagaagatgatttagttgagtttcattaatttacaatggtcttaacatttgtgtttgattgttttgttttatttttggatacaaaagaaatttatatatctatacgacttgtcgttttcacataacaattctcattgtagcatatgactatgagctctttaactttcaaaagagacattttttattgctcataatgagtggttctatgggcaaaccaccaaattgatcatctttattgttattgttaaaggcacttttagaaagcaaagaaggaattagaattggatgtaatgaagatagttatatagttttgcttgtttatttgaccacgtaattacattggtgattatgtattgagagatttcaattaagggtgtttataaaactgctcacatggcataaactgctattgcactgtatagaaaatacagataaaaattatttgtggtacggttgtggtttgtatttttttaaactgcgtagtggaattaacgattttgaatttaataattacgtttcaaattgtattgcactatacattataaagttatcaatttttacattatgattttgtttttttttcatataaaaacaaatataagacaattcaaaataatgacttaatgaatagtatatatattatgatgttaaaactttaataagattttttttttgtattgttaaaactttattagattgtttttttttttattatagtatttgataatgatgatagtgtaaaccgcttaaattgtactgcaccacactgtattttcgtggtgtgatttttgtagttttaagatcttacggtacggttacagtttgagaaattataaaaatcgtatatgtggtttggtttttaaaaaaaaaaattataactcacactacccgtaccgtgaacatttttagtctcaattacactcattctcaaacaagacataatatccacattatatcaaaacacggcttgtattttaaaatagtgtaattactatgttgtaattatattacactacactacttaccataaaaataaatattttagttgcttattattattattcaaaatataataataaaaattatgaataatttttttttaaaattataatttataaaattataacttgtaattatgaataaaaaataaaaaaatataaatttcataatttttaaaattatgaataaatggttaaaatttaacaaagtacaaaattctttattgcattcattgcttttttaatagttggttcttttaatattatatcaaaatagcatatgaagttgaaaaaggtcatattatataaatagatgctcccatgataagaacacgaaactattttatgaaattattcgatttcctattctttttattaaattattattttccttaattgtactttaaagattagatgaataaattataagtatcaattattattctaattctctagtaccatattagtagtgatattgtgtgcctagcttcaataccaaataaatatgtttgtatcattcggcctttccatcaatacaactacttcttctactcttggcacctggttcgaaggtttgcagcaaacgggtgacatggatcatgtttgtcgagcttctatgctatgttgggccatatagaaatctcgcaacaatacagtttggaacaaaaggaattctactgtacgtgatgttttagcctctacttctattactcttgatcactggcgaaaagctcaggataatcttgctctatcatttctatctctcaataatagtgatgatggagccgagctttggactaaacctgctgaaaactacatcaagattaacatagatgttgcgctttttcatcatgaaaattcctatggttttggaattgtagcgagagacgatttgggaaagcttattgaagctaaaacttgttacaaagccagtacccattctgctgaggttgtggaagctctggggatcaaggaagctcttagttggattaagagcaaaaattggcaaaaagttgagatagagaccgatagtcttcttgctgttcaggctatccgaagtgatcataacatgtcctctactttcggtttaatcaccaaagactgtcttgagttattgttgtctctaattgatgttaagttacgttttattaaacgatcagcaaatcgggttgctcatgctgttgctaggcatgctcgattttcctctggttgtagcatttttgagtataatgtctggcctgacttgaaggctctcttgtattcagaatgcttttaattcaattaaattgatatttcattttcaaaataaataaataaataaatatgtttgtaaaaaagtcttcttatatcttcatatcatatattttaattaggggtgcacactaaatggagaattggcgccgttaagaattttaattttcatccccatttgttctacatcgagaatagagcgaagaatcccctaatggagacgaggacgggacaaaaaattcctgataaaaaaaataaaatttataataatttttttaaaaaaaaatatattgcacattaattattattcaataaactaattattattaaaaatgcaatttaaaattcataaaaaatattaatatactaaaaaataaaacataaattataaattataatattaatagaaatataaaataaaatattaaacaggtccagggacaggaagtgtcatctacgttcatgccccgtttaacattcgggaataaaaaataatttttattcctcacttgttccccatttagaagaaaaattctcgtcccgaatccgcgcgagaccttttcctattagagaaatatacatccctaatcttaataatatctatgtttatataaatatcgttgttggacacaaaaaaaaatctgaaatcttcatatctatgcataaaaaggtactattgttaaagtatcaaatatatgattctagaaaagaaaagaaaaaatgtgagctttcttgtctttttcttcatttaataaaatgtcctatatgtataaatctttcatagattgtccaccaaaaaaatctatttaaatatctcaaatatactatctcttataaattaaatatctcattttcttctcttttatccttttcattttttttcccacatataatggaacataattgtttaattagatgatatattttttcaatgaattattcattgttaaaaaaagtagaagagcaaaaaatgaactattaggaacattgtgcttgtgattcaaactcaccaaacacaccattttcattaatggaattgattcaacataacaccacatagaatatcacacaaaaactttaacaaacacaaaatcaaaacaaagaaataacaatctatatacacacacacacaaaaaagggacaaaacaaagaatctactcccaaaatttctttctaggactcttaggatgactaacatcatctctatgatcaatcccatgaaaattattagtaccataaccacaaaaatcatgcctaacaacaccaccaccaccatgaccaaaaactcctcttctaaactcacctctagccatggacaacgccggggcgagtcgctcactagctgcagccttttgaagatccaaaaggtaattttgttgaggaagaccatagtgataagcttgaggaatataaccactattaatccattgaggactatttgaacgatagagacttggagagctttgaaccctatgcaaattgttacaattattcgacgaaaacatcatctcatgtccttcattaatggcttgaaaatcaggggagtttgagtttggtgaagaacaagctgaaatggtgaaagtggtaacaatattgggaggttgttgttgttgtttgttggttttgtttatacgaacaacaccattaatggcatcaatataacgttgttcaattgagttgttgttgttgttgttatgagagtctattgtagaatgttgttgttgttgttgtggtgatgatgggaataagaaagtacgaagctttggtgagccttcagttgtctctaattgacgatcatattcatctaacatgtgctttaaatcttcatctgttcttattgagactaatgcatcaagatcttcaaaacccaattggtatttaagtaccatgttgttgttgttgttatctccttccttgatcatatctgaaagcctcttgtttaactctgttatggtaattttgaaatgagttttagaaaaatggtatttttgaaaaagtatttattctctcaaacaaacatatcaaaatgagcagctttgttaagaattgtactacaaaacatgtcatttctgaaaaaatatccatatatttttcatggcatttctcatatacgtatattataaaatgagaagttttgtaaatatggggtatcaaaaatgctgtttttgcaaacaattatacagcaaaaaatgccatttctgaaagaaaaaaactcattttgacaaacacttggtgaacaagaacaaacacattcacaaatgtacatattaactgtcatggaaattttaataaaaagaattcattttccaaattttgggtatcaaaaatattgttactgtcaataattgcacaataaaaagtgcgccatttttttgtgcaaaaaaaaaaaaacaaacattttgacaaacacttgatgaacaagagcaaccacattcacataatattaactcaattatggcaattttttctcaagagaattcattttccaaatttgggtatcaaaaacattctcattgtaaagaattgcacaacaaaaatacatcatttttgcaaaaataaaaaaaaaacattttaacaaacacttgatgaacaacaacaacacattcatatatacacatatagatacatatatttttgtgggaaattttgtttacctgagaaagaaatatggcgaggaacggcaatgactcgggtctcaccgccgacgtacttgaggtggccgtcggcaggtctgggtaagattcttccaccatggctacataaaaatttgaacttgttctttggggaaggtgggagatcctctggtgatgatgatgatgataatgataatgataaaccaccattaatggcttcttcttcttcttcttcttcgctcgccatagatgattagaattgaaaaccaccaccaaccgagtcaagctgattcgactcagaaaactcgacaagaaataaaaatttaaaatttaaaagtgaaagaaagaatgaagggaaggtagttattaaataagcaaaaacaattttaggccattcataatttcaacacaattaaattatttttttaatatttttttttaaatatctaaatataggacatgccattcatttatttataataatgataatattatttttttttctatttgaatctaaaagattttacaccacagcttttatttattttactttttataaaattcaatatttatttgagggaatctcatgtttattattattattataatattcaaattaaggcaatattttattgataataataaaagtgaagttcaactcaatttttagctaaactttcttaattatagcttcacttatatttaacattctaaactcaaaattttagcagtaaaaccgtttaaatttaaggtgttatccacttaactacaaccgtagagtatttatgtgtacactcttatatacgtgacacatttatattagtacacttaatattattatttcaaaattcattttaagattagataaaattataaaataaaaaaaatattaaaattttaatataatatttataaaattataacttaggtagatctgaaaataaataaaatttattttctatttttagtattaatttttaataaataatacaaaaattacttaatttaagctagtttaaaattaattaaaattaatttttaactcaaatttaattttctaaaaatatatttaattaatttaaaaaaattcaatgtatttaaaattaaatatataaatttcaaaattttaataaaataaaataaagtatgagcattattttaatttatatcgatttaaaattaattaaaaaaaaattaatttttaacataaatataattctcttatttaattaaatattataaaattatctaatattcaagtatcttaaattaattgaacttaaatattgatttttatttaataaaatatatagaaaaataaaaatagtttacttagaaattaattatctacaatatatttcataaattaaatgctggttttctaattttaatatactttaatctattcattttaattaattattaatgaaaattatttgatttaagttgatctaaaattaataaagaatgaatttttaactttaatttaatttttaaattttatatttcaaaattctaatatttttttaaaaatatttttgaaaaataaataattattaaaataaaataaatatataaaacattaaaaaaattaacattaaatatttacaccacatattactcctatttatatacatcttaaaacctacacatacttagcaatatgcttgttgtagaacacatgagtctcctatccctacacttctcttccaac

SEQ ID NO: 15416 - DNA, 6542 bp, Cannabis sativa
  modified_base (6502)..(6515): a, c, t, g, unknown or other
ccgatgggaaaggtgagaactcctagtcaccttgtctctgacaccccacaaagcacctttaaatactgcactttcgtggtggtgccctacagcctacgacgtcatcctcagcaggtcggcgctagtcaactttggagcaattacctccattcgagatcagtgccttaatttccctacctgagaggctggagtaggaacagtgaggaggaaccaaggagaagcaaggcaatgttacaacgacataatacatcgatcgattctaaatggtgcaagggggtgtagagcctttggcagaagaacaggacgaattggacccccgtattgggtcagaagtgactttagaacctatggaagacatcgaggaagtgagagtatgcgacctcgacacatctaaggttatccgtttaatctagaactggaggagcagagtaagatcatagacactataaaggcagctacagacgtctttgcctggtgccatggagatatgattggggtaagcacccacgtaatcatcaatgtccttaacgtcaacccagatatgcctctactacaacaaaatagacgcccgctagacccagtgaaggccaacgctctgaagaaagaagtagataaaccctatctcaataaaatcacaaggctaacccaaattattaattacctttcacgccacatatgaatgtgtagccttagagtcaaacaatattgtatagtaggagttgttgacaagaattttacctattaccactgaaggactgactgcagcatctgcttgcgtaatagaaaacacttgagtagatacaagtttcacatcttattttggctcttccttttttgtctgagggcagtcttttttgtaatgcccgaccacgacacagtgaaagcatgcctttcgagtacattctcaaagatggatttttcttacaacgtgggcactcatgataagaataaccttgacgtccacctttaccgtggttcccacactcttgttctgctctaaaccaccagatgttggaaagctctttctcttctgatcaacatgggtaacaccaccatccctaccataaccagaagtaagaaaggtggtagtcccaacaacacttggagtccctcgagtctcctgatgaaattctactgtgacctgggcttggagagccttttgaatcatctcagtgtaggtggttgtgtcattcgttgtaatcaccaaatcatgtctaaacttggcattcaatcctactaagtatttttccttcttgctaaagtttgtaggcattatgcccaaagcaagcttagtaagtcgattgaactttgttgtgtaatctgtcactgacatggtctctccctgaacaaatttagtgaacctttttctttttaagctgcaaacaacctcattataatacttagcattaaataaatcccaaaattcttcccaagtcatcatagtgatcacttcccgggtgagggataccatctcccaccacacaagtgcatcttcctaaaattggaaggtggtacaagtcactcggtcatacccgataacacccatgaaatttcgaattctttgaattactgtgatccagtgcttgactttcatgaaatatggacgtcctaaaaaactagaggggcctacttgtgaaatctttcatacataggttccatactattcccaacaataggttgttatgttggcaccgctggaaccaaagcagctgacacttacagtggaggcactgtaggaggtccctactgtctcagcctctgaatttcctcctcttgctgattaatatgggcttgcatttctaccaacctttgctcccaatcatgagggacttatggtggattttcatgaccacctccttgaaatcttccaaggcctctgccgggtccacttgaatttagtgttttttgacctccccgaccgccctgacctcgaccaaattaccacgacttctcgtgtttcactggcatccatactataggacttatcttacaaacccataagtcaggtaggtcagacagtcatcatatttctctaagtactgcacttacagatttttaggcaatgcattcaaataaataatcacaaaacttactaaacaagtaaaggcttactaaacagtgagttaagattttctctaacgatgattgtacatgtcttgacgatctttgttcgataacctggcagctctgataccaaaattgtaataacctaaggattaggcacgctacagtgatctttcaattactatgcactcctttgctaatcaaagggttacctcaaaattcgtgataaatttaaaattttgattaacaacttttataactataaatatataattatacaaaaaggtcgggatctcatttttaaacttattttcacaatcaaattaaaccttacaatcttgtcgcacatcgactaaaaaataagcctaagtcgtcctgagactgaactctctaggtcgtaccatcttgccatgtacaatcatcctcgagctgttagctcattgttgctcagccttatcctttcccttacctacacatgcaagtaataattgtgagtcgataaacttaataataaaagcttatagcatacaatatatcactgacttgtatttaagcacccatacacctatccaaaaggtttaacagatgattaagaacattctaaacaaaggtacgacctctgtaccacatgcactatgtactgatactgtactagagttggtagggtttaagccataccttgagtaccactgagtgttgtaccacacgcactacgtacctaattgtactagtgttggtaacaccgaattgtactcttaaacatcatatattgtattaaagctctcaatacaactaccataatagtgttgatagcatatgaatcatataaataacatgcatataatacacatatacatatacattctatgctagtcttatcccctttccttattcaagtgtgtcagtcaacttgaatggaaattcacatgctgaacggaggccctatgtcacaatgtaaaatggataagtatttactctacaacacttctctaatcctgaaaataacctaggatttttctaccaaactataaagtgaaaacacccttagaaaaatacatatttcggctctaacttatattccatatggtagagtttgtcacaagctttaaaacggtatatagaacgtccaaaatggacatccaagtgaaaatttatggccaaaatacaaaaactgatttccatggtaaagtcccattttggaagctcctatgatcatggaagctccatggaaactcctccaatcttggaagctctccgatcatggaagctcctctaatcatggaagctcctccgatcatggaagctcctccaatcatggaagctgctcaaatcatggaagcttctccgatcatggaggctcctccaatcatggaagctcatccaatcatggaagctcctctaatcacgaaagctcctctggtcacggaagctcctccgatcatggaaggttctcagatcacggaagctttttccaaggcagcaaaggctcaaaaattccaaattttttggcccccaaacctagctcccaacctaaccaaaagtgacccaaatttctagaaaatgaatttgggctaatctaaacataacccaaaactcaaaagcatctaaaacaacaagcaatgaaattaaccatggatgagcaaagcttcagttcacaaaactcaaacttcctcaaatccactacatatactactacttctaaaaacaagccataaacaactaaaatcaagcattaaaatagtttctaacacaattcaagctcaaataaaactaaatcaccaaattccaaaaaatcacaaaagagaaccaagcttaaaacttcaaaaatagcaaggaataaagtttctagggcttacctttgatcttggcttaaggtttcccctcaagtcttgctaaaattggcttgcctatggaagcctaaccttggtttctccttggttcttctagggccgaaggtgaaggagagagagaaagagaatgagatagctttggtttttctctaaacttccctttttatatttcttaatgaattaaattatacaatcaatataaaacaaaggttgggagtttctccaatccataaatggtaaaatccaatttttccccttgcatttgtacttaagcaacttataggtctaggggaaaagtggtccaaaaccacaaccccgcctaaccccgatactccaaatatcaacatatgaataccccactaaataaaagattctaaactttcccatgtgactataccagccatctgtcgcattttccaccattgataagtaaaaatcataaaaattgtaaatttcacatataacataaataatgcacttaaagtttaataaaatctctttgtgaaattataactctaatgctttatttcctaaaaatgggacccacaacatataaaatcatgtataatcataaaatatcgataattaatgccaatcgcctttacttttgcatattctaatcatacggtcattacaataagtttaaagggggatcctagctttttgtatgggtatatgtatatatttataaaagtttaaagttaaattaaatgtttaaatatgtcacaatttttgagaaaagtctttgtagcaaacgtgagcattgtaattagaaagtcactatagcatgtctaagcattagggcgttccaatttcggtatcagagctgctaggttgtttatctaagactgtcaagacatgtacaatcatcatcagagataagctcaataactattcagtaagcctttacttgttcagtaagttatgtgactagaaaatcattacaggaagcatgttagtaatatgttatttgtttaattgtgttgcttaaaaatccaagaatgtggtatttaaattttatgtgatcgatgtctaacctacctgacttatgggttcatatgatatgtcctacaatatggacgcccagtgaaacacgagaagtcatggtaatatagtcaagactagaggttgttggggaggtcataatcctccaaatccttgtgggcgcagttgaggctgtggaaggtttcaagagggtggtcatacaaatccaccacaggcttctaaggattaggagcaaaggtttgcataaatgaaagcccaaattaaccggcaagatgaagatattctgaggttgagagagtatggtatgtctgcagtgcctccacaacatgtcccaaccgctttggttctggcagtgctagtagaacaacttgttgctggccactgtatggagcctttgtatgagagattttcgtaaataagcgcctagcttttttgggaggtccagatgttataaaggccgactagtggctaaaaatggtcgagagaatcctaaactttatgagtgtcactgagaatgattgggcaacctgtgccacatttcagttttgggaggacgctctcgtgtggtgggagtttgtgtccctcacccgagattccactataattacttgggaagaatttcatcatcttttcaatgttaaatattacaatgaggcagtctgcaatgctaaggggaaagaatttactgatttgttttagggtgaaaatatgtcagtaacagaatacactataaagtttgatcaacttgccaagctggcttcaggtatagtgcccacagacttcaacagaaaggaaaaataattgacggttttgaatgccaggattagacacgatctggttattacaacaaatgacacaacaacctatgctaagatggttgaaaaggccctttgagataagggcatagtggaatttctttgggagccataagggacccttagtgttggtggaaccactgcccttcctacttctggttatggtaggcttggtggtgataccaaagtccaatagaagaggaagaatttttcaacatcagggtgttcaggacatagtaagaggttctatgggaaccaaggaagaggtggacgtcagggttattcttatcctgagtgaccttattgtgataaacataatcccagagaatgtaatcgaaaagaatgctttcagtgtggcatggttgggcattttaagaaagactggccccagttgaaaaaggcagaatagaaacaagaggcaaaacccgtacctgctcaggtgtttgccattacacaagcaaatgctacaaccagtcctttggtggtaacaagtcaacttcttatcgacgactccatttttattatagtgtttaactttagggctacacattcatatgtggcatcgagagcaatccataatttgggtaggtcctgtgattttattgagatcgggttggaactctactacctagcaaacaattggttatggacttcttatccaagtattcggctagtattgagtgtaaacaaaaaatagtaacctttcagcgagagggtgaggaaccatttgtttatgtttggatcattctgttggaaatattttaccannnnnnnnnnnnnntaacaagtatgtttgattaacatccta

SEQ ID NO: 15417 - DNA, 5733 bp, Cannabis sativa
aattttcttaattccatagcttttgaccaaatcaaaagcttattcaagaagaaattagcttcttatttgttaattaatttatattagtctaaaatttaaacttttttattttatagacgtataaaataaaataaaattaaaaaatcctaaaatgcataggagataataggggttgcgaattttcaattttatatagttgatgaataataatggaactacatacagattaagagttttttgtcgttaaatgtgaaacgacatgtcgttgaaaacctacagtgataaaaaccagtgaccacccttcctcctccgccattgatttggtccatcattcctttgccctagaaatggctctgagagttcatctcacccccaaaatccccacattccgacctccatctccatctccaacactcaacttttatctttccccttctgtaataacgttctctagcaaccgaaccaaaaccctaatcaaatgcacctcctcggacctcagctcgggagaatcagattcagagtcagagctggctttaaatttggcaagagaagtggagaagatgaacaatcttttggtgcagagagcggaggccatggaaaagagcagaggactgttgttcaaggaagtgtgtcagtacttatcaatggattccgatgaggttggaagccattggaggaagatggaagaggaagacaagtgggttttggttaaaaggtttgtatctgattggggtgtgaattttcatccactttctgctaaatcaatcaaagaattgattgaagaacatttaactgcaattgaagatgattatcaacaaaacaattctttaaaatcatcatcatcttcttcattgtttccttctttgaagaaattcatgtggttttcacaagagtagaaaagttaatttcaatttcttttgtttgtgtacaaatattcaagtggaaacaaattgctagttttataagttgttgaatttaataatacaaagagcaactatgatttggggtgcaaagtctattatttacataattatgattttaacaatatcatcaaatgaatggttcttttgggaataatcataataaggagaagaaatctttatatacaaaaaaggggcaccaaatatttcatttgagaacactttttgattgtgatgatgatcatgatgatgatggtgagttagtagtgtgtaacaaagagagagatttgatcagaaagatatctgcctgcactgagcaacagaagcctcggctgggcaatatggacatttaaatgttcgagtgctattctttgacagcttgatgattgattgcttgcatagaacatgtaaacatggcatcaacatgggtggattctcttcactgctttggtctctactaacagggcatacaaatattgaatggaactgaaattccttccccaagtcaaccggaacgggtaactgcttcatcgcctgccattcttgcttctttgcagccatgacatttgctagctttagcagagtaggcaacccttcgaatccggccgctatcaccacaccaaatgggctatgctgtgactgtcctaggacactacagaactgctggatcagctcctcggttgatttctcccaatgggttggagacattaagtctgcgtatggagagctcgtgagccttcctcggtaggcaaggcaacccataagcttcatgatctcattctcgtagaggaaagcaaatggtgcaaggtaagttttggcatagttaagtgcatcagcttggcttccggtttggagcatctcgacgtattgcagactgtgaagtttaagctcaagattagaaccgttgtgcttgagcttttcgcggttggcatagacccatctaagagcaggctcaaggtttttagtcttcatagcctcgagtatctgatacatttcgaaaaattgtaactttaaattggctgcttcaggttctccagcctcatttataatgctatctccaagatcaaaccaaccttgctggtaaaagtggtttgcaatgatttgattcacagtatggtgatcaaagtcaacatttctgtatgctttggatatgtcagtattgaatgttttatcaaggagttttgggtatttgctaaggtttacatttagctccttctgagaaccttctaactggtggagtggggagatcgcattgagcttatgcttaagctccagaagaatggagttatgatcagcaggtgagttgaggtcatgaggtgacacaatttgtgcaagtgcttgttgaatttcattgccaacttgatcaattgcttcatgacactttgaagatgatagcttttgcttcttgacaacgcgatcgaatgcatctttcactgtattcagctccatttttcaatccaatattgagctcctgcagcaaagtgatataagaatacttagtgtgatttccgaaacagtaaacactgctaaaagtatgcatcataaattgaaagttgtcaaaaaatatgcatcataaacaaaaagcacttcgctataataaattagaaaagccaaaaccttatgagcatagatataaattagctataataaaatgaatacagaaatttgcagaaaatgtttaacaaattgaaagcaacttgggacaacacattctatactgatagtgaatgtgaaaaaacattacactagctttgagagctcaactgatttctaccttaatctgggccaagcaaacctacccaaaagaatccctacctaatcttatctgaaaactgcaactgcattaatgtggcgcaagagagatgtatgagacccaaagttgttgtcatgactccaaaaccacaactaatctgaataaagcacaaaccaggctctagacttatgattttgacaagtaaaattcttcactttatgataaggacaccctctagacaaaagaagagtatggattcgaaacagaagttgctctattttatttacaaaaatagtgaaagaatcttttgcagagtattgcagggaggatgcaaatggctaggtgccaaggaaaaggcaggaacacgatgcattaaggtcaatataaggcagtgagcaaccaagtcaatctccatgggcaccgaaaaatttaaattcataccatgcaagggaatgagcttgcactgagatctagagatgatttcttgatataagaagattacttctcaaccttaaattgaaagacaaacatccaaggtatagaatcacgtattcatcttggacccctataaatcccattgagaaagcttgctctaagagtttcctacaaaatacatgcaggatctacctctaaaatttgtacacttattgaggacatttttccacccaattcacctcccagagtcaagcaatgagaaaatgtgttcctcaagagatgaaagaaggcagataagggtctgacagaagaaaaaggcttatatagcaactagaaaaagaaaaagaaaaaaaaaaactggctgtgatgacatgagatgagaagtgagagaaagtccaactgcaccatggaaaaggaagaggatattggactttaagatccaataatggacagaaggcaactaagggtctgacagaagcaataaaaaaacatagaaaggatcaaaaaagacaagttagaggttacttgaaataggtaagttttgtaatcccagtacactagctaaaaattgactgttgaatttagtatcaacaagtatcagtccaaaggctataaggtacattataggctaattttgcatcgtaaataactaaattgggtgttcctatccaatgcagaagataattctctccactaattaatgttccttctttaatgaaagaaattcaggctacatataagtaagtctctattctttaacattctaaaataatgaactttttgtttttgtcaacagaaggagaagggactcaacaagtatatggaaataatgtgtagaatatcgcaattagtacagatcggcaattttgtttccaaaatgccatatgttacaagatttggaaacacaagacgtaacacaccaacctcaaaagtcttggtgactatttataatccaaattatgaaactaacaaaaattatgcaattatgcagataatattttcaattgttttgaatagaaatgtcctacaaataattgagctaaacttaagaagattttctaaacaaacagatgcaagcataatttcaaacaagtcaaaccttcagggtgtaatggtgcatgacatttcatggtaaacttgagaaaaatcaaagagaactttcactgctataaaaagtaattcatcaaaaatgactaacattcctaaatttagtattatcagcagaaagaaaatgatttactttaggcttaagctataaaacaccctaaattcttaacttatcacgcactcagtatcaaaatccattgatacacgacaaaacatcatcaacacccacaataataaaaaaataaaaaagaatatacctttcttaactcttacaatctcctgtcccaaaccaaatgttccctgaaaaggggaaaagaaattacaatttgacataaagaaactcataaattaacaaagagaatccttagtagtgcctccttcacaagaaaacacaatatttttcgaaacccaatcgttcctggcgtcaaaacacaaaagcaatttccttttctcgtttctttttccaaaaaaatgaaaaaattcaacaacaaatcatccaaaaagaaattgaccaaactccaatctccaaaatgcattgcctaagatacaccaaacagtattcagtatgaaatcacaactaccacactatcgattacaaaacctaaactcatcgatagctcgtgattcctctgttttctcgggaaacaaacagagtgtagacgatccacaaatgaaaatcaagaaaaattgaagtaaaaatagagtgtaattgatgcattaaaccagaattgatagaatggaaatctggaagagaaggttttatggtaggggaattacctcctgtgagaattgggggcagcggagagcgccaagccgagagagaagaagaaagtaagcgtgtgagtatgcgagaaaatgactcaatcagtgaacccaaatcctacgacgccacacgtgcgaactctcctttgttttcctgaaattactcaattacccttctgataatatatgtgtatattcggttttggctttcgactgcggttattttggtcgcgtaaattagtagtttgtacattcagatggtgagttttttttttttagaaaaattcactaatattattaatcaacaacaatcattaacaacaatagtgaaaataggaaagggaatttcccttaactagcaaacgtcttgatccaactctaaagtatatttcgccaaaccatgagcagcatggttagcgtttctgttgacatgaaagataaatgcttcagagaaaaaggataaaagataacgaacatcagagattaaattcgaaaaactagataaaacccttgatgaagatgttaaagcctggaagactctgagggcatcagtttcaatatggatgatttttttttattcttagataatatattaaactttgattatattcaatgaaagttcatagttaataaaaatattaaattatgtcatgatttgggacaagtttatgaatagggctgatttcgagatgagtcaaggcgtgcgccttaagttcccaaacgatcaggacttcaaaattatgaaaagataattat

SEQ ID NO: 15418 - DNA, 4629 bp, Cannabis sativa
agtttaatttttaacagtagtaatacttaaattatatttttagaattctataagtacattaaatatcaaatcattacgtgttattttttttattaatatatctaaattattttatttaaaaaaaaaaacaaaaattcatgacctagactaatcaagaattaccatgagaatttacttaatatttaataaccaagtacctacaaagttttaaaaatatgacttaaatattattgccgccataattaaacttatgtatttatttgtaactaaaaattaaacttaagtatttatactgcaaattactcttaaaaaaaaactctacaaaataaaatactatgttaaatcactataaggccatcctcaatagatggatggtataaaatttagacgaaaaaaatgcaatactaaatttactcttttaacttgagatattgagtaactaatctcacattctactttaaattaaaatattttttaaaaatatgtgcagtcccgtaccaaattgtgctaacggtatctcatataaaatggtgttggaaattttaagtgtatgcaaaggcgtgctaaaaaatagcagtacactattaggacactccaatagaaatactctaataaaacacaaatacgaaagtatatgccactcatatcagatgcatcaaaaccccatttttctctataatacaatagaaaagcatgaaaaatactcttacatcaaatgcatcaaagtaaatgtaaattaaatatcctttaaaacttctataaacgtacagaagcattcaaggttctctatatactattttaacatatttaatttaatcttttatactctctctagtctctactttgttattattttttatttttaattacatttcttttgtactttaattaataatatagtatttaaaaaataatatttaaatgatgtaaaaaattataaaaaagctgatatataatatattatatatatttagtgtaaaataaagaaagtagttttaataatatattttaataaatagggaagagaagctgctagcagtggcctaatagtaactaggccggttgatttattgttggaaggcgccactagattgttagttacagatgaaaccaatacctacttgtgaaattcgttgaataaatatttctggtaagaacaagaaacaatgctttttcatcttctgattgttcgatcttcattatcgaagtaagcgcatttaaaatattcaaaatgcttatggagagtactttcgaaaattaggatatacgagtagccattcttgcttgttaatgttcgatttcaccttatttcaaggtcactagagacttcgttatttaatgcattttaaatgactgcgcaaacgtgatcattcacaacccagccctaccttcattgtcgaagttcaaggcttaaatccccaaccccatggaagaacaaaaaaacaaaaaatgagcaaatgtttttgaagtctagtatctctcaaatgagcaaatgtcattgtatatacaaaagcaattggatattgaataattttaccggattccatgctttgccaatttgtaagtaaaaaaaaaagaaacaaactttaaaaccagtagatgttccatcctccttacctacccctcaagacattccatgtcaatttttcaactcaacttcataaattagaagccaaattaccccacagataggagtttgtaagcaaacaaactaaacttgcagccatagattataaataaagaagctaatggcaatgacttaaaacagagtaaaacatacctctcaaacatacctcttagtctctaacaacgaagttgagaaaacctaagcagcattccttacgtcctccacaggagaaacagctcaactccagataaatagataaaaatttaggaagaaacacaaactgttattttttcctacattagtttcaacactgacctagaaaaagatcaaatttccacccccctcgtagcccttcttctctgcataagaatttgtctagtaccgatcataacgcctgctgaaatagaattacttaatttcagatgaccatccaaaaataataccatttgaaatagtgggaacttggtaggaaaaatttgaagccagtacctgtggcgatcatagtcccttgaacgctcccgtgatctagagcggtcacgacgacttctggaatcataactgcgggagcgatctgaatctctctcacgttcacgatcatatccacgatcacgatcatgatgtctatcacgatctctgctcttgcgatcataatctcttcgatcacggctacctgctctttctctatccctactagactccctttcaatctccctgcttcgctcttttgacctttgaattatatattataaagagcagcatgagaaacaaaggaaaatagttagaaatatcgagtgtgtgcgtgcttgaacgaaaaaaaaagacaaacaatgattgaagcaagtaaaagacagtatctagatttacctcctatcatcatatcgatcaaccttgcgaactttgtttctctcttcctgacacattaattaccaagaaagtaccattgaaaaaccattacaaatttacatgattttgcaatatcaatagcaatatgactgacaagagttatgaagtttcacaagtaaaattgctagaaacacttaggtgcaaatcattaaatagccaaagaaattaaaaacctggaaaattcctaaatttatacaagtcaaggaaatataatttgtcttttaaaataataatctttagaaaaacacttaaaagaggtaaggactccaaccgattaatttttatttatttatttttttaaaaaaaaaaaagaatcccagtgtaattttccaaaactaacacttatgaaaacaaggaagtgggggagcaggaaactggcacttaaaacacaaggtcaccataaataaagaacatagcaccactgcacacccgccagtcaccttgaccatgtttgctccctgcctcacagaggtctgggatttcaacccatggatataccaaatttcattgcatagaaattagaagcatatgccacataagatgaatattcaagtgcaccatggatcaaacttgaaccaactttgacattgatttcatgagatatggtcacattcagaaagtccagaaaccaaataatattgaaatatgtcagaaaaatccatggtttctccggggttagaaaactcacagatggaatactacgagaatctctaaagatttgaaacattataccagcacctgaaccaacatattcacaataactcaagagaactttcaaaggtgtgacaagtaaagcattatgtattttacaaatcattattgattttttttttcttaagagtatttttctttaaaaaaacataactgatgatttaggtctaagcataggtttctaatcccttctgaataataagagttgacacaaattttaagttctcatctaaaaaagcagtaaattctccatcatttgcctctatcagtcactatccaaaataagcaaaaacaaagtacaagaaaaatgatctttacctgaagctctgctaacttctcgcggatttgcatatagcctaaatgaagcttccccccaaaatggtcagctaatcgtcggtcactgaaaaacaaagcagtgttagaatgctccacttatttaaaacataaaaaggttccagtatctgagtacaaatacagatgccccttaattctagccaacaattgcatgatctactagcataaaacggaaaaaagacgcacattctttagctgcaaaagttatcctcgtaaaactgggcacaagagcctgctggtacaaggaggtataattattggatcaaaagctgaagtacttgaaaccccaaatgctatttctatgcatccctcagaaaaaacaaataacaagcatccaaattagagatgcacatgataaaattttacctgtcataaacacttaagaatgctccacatatgtcacatacccttagcttttgatcagtctgaaatgccatcaaagaggggaaaaaataagagaatgaaaatttgcccagctatcataaataaactcaacataaaacccaaaccatgcatgtactacaactcaatacatagtgatagattaatgcacaataaataattagtaatgttttctttcactcagttgtgtcctatgaattttaatgagaatgctaacaattagactaaataaatttttttacataaaagggtagaaggaaaaagaaaaagaaagtagactcacaatgcgaacatcagccgcagtgtacttagtggaatcaagaactggctcctgcctggcaggcagctgaaaaaggagaaaattgtcaatatcaagaaatgaaaaacaagtattacaaaattcatacatctgccaagagatattatttgctccaccacaataaaagattaactgtccataaaattaggaagacaacaaacttcctggcacaccttttttagggcttcagcctcttccaatgctttttgtgcttcatcaaccatcccttgctcacctaagaaggtacaaaacttgtaataagtgaatacccaaagtatttggaaaaataaacaagtaaaaaaaaacagaagca

SEQ ID NO: 15419 - DNA, 4797 bp, Cannabis sativa
tattatttttgttcatatatatatttgagtttactcttaacacaaataaaaataattatattatatttcactataatcacacatatctctgttttactaatcattttggtgtggcttctatactttaataccatgccccctaattagtccaatagatagttattaaaggaatttatctaatttatcaaataccttttttctatatttctaattttactcctaatctttacagcaataatgtgtcaaagtaacagttgcagattaaggtaaccaatttcaaaggagtaatctcaggacttcttcagctaacagtccaaaagatgtatacacatttgaggcattttgagcaaagatgtatatatattttgttttatctcatatgtttcagtgtttccataatttggagaaaaagattgatattagaatttttttatgacatgaatgcatatgcaaaacaagaatttagcagcaagtacacaaaatatattttcttggcatatttcaccacaaaagatgttacacctcagttgattatttttgtgataattgattcaaggtattacattggctcgatctactgttatatttgctaatttttttaactgatagtaactttaattttcaagaatatttatagcctttcattaaattagtttagacagcaataacttaaaaatcatgtcaaattttatgacaatgttttttctttttaaatgattttgaaaagaaaaaaataaatatatttgcactcacttattttcatttactatgcaactctttcttactcttaaaatggttacaaaaaaatgatttctacttatttttcataatattatagattcagtcaaaaaaatataatgtatttatatcacacattagatttaattttaaattaaattttatttacaatttattctaatgaactatatataaaaaaatatgaaattaattttaaaatattatatatacatgatcttttaaaaaatattataattttaatcttattggtctaataatcatggactttttttgttttttttttaaatttattcttgttaatagtatgtggaccaactatttattttattaatttactttttaactattttaatttttcttttaaataacattatataattatttatatatgataataataataatttctaatatactattaatattcatcactctaaatcattactcaaatgacagctgggtgatgactgatacttgacatttgttaaaaattagcagttacttgacatatgttttttttttcttcataatttcttttaatttatgttattatgataagtactattttttctttattttagaacttctaatctctttgtttttgttgttttacctgcaaattattcttcttttttttttttttttcagcatcatcagcatgtaaatcttcatctcttctttgcactacctatttcacttttatcttagtaatgatttcttttacaatttatctgtttctcatattaacttctcaatcaataatatatttcacaggttaaacaaatatgtctataaatgaagttggagatggaagaaaaaaatggacagcaaaagtattagtatgtaataaatttccaccaagaatgtcatcacgcagcaaatctagatttcaacacatgatccttattgatgctcaggtactttaatcaatttattttttggctttttatctcttctctcccgtcacaatatttttttttattctctccttatcgttctatatttacaaaatcataaagttgcttttatttataggaaacacacatacaagctgcattatttgatgatgttatagaacgatacaaaaacactcttataatgcacaaaagctattatatatcaaatgctcacgtcaagaaaatggatccaagatataattatttgaagaacaaatatgagtggatacttaataggagcacagtggttgaggaagtcaaagaacaagaagataaggatgtaattccttctccaccagctttctcatttatcgcttttacctccttgcagcaatacatggattcttctgctcgagttggtaagattttattaaaagctgaatttaaatctaatgtccattttgccaaaatattgatcaaatttattttttatttacaattcagacatcatagcagtggcggcaaatatccaaccagcgagaaccatacaaacaccacatgaagcaacacgtatacaagaaatctacctaataaatgatgagtaagaatatatatatattttccactaaaaagagcacatatattatatttatacatatacaatttgataaatatatatatattcatacatactaatgcttggtttatattcttcctctttatttatagaaaaatagaaatgttgctgacaatatggaattccaactttgacaatgagtgtgctactattgaagatattattctcaccaaacctattgtcgcagcaaagaatctcaaacatatttagtacataacaaaaatcaatatataataatttttttattatatatagaatgaacaatattatagtattaaagtgttactgtcttttatcttctataaaaattacatgctcttattccttcagaaatgtcattggctaaaattccacaagttctcttcttcttgaacctgaattgcctgaagtagatgctttaaagcctttacagaaatggtacaatatccattaactattttgcttctcatttttataagctcttgtgaaaactatacaaactattgaaaacatgtataattaaatgtatattatatatttacaggtgcatcgacaatcattacacttcccaacttcttctaagtggaaaaattcttgcatcttcttcttatattgccaaaccaccaccaaatgaagaaatagaatgaatcaacttcatacagaatgctgaagaaaatgtaatttacaaacatatacaaactaaacagtaaatagcctttataagcatattactaatgatttattatattttcagaagtcacactattggattaaaggcaccatctcacttgacaattttcaccaaaaattttggtatatggcgtgtgaaaaatgtaatagatctatgggtgctgactttgatgcttatttcacatgcaactattgttggaaagataatgagaaaaacaaaaaggaaatagaaatcaaacaaaaagcagtagcaaggtattaaacacacttaactgcaaaaaaaaaaatactttcttatacataccagcttatttttttccctattctagatgttgcatccagatcaatatgcatgactcaactgccacattacctgctacaatatttggagaaattgctgaaactttcttaaaatgtaccgcaaaaaagctgatggatgaaaccactaaggtattactatatattactatatagtggttattatttaattattacctttactaagtgaatatctaaattatactaacatttataatctactttataaaaggatggaatattgactgttgaaaatcttatcaacatatccaccacaaagaagtatatcatcaagataagacttccaaatatgaatttcgccacaaaatggagcagaaatacattgtcgaacaactccttgataacatctaagtacttccaccaatttagttccatgactcttccatttctaaaatagttgcttctctgtaatatacttttggaatgtatatattataggaactaccaatttgtagtagttcttttgtatagagtgagaaacacttgtctcagttagctttaaccttttgttacttttacatcagctgctacaataattttagaataaattataatagcagctgataacttttcacttttaaaaaggttacttctctctaatatatttttggaatgtatatattatagcaagtactaccttggaacagttcttttgtatatttgtctcagtttacctttaatcttttcttatttttacacttactgtgttatgtaattttagtgtgcattaagatatatatatatataattagtcagtttgactttatattatttaaacaaatattaatcattttttaaccttatataccttttaaaaaacccaaccgcaccacatgccttgcatgtgcttcttctactagtatttaataaaacccttatgttatctcacttttactaaaaattaaaatagaagaaaaatcaagtttatctctccatcctctctcttgttcgaaccccatagaagcagctagggtttggttttctttctaaaattcaagctaaattcagcaaggagttggtgggtataagctttaggtaagcttctagtaactccttcatggttttcttgagttgaagttaggaattttacatgattttaaggaaaaggaattgggttaagtagctgttgtttgtgtttggatttgttttcagaagcctttttatgtttggttatgttggtttacgcttgttttaatggttgttggttagtttaatcaagttttgaatttttgaactcaaacttggagctctaatggtggattgtgattctgagcttatagaagtgttttattgctttgattttattctatgggctataaatagcaggtctggaagtttttgtagtgtttggagttgatttggggtcgtggcgaatttttgaaggtttcctgagctgaatcaaaattccggttcagagggacctgtaggaaccgaaattccagttggtccccaggaaaccccacagaactgaaattccggttggaaaccggtctaccg

SEQ ID NO: 15420 - DNA, 6532 bp, Cannabis sativa
  modified_base (3076)..(3078): a, c, t, g, unknown or other
taatactcttatttatttagaggcgggcaagctccgccggtgatgattccgccggtaattttaatttttcttgtagtgagagatctgattcgttgattaattgttgttgaccgatttgagaatctatctcatctttgactttttttagaacatgagggtaatttagtaaattggccattacccattctaatgttgctgatgtatccattcctgctgcaaatattacctacaaaataatttatttgaataattaaataaatcaaattaatttcaagagaaaaaaatctaattacttttgatcatttattttcgaattacactaaaaaattaaataatttattatgttggttaataaatagttataataatagaaaattaatataaaataagttttacatataatatatatgtataaatgacacagaatataaaatgaacaatatttataaaatgataaaatttgttacataaacatataagttattcatatgatatttagatttatgatatacatttactaaaacttgaacatgggttaagatatataatagttatgagtgtgtggatttatgataagttgttatttaactatatataaagaaattaagttatatgtataaataaatattttcacattaatataatataacatatagtaataataacttaaaaggaaatacacataattagcataccaaaacaaagcctttgataatttggtcagtgtaatattctggttgagactcctgtaaagagagtaaatgttcaataatggtgtttcgattcttatctctgctactccgatgctctttgattaaaccctctacaagagagtccaactttttcccaaccttcttcaccttcttctcaaaactatttgggatccaattcaaaaacggtaaaaagtctccgccgagttccctgctccggcaagccctaatgcaactctcaaggtatctctatatcgccgtgcttcttctttattcaccatgtcattgttgtcgcatcgttttccggccaccatcctcattaagatgttgtaaagcaactcttggagcattgacttgagctccacctgtggacaatagtgtcattttgagacataatttttttattaattgagactcctcacctgttaaaagaaaatgggaaatttacataaattataatttttttttaaaatttttttacacttcgcattaatatatatttatatatttttacggtattaaataaaaaagaacacaaaaataacaaaaaactatataaaaataacaatagcaaaatataaaaatattgttaaagaaaaaaaaacaattaatataaaaataataaaataaaaaaaatacaacatttaaataacatgcattatttttttttaaataaaatcttaaaaactgtaaaaatatttcaaattttgtgcaacatataatgttgtaactttttatgcatatttaaaatataataatggataatgcataaaacatggacacatgaaacacacaaataaataagtaatttttaatatataagtggaacctatattaaacaaaaataattagttgaaattactttttcttataagtttactatgaatttaaatttgttcacatatatcatcattacactataatatgttattgcatatttcttaacacaataccttttgccaatctttatggtgtgagagcttgaagagtagtcgtttgacttcatctctcctaatccctacaaagaggttaagccgtccagaggagaagatctcagttgcgccaattcgcctgaggttgcgccagtgatcaccatagggagtgtcaaccatattggtggagttgtagcctatgtgcttcgccgcaagaagttgtggacgattagccaaaacgacgtcatttttggtgaagcattcctcaacgacagaaggcgatgagacaacgaccacttggcgaaaaccgaagccaagggagaaaacatcgccgtatttggtggagagattgcgcaaggctcggtggagtggaggtttcactagatggagatgaccaattatgggaagagagggtggggttggtgggaggtttttgtagtgtcgtttctttgttttgaatgaaaaaacgacagtgatgagaatgattaataagtagtaaaaggtcatcattacttcactcaccaattccatattatgtagtttaatatcaaagtatcttttaaactgtgtcaaatttgtatttgttatacttaatcaattactactataggtacttggtatttatgtatgtagtagactgataaattgttaaagaagaagaaaagagtattacccaagtaattatttgttacgtaaatttttttttaaaaaaatattgacacgcagtgttaattcattggttacattgataatgaattcgtgtgtgtacgtaaatatttgactaatgttttttctattcttccttactgtggaagcaaaatttaaaaattgggatttggttaattatctatttgctttgctttttttattagaactatgtgttttttagtctctattcagaataaataataacataaaaatgaatggaactttgagaaattatatagtcaatgtatataatatatatttatttgaagtagtggttctgtcttaaaaaaacaacaacgtacagaacacacatgcttgcatgtgttacgtaagtttcataatttttttgagtaaatatacgtaagataatgcgcaagtatcatctattatagtccgaatttttgtttaaacatacgagttcagtctcataaaaatgtgacacgtgtacctatttcccaaaagaaaataataatgtgtcaataatataattatcatagaatcaaccttccatggagcaacttgtgtcactacaaaaaactgttacttttagtgataactttttagtcacaatataatttttttgtgattaaatgtaacttttagtcacaacaaaatgttacttgtcactaaaatatagtctttagttacaagttgtcactaatttagctttagtcacaccaagtagtgactaaaaatacatccagtcacaacaaattgtaatttttnnnactaatacctttagccacggactttttagtcacaacatatgaatgataatttataattagtcaattttttttttttacttttagtcacaagttttgttgcgactaaaaataagattttttgtatgcgactgagacagtagtctaatcgtatattatgcctggtatggtcgaaagaaatagggccgagagaagttagtactaattgcgcatatctattatatccgatgagcgagtacataggtttataatgtattcgacgacttgttaagaaatcgtgtgttctaagttgttaacacaagtgatgtccaaatatgcgatcgaagatgaccgcagagatccacaaaaccaaccccgaaggataattatgcgagcacaacactacagagcctgtgagctcatatgttggaatatgaatggacaacttgtgacttagtcagtcacacacgttgctgtaattaaaacaagaatggacgaaaccattcttacatttattctttaaatgttttttattcattaaattttgtaattattgtaataacggtcctaattggccgattgtgtaatctcaacgggcacatgctttctatatatagggctgatctgaattcaataaactaagctaaaaaatattaccaaaactagtggactacgctgaccaaattttgactgaaccactataattcttttgtctcctttatttctatttgagtgtttgcctatttcatagcctaaagattgagtactcacaattctaagtgagtacttgcatagctgctggtgaatattcttgtttgacttgaatacttatcttttttggtattgtctaaaattcctccgataatatttggcaccgtttatgagaaacgctttcataacactttgtgagatttttgaggagaatcaaaatggctacaaaatagacaaatacaaacaacaacaatgaaaccatcaacattggcactatcaatattcctattattggcaggagaaccactctagttaatgttgtggtaggaggagtgggtcatactaccacgactccccttaacctgtttcctctatttttagggcacgcttgagaaacctcgatgctgacagccactgtacaccattttccaccaataatactcacccaggctttcgatggtattattcaactgaaaactgcacaatatgtgatcatgcagaagcagatgcatgcattgcaggaagaaatcgcaggaagagatcaaactcattaaaagtaatgaaaccaaaaaatggacgctatgtaatccaacacattctggaaagtagtaatggcacctagtgactttagagccatcgggtgcaaatggatctatgaaagaaaggtaggaggagatggaaaattcgaaacctagaaggctagaataattgcaaagggttatacccaaagagaatgtatgaactatgagaaaactcttagtttggtagctatgctcaaatacatctacatactcctatccatagtagttgctctcactactataaaaataatttttcttgacatttttaaatagtcgtttaaagtattattgtcggtttctataaccgtcgcctatacgacgatctcaaaacaggcaaaataggtgacggttgcaaaccgccgggaatgtaaaaaaaataaagagaaaaaaatacatattttttttccattaatctgtattttttcccattttttcctacattagttttataattttacctaaaataaaataaaacaactaattaattttattacaataacaactaactttaaaacacattataatggagcaaccaacccccttcaacatctctcataacatgctctacgctgttgaaagctagatacaataacaaaataaataaaaagtattaatcaataaatatatttataccgagctcggagagagagaaagagagagagggagacgaacgggaggtggtggtggtctgatgtatgagacggagatgagagggacatcgacaggaggtggtggtgatttgacgtatgcgacggagaggagagggagaccgacgggaggaggggtgggtggagatcgatggatgagagagacgagaagaaataaagatcaagagagggagaaacatagcgagagaggagggcgatggtgaggcgtgggtggggttttggagagttaagattttcgttttagggtgtggaaaatggagaagaaataggtgggcatgtgggaaatacgaaaaaagtaggtgggcacatgggaaatgtagcgagaagtaggtgacaattttttaatgggcccttatacctaacagttttgtaaggctcttaaaaaaatttgccttttatttaaaaaatgttacctattttgtttactacaattttaaatattgggaatactaaatttttcccgacgattttaaatagttacttaatttttttagcgacggtccccaaaaaaattatttttaggatcgtcgcgaattctgatatttgtagtagtatcgattatgagatatggtaaaatgacgtcaagataattactttcctcaccgaaatgttagacaagactatttatatggaacaaccagaagagttcaaggttaaaggagaagaagagaaagtttgcaaactcaataagtctatatattgagtgaaacaagcttcttgttcctcgaactaaaggtttgatgagatcatcaaaatctatggatttgtacaaaattttgatgaatattgtatttatcggcaaaagacaaaccaaacagtggtattcctgttactttatgtatgatattttactcattggaaacatagttaagaaataattaaatgtaaaagattggttgagtacttaattccaaacaaaggattttggtgaagtggcttatgttctatgaatataagtcataagagagcgcaagaacaaattcctagctctcccacaagtagcttacattgacattgtgttggagtaatttttaatggctaactctataaaggaggtcatttgcctacaagatatggagttcgtctatcaaaggataaatgtttaactactccaaaagagatagaggtcatgagaaggattccctatgtatctacagtaggaagtttgatgtacaaaatgttgtgtactagaccagacatctgctactcaatgagagtagtgagcatgtatcactcaaatctagaacaggaacattagactgtagtcaagactatcctaaaatatttgaagagaacaaggaactacatgctattctattggggtggagatctcaaccagttaggctacaccaaatcagacttctagtcttgcatcgatgatgaaaagtctacgtctaggatggtgtttactcttaggagtagagttgtgatttggagaagcatcaagcatgtgacagtcagtagtcccgtgattcgtagggagaaacaccgggtaagctgtgcaatcccacatcgcct

SEQ ID NO: 15421 - DNA, 5844 bp, Cannabis sativa
aaatagaaataaatgcaatggaatttgttgaattggttgcttattgtgccaataaatgtcaagcaaaaagccctgatatttgcaatgccattggagtccatctaaacaaaatagcagatgatttcaatcaggtagcttgttattatgcttctagtgttggtgatatgttcaattacaaattcatgtattattattaatattttatttttatttttctggggtaggtgaagacacccttttgtttgattctaagggtttatgctaaggggttactctttatgcatttcaaattgaagtcaagatgtaatgatcgtacatcatctggaggtgtaataaaattcttatgtgattcatcggatatactgaagaatttatcgtgtttactttgttctttaggaagttactttcatgttgggtgccaaaatagttgtgcatcctcgagtgacgattttaaggatgccatttgtctgctatgttcaccatgtatttctcacaatgaggcccgtacaaggtggaatcataaagatggaaaggcttaccttatgtcatacttaactgcattgaagtacatatgcctgccgcttgcagaattagtaaattcagaaaaaaaagagataataattggaagcgaggctgctgctgtttctagccaactttctgacatacaggtggtgcttgatcagttttgtgatgttttcacttttagtaaaaggtaatctcacagtagtatttcagtgtacttgattcaaccctttggaacatattacatttgcaaggaattttactatctgaattctatgtgttttcattttctgatttgtttctatttatatatttttatgtgtggatattatcgtgaaaattgcatgttgttttcctcgattacaaatttggattttcttttttcttcttggagaatagctgtactgtgttttcttttgttagaaacttccccttatttgaacattttttcactttctattgccaagttgtctgtattagtgaagcctttgatagattattctcatgagattagtttggtgcagcctatctcaatgattgttactgaaaaagaacacattttccctttctaaactatgtcttttatgagactctaatatgctgttctctaggtgtaaatgtacttatgaaggagagatagatggatgtgatgaaagcagcattctaagtatagccgtagcattgtttattgtctccatcagaacaagtcttaatacacaggttggtaacttggtatgtaaaattttgtatgaaatcttcaaacttttgtacgacactaacattttatggttcactgatttgaattcttcttatttcagaagagtgtgcacgtacttaaagatgtgatttctagtgaatggattcaatctcaagggttaaaatatctctatggttctctttacaatactggtgtaattctctacaggaacaagcaacttaaagaggtaggtcattgatataatttagaattatttatgattcaagctgtgtaaggtttaacttgtttttttttttcatgtgcttaactgattctaatgcttttgctaactgcaagttcaagtattgtttattacgtatgattctatagtgcttgaccacctttttttttttgttttcaaagatactatttaatgtacgatttgcaagaccttattgtttggctgtcctcgtttattatttgtttacataaagttatgtttttgctacattgcacactgcgatgctcttgcctttatctggatcacagtgaagacagttctgcaaatataatgatgggcatatctttagaaactttgttttcctttatgcccccattttcgtcctttgggtgtatcttactctttttggaatattatcagtttctgctatgcaaatctggttctcttggtcaagccattctatttaactaaggataggttctatagttaagataatggtggtggtgtgaatgagtgattaattctgtgtaatttacattttggtaactctattggtactttaacagtacactgtttgataaggactctacactattcatctactgtgcagccaaagaattattattattctttttaatgatagttttgtactcaatgtgcattctaattattttttttccatttacatctgtaggcttcaaaggcattgaagttaagttctacatcatcatggacttgtgctttacatctttgtgacacagctttacggaaaccagaggagtccaattcttcagaagattctattatcaattttgttaatgattcatgtgcaaaaactgcttttcttttggaggttctccatcaatgtgacagtgataagacgaaaaggataattgcagacagcctagaaaattggtcagttgctgcaaacctattcagcaagcttccaggtcccatgcctttggtgaaacaatgggtgaaggtaatttatattaaaaaattgatgggttttttatgattttcttgttcttgttcatgtcagctcattgctattatcattccagaatgaatgcaaaagacataaaaatgatgatgttgaagatgctgcatcaaccttgtaccatgttttgtcatcttcaaaaaaagtgtcaaagagagcaatgggagtcatcttggagcaggttagttttgtatgttatatattttgatactctctctttctctgtcttattttttttaattatttttctcattttttttatgaaatcatgtttagtgtatttcaatgtttctatattattttgttcttataatcaagagggttagttcaagtagttaggcttgtggtgtgctattataaagtttgagattcaagtccccattgggaacctatgttgtaattactataatttcattctcctcaattattgtaacatccaaattttgggctcaataagtgagtttggggagtttctctatacttcttttttgaaactaggatccccgcctaaccctacaatatttggaggcctaaaaactatagcaattactatgtaggtacccaacagggagatgaacctcaaaccttgtggcaccacatgcctgaccatttaaactgagggggggtagtttccctgtgtgaaaaataaattgttatggtcccttagacattgactgataccgatatcattttcctctctaaatattaggaacttcttgcctatgaacaagtgactgctctccatcctgagctgtgtcagagaatgcaaaagaaaattacagcttatctcttggaagaattgtgtgttacttcagaaaattggttacaaagatcaaggattttaatgataaagggaagatcattacggctcaatggaatccaatgtttgaaggattgtattcaatgcttgtcagaagcaatatcattgcttgtaagataactacctttcaccctggctgtgattcaattgtcttatctgaccaactttaacatggtaaataaattttcttttgtaagttcgatttttgactgacatgaattactactgaagcagaaagtgatgtctggtgaaaaaagtagctatggaattgaaccttaccatcaattagctgtggcacattgccttcgggcgttctgcactcaggaggcagaaccaaattcaaaggtgtgaatgcaagaaagccagattccaagaattgagtttttttctctcttatgtaataagatttttgagagtaggaattatgttatactaaatgtttgcttcgttttttcttataagcagcaagtcctggaagatatcagaatggcaattaatttatggttgaacattattactccagattgtttctctgctgaagaaaagtgctttagagcttctgaaaatattattattttcctgtatagtattcttgatttgttatcagttaaggttagtgggttgattgttttgattatgtgtgtgtgttttaattttctcctttactttttggaacatagaataatatgtttatcttaatttgtttactgaacatcaccatgccccttttctttattttttttttataatattctagggttgcatggactaccactatgatatatataagttgatgatcagattgttttatgggaaaggggttccactggagaaggtcttggctgtactgtgggaaggtaggaggacgagacacagtctctgcatttcaccggttaatgaggcgttcttaatgagcttagcagaacactatgctgaagatagcaagtctacagatttttggataaagtgtttgaaaggctcccaacccttgctagctggatttcaacatagtttctcttgtctttctgcaaactttcctacagagtcccctgaacatgagagttctttttgctcagatatcagtgaggatgaagttaaaaaagttgcttttgagctcatttcaagtgtaaggtcctctcaactcattagttcttatctttaattgaagtactctttagtctttttaaaatactatctattgtgctttctacaggttccttcttccagttctgtttttatggctagctaccttttctatgatttgagtgaaaagtatatttcagatgggcatattacaaaggtaacatggacacttattttcgttaacatttgtttgtcatttctgttttagcagaagtatggatttctctttcaatgttcaatgttcgttgtgcatttatcttcattgatcttgtgctccccaggctcttttttatgcaaaacatgctcaccagttacgcaataaattatttgaagagaaatttaagttctgtgtgaaacatcatactgaaaagtccaatgaaactggggatgttgctcaaaagttttcctacagcattcaagatctgcaggtgcgcagatcagttgctaatgacttttggtcctttgattctatatcatgggacctggaaagctgctatcttagtccatggactgtacttcagtgttaccttgaaagcacacttcaggtttgtccttaaataccctgaaatttataattcaatgcaatcaccatttatttttcattcacacttatcctctcttgtgtggtacccttatcttccttttgtaatacctttttcccatcataaagttttctttttcagtgatgggaaaaagatgataaagtatgatgggaaaaaggtattactatgagctatatttcattagaagtactttaataattgaccatacattttaactctaggttggtatcgctcatgaacttatgggcaatggatctgaagctgaaagtctttttatttggggaaaaagaatatcctgtgcacaaaacttgtcactatttatggttgctttctcttctgttttgggtatgaaataagtttgtcttattctaaatgttatttctttatcccttgctatgataaacaaacatgataatcaactaatttgagtttcggctcaggtaagctatactgtaagaagcaaatttgggatttggcagaaagagaactaaaaggtgccaagcaatgctttgatgatagacgctcagaaatttcttgcttaaaatgcagattgatgctgaaggtaactattgatcagcatcttggtgacttatcccaaagcactatggttgattcaagtgggaaattatctatgaagagttcctttcatgctgagactttgtataaatcagctattgatctgctaaatctttctgattgggatagctctgctagtttacctaatgaagctagtgctgggaacagtgtgcttcaacttgaaaaaggcgttgattacaatgttagcaatacctctgctcatactgaagaagcgcaattggatataaataaaccctctagaaagggggcaaaagtaaaaaa

SEQ ID NO: 15422 - DNA, 6717 bp, Cannabis sativa
tcttaaatatgaaaaaatgctataaaaaaatgacaaacttataaatactatatttttgtaacttttttttataaaatctcatatttcatgtaattttcactattgtgcatgccttacctcaagcccacaaaaatatgggtccttgtatattaatgttggctctaagatcagataacgagagtcaaatattgaggaggaaattacactttataccctttttatattgttcacttttatttttacttttttttttaaagtttattatttttactttttttttaaaatattttaccaattttgtctctatcacttcaagctacttctcttatatcaaagtattttaggtacaatacatatacatataaaaaaagatttgttttaattaaatataaaattagagataaatttaattaattgattaataaaaggtatttttcaatttactctaatattgagtgagtgagtcactggtcagaactctacaaactccttccaatgaaaataaatcacctcgtggctcgtgtacgtgtagcttttcttccttcgtgctaaatccccaatatacccttggctctggctcaaatttttaactcttaacaacgaccgaaacgaacgattccaacaactccctcaatgttaatagcatgaagcaatggactcggttgtcccaactctgcctccaccctccaatctctcttcctatatcgtatccttcttaaacgacaatcttcacaccagagaaactctgactttagctcccaatctcgtttcacagctccaatctaactgctccgatttggatcaaagcataattgacctcaatcggagcctcggagccaccttggttgcttacgcttccttctccgatcaaattcatggcctcttgagtgacattaatggccaattgatcgatcttggatctttcactcgctctcatggatatgtcgagccaggtattgctgaattgttgtgattttgatgaaattcggtaggttatcatggctgttttgtgggattgtactgctgatgtatataattacatacaatatatttatatttatacaattacagatggggagagtggagagggaaaagggagaacggagaagatattgggggaggagttgccggcattggcgaaggaagtggcgagagtcgagactgttcggctgtatgctggtgagtttcttttttagttttagagtatgagaaatgactataattgataatgggaacagctatggttgccatgtttagaaatgggaatggagaagccctgtgctttacttctggtttttgatctttgtatgccctcttttgtgcttgttcgaatgcatttttttgccctttaatctcgggaaattgatgttgctctcttgtttcaaaacggaggacaaaaactttgttttgttgcaatatctacaacatatacaaatttgatattttgtttgggtttcaatcgaatgctctgttgctgaaataaaattgccttactttcccttattgcttcattttttatagtattattactagagtttctacatacaccgtaatgtgagctctgtgtgtgtgtctttcttgccttgtttttcttcccgtcttacatcttgcaattaattgaatgttagatgaacactaggatcgtttaactttcttacttgtagtagttttatctctattggagtagttgcgtgtactgtgtacatgcttgaaaattggaagtacaaagtatgggacaattgttcccccaaagctatggtgttaatgttggtgacgaacaataaatcactgattattgattttatttttcatttatagacaactaagctttcttacacacgcatggttttattcatcaagcctatagatactactaatgttaaatttgttacacatttgtgtcctgttatatgataacatagtacaaattcaacaaactgggatgaaggtaaaatgaaaaaacatacagtaaggttacccttcctttacttggggatgaaaaaataatgaggttgagtgtcaattatgaagagaggtaatattttcattatcttgataacattccaatagcagattttgctatatgatagtgtagggtaattggagataattatataagcacaacacaagtggaagggattgcatgatttgtgctggaagaaaaatactgaacatgcccaaagactagcagattttggtcatctaggattgtacacaaaagaagaaaaagtcctcgattgggttgtagacaaatgacagaaaacataaaggcatattgtctttgggaaatggcacgttaagcctccctgaataatatttgggtaaatttttcttgtcactgggatatggatctgtttttttttttttgaacaaaacagaataattttattcaaacagaactttttacaaacagaacaagactgaagccgaagcagcagcccacacgacttcaccagctactaacaacattcaacacatatctatcacctgttttaaagcttttacaagtaacacccaataccctatacttaaccaacttttttatctttctactaatcacaacagtagaaaaacaaacaaggtcaaacacacaactatttctatttttccaaatccaatacagcaccgcagcaataacagcatttgtaacttgatgcttcaaatcaaaagaggtgttcatactccatctttgtaattcatggatgtctctcggccagctatgaaccccaaaccagctgctaatatctacaagcagcctcttagtgtaacagcagtccataaagaggtgataatgagtttcaatttcttgctcacaaaccgggcagaggttagaaagaataggcaaaattttctccattttgtccctagtaagtagttgacaagtacatacctgccagtagaaaagtccatgcttaggaacaagaagcctatgacaaactgttttgccatacacagccacctggttgtcaataagagaggcatagaacagatttgcccgaaacttcccttgcctaacaaagtgcattagtttagtctcatctagccgagatgttcttcctgttatagctctgctaaagatcttggaatatgagaatgttttgagctaaaagtctgcttttcacaaaagctccttgattgctgtgaaccaggaacgacataacttctaaaagtcttgaacaaagcatcttcgagatgcacttgtacaatgtgttgcagcacgctataggtctgaagtcaatagccactttcggattctcaactttaggaattaaggaaatcattgtttcattaagagagttacgcaacttcctattttgaaaaaaaatccaaaatggcattagaaacatcatctccaatatgatcccataatcccttgaagaagccaaatccaaatccatctaacccagagctcttggttgtatggatactaaacaaagcctttttcacatttttctttatggaaaggtctgaaaagattaatttgatggtcaagattcagaatattgccatactgaatacaccccaagttgatctttgtttttgtcgtgcttttacttcccataaagcttttaaaatgagtaagaaaatgatccactactttcacataatcatcttcaacatagtcatccacagtaaaagaagtgaatctattctctaatctcctctttcccacactagcataaaaatagctcgagttctcatcattgcaattcacccaagtaattttgctgtgttgttgaagacaactaatataacacggcagcaagttcgagtaaattacctgattctgcttctcttgctgctgtaaaacaacatcagtaggatcccttgcaagagcctcttgagctttaataaactcctccttggccaacctgaaatctctaccaatatctcccacattttctttgctgaacttccgcaaagtatgctttattcgaagaagttttatattaacagcagtaaggccctccctaccagtatctgacttccaaacatccatcacagcttctgtacaaccctgatataacatccagtgattacaatacctaaaaggtttgtatcccactttacctatatcatggctcttgataatacaaaagctgtgatctgaaatactatcccatttaaagagagcttcaatttttggggaaggagttgtgccaactgttgtttgtaaacactcgatccaactttgaaaaaattctgtctccaacttcatgcttgttggaccatgtataatgggctcctgagcacttaaattcttcaacttgtgcaaacgaaagacaattttgagcatctccaatatctttagtagtgataggtttccccccagttcgatcatttaaattgaacatggcattgaagtcgccaaaaataatccaaggatccatgatctaacctaaattcttcaatttactccaaaggtctttcctttccatcatcgtattaaatccatagactacagttgcatagaaagcatcctgcgactttaactctgctgtgaatcaactacggatcctccattagaacagtaaacttactttgccaaaaaagcagcagtctgcccgaaaccgtctcactaggaaacatctcccaattagggaaattactttcagtgcttccagccactttattatgcttcaacttggtctcaaagagagcaccaaaccccaccttattctctctgcacacttctaggatagctttttgcttatccttcttattaattcccctaacattccatcccaaaatattacaatcttccataatcatttgggataggattagtaatcaaagtcccttcattagcttcctgtaaaatagtaaagccattactcatctttgctgcctgggacactaaaacaagttgtttggaacctttcctttttcggggtcacccaattgttctcagttgccacaacaggtagagaagttgttccattcactgtctgcaactcagggtcagtacccttcatttcttctttgttctcagccaactccttactcaaattcccaaccaaactttgttcaattttttcctccattgtatcagcagctatgcttgcaatttatactccaacacataatgcaatcacaaattcataattgaaacgtggagatgagacatatgaaagggtagttaagcatatatatatatttgcatcattccgaacaagtgaactgatgcaatgtgtcagactttagatcagtttggtttcaaatttgtacaagataattgctaaaattttatctttgaggctttgacaagttctggaggatacagttttagaagctctggtgcatttgttgcagggaaacagatcttagtggtctttgttactggtgaagcagtggaagaatatagagattttgggaagaatggatatcacaatgttgagtggagctttgtagatttatttttgaaaagaaaggtcttggtgcaaaatggtgaagctggataccaggttgtacttactctgtatcttttccaatgttttattaatgggagggccaatgtaagatgttgaaggtacgagggacttagacaaggtgacccttgatcaccatcctatttactggagggtgtaagaatgatgagtagagttataaagaatgatttgtataagggttcaaaagtgggtagggatacttgtctctttttgacctgtcgtctgcagatgacatcgtattttttgaggtattttgcatggttcgggggttgagaataaatattgtaaggttacggggatcttagtttccaaaaaaaaaaaaaaaatgaaaatgatagtggttgcaaagttggagtggttaattttttttttgaaaagggaatagacccacatattgagggatcttcccgatattattaatgagcctcacttatggcggaggaaaaccatgattacaattaccatcagacaaaacctaaaacagaatcattctcgacagtttatacaatagttttccattctctgcttaagtctaaaaaggacaaattctcaaaatgttttgttttaaagacccaagtagctgtccaaaatttaactgtctcccacacattcgcttctggtttagcaaccccttcaaaaatgctaccatttctttcaagccacacagcccaaattgttgctaaggtcacagttttccaaagctttgttctgcgtttgctgccaattaacttggaagctatcatttgtggtacggaccttggcataacccacgccaattcaaactcctctaacacatgtctccataagcaccgaataaaattacaatccagaaacaaatgttccacatcttctccactgcctttacaacaaacacaccagccaggggatatatacaggaaaggcttccttttttgcaccttgtcatggacactcactttgtctaaggcgactagccacccaaatactttaacttttgatggcacacagcttttccatagagtctttgtccaagccaggtcctcagttgatgggtttgatgtcaaccaagagaaggctgatttacaagaaaatactcccgatgggtccggtttccaaattcgactatcatccgaaatactcaacactcttacatgttccaccttttgcattaatgatataaggcttgacatctctctatccattaagttccttctaaactagaaattccagttctccacccatccacctggtgactctccattcactatcatttcttttataggagcat

SEQ ID NO: 15423 - DNA, 2321 bp, Cannabis sativa
aatggaaaaggaccccccccgtcgagccatgcctcagaatttgggactgtggggcccaagatggcaccacaaggcccctcccttgggttcgctccaaaaacccattaggtaagaaatcaaacgacgattcgttttgggcagtcccgttaaaataagtggcgtttgcgactttgtcgttgggccttctaaccacccacatgaatctttgctcactcatctctaatccaaaagctaactcattaatctgctccgaagagagggacccaccactaccaaacgaaacgaataaaacgctgccatgtggctgcttgtctagccacgtcagacaattagactcgtcagccttcgttgacggttcaatgttgaccaacggtccaactgggtaaaccggtggcttacctggctcgctcttcgtcaaatacgaaacggctccggtctccaattccaagaacgaattcaccataatcccgtcagctaaacgataccgttttgcgttgtgaagtgtccatttgtaagcgtcgtttgttctatcctgaactgggtcaagcaattccttgcccgggataggaatacaacccgggattctgaccggctcgggcagctctctgaactcacacgacaccgtttcgtcgagaatcggcaagtggagaaagagagacaagagcatggctgtagacgggaaaaaaatatacgacaacatgttgaactctcgtgcgacatcaaaagcgtcggtgccgaaaaggtcgacgacaagagcgctgaccgagccgaaacgcgagaacattgacttgatgatgtttctaagggcagggagagaacgtgccactgtgagagtgatgatggtttcgacctttgtgtcttctgggaggtcgtcgaagttaaccggcggaaggaacacgtggtcaatttcctccggtaaggcgctcagaacggacttctgggtctttgaaggtacggggccatcggtcgaaaccacgaacgtgatggtgaaatcatgagctctgactaaacgcttggcgaattcgacgagagggatgaggtggcccatccctggagatggaagaattgccaggtggggtttctgatgagcttgaggttgttcagccatggtgaattgatgatcaattaagctgtttttcagtttttgtagtactcgtatgtaagtataagaaagagggagataatagagaaggctatacgggacttaatttttgtttgatttataggttcaatgtttcacttctagaattgggctttatttttaattattaaaattagtagccaatttttgaataatacaaaagaatggagaaaagttctagagagaatttttttttttttaaaaaaaaaaaatgggtaattttatgaaaattgaaaagtattggaattttcacatgtagcaaatctaaactgggcgttaaaaatctctcaaaaattattgagatagttaaatttaaggatttttatcgtaaggaatttctaaaagttcaggggaatgatttgaaaaatattaaaattcgaggagcgtgatttggtaaatattaaagtatgagaaacatgatttactacgtaaacaattattaaatttgtaaaattgaataaaattagataaagatccttaaattcgataatttcaatagttcaaagaaatttttaacactaaaaaaagttcagaaatatgatttagtatatgtgaaaatttcaaaaataaaaatcataattaacttaatttattaataattttttataaattaaaataaataataatcacactctttatgaattctattttatgaatagcaaggatgatgtgtcagagtcatataagtgcaagagagcatcatcacatgttgtaggggagagagagagagagatgatgtcaattcaaacgtaaggcttatgttatcataagatattagccactaccttattatagatggttgggttccacttccacagctaaaggaccatgtattattattaatggtgaaaaaattactttataggatgttaattatagaatcatcatgagtagaggacgggatatatataaagttatgttaatagaatcatttctccaatcatggtggtatatgtttaatataaatttttatagaactcaccaccactcttatctttttccttatttgtctacttatatccgacctctctttaggtgcaaaggttaaatcaacaaaaaaaaaaattactacaaaatggttgaacttaatttttttttttttttttttttggtttttttaacaaaaaagaagaagctttttagaaagatgtaagagactaaagaagggctcttatgggtt

SEQ ID NO: 15424 - DNA, 6413 bp, Cannabis sativa
  modified_base (6327)..(6332): a, c, t, g, unknown or other
taaaataatttccaacactcgaggtgtagtacaagttttatctcggccagatccaaggtcatgtgtacggaagatcatttgggaactcaaaaaggggtggagatactatcttccttccgattggacgtatatagtctatccagacattgctcataccttgcccaaagatcgtccatgttcactgttgtaggtaaacctgttgccacgtttattgtgactattgctaagcacaccaacaatgttcgcatagaatgatggcttgaaccaagaaaactatgcaaaagttttcattgtctgacccacacattgcccgtcttgctaatctataaaatgctaaataggcccggcctgccagtgaagaggaaaacacagctggggacgctgaagtccatgagaaggaggaccaagacaaggtctgtcctgttactcctcctgaggctgaaggagatgaggaaggtgcagctcaggcactgcaatttggtggtttcaataaagaaggaaaacctatgtctgaggcgggagaggttcttgaggtcagtgaagactacgttactaaagagtacaccgaggtcattcttctaaggaggtaaggtgcactaagagatcggtgggtctctcctccatacaaggtaataattgcaaagatgaagaattcgctcaaccgtggttacttaagaagtgtcgaatgcttccttccctctcctaaccagtttgcgactaccccaggagaaggttattgcgcttggtcgggcattcatacgaagcaaggtgctatgttacccttccttccaaggtcatcaaatacttgtttgcactattcattctctctgcctcacaaggatggggtgagccgtccccggatgataccaattggctctttgatttgaagtcaagtcccaagcagaatagatcgggatatttatatttttctcatttcaaggagaaattgttgacaagcaccacagacaccgaggtaattaagacagggtactttgtgagcgagtatactttgtcaagggaatgggcactatccacactagtttccagcagatactatcttattgtcgccctccattaacttttgaacttaagaatagggcacaatagattctttaactaccttctactgcactaaacatctccctcttgacttctgaggccaactttgtcaagtataaactttttctaacctattttgtacaaaaggctatgaagaaggaaaaaaaaaggcagagcccgaacaagagatcctaccagaacaggatgctccgagcaaaaagaggatgaaggcccatccaagtagccaagcgccagttgaatgatttatcaggatcagggaggagacaaaaagacctgctccacgattcacctagttgaagggtagggcaaagacattctaatggagcaggagccagaagactcttcagatgacgagcctccttctttacttatttgggagaatgctcctgcctgtgtgtagggtatctttactcatctaattttcatctgccttgtcttatatcaaacttgtttctaaccttcaagtatttttcatatgcacctatgtctcagaagttattttaggctctgaagaagaggtcaggtgacagcttcgcccaaacccctttacccaaacgaccaaagggtaataaggtactgccctaggagacaccacccaaggagacaagtccggtcgagtcacttatcgacctttctatagaggtggtgcccgaggtggacccaccaaccaagaaggcctccaagtgtaaaggtgcaaagggaggtagttcagacgggtctggttcggccatgcccccaagcacttttatcatgctgaacactaagactaagaagggcaaggagatgctttagcactactatgactagttacttcctaaggtgaatgatcatctggtcggagctgatgagatgttcgtggagcttctgatgggcgggctcttgaaggaggaaactcgagtaagtattttttttattttgtttttatcttgcctttttttcgtgcaggtgttaactttttcctgtgcaactcaacatgaagatggattacacctactcccgaaccaaatccagtgctcttaaaaacatcaccaccaccacgaatttgcagacggaggtggatttggccaagaaagaggttgaggaggtaagggttgagctggatgaggtgaacaaaaaacttctagccaccaacaattgagtcgaggagctgacaaaggagatctaggagatgccatctaccacccaacttgaggaggacgtcgaggctctgtcaaaagagatcaatggtctgaaggacaagaggtagggtttcctaactgttcttgccactttaaccaaggataagtcaactttggaagaggacatcaaatctaggcaggcaaaggaggaggcgcttttgaataaggttgagagtttggaatctgccgctttgtaagttttctatgaattctagaaggccaacacaaaagtaaactttgattacctcgatgataccaaagaggcatatcttagttactgtgcgggtcagtcggcgaaagaaaaccctgaagcagccaattccacactctcgaccaataagaacacaaagactccgacctccaatgactaagtcaatctgtacaaagaacctgggactcctgcggtgtaaaacctcttttttttttttttcttttttgttcggcccatgggcctttgttaaatataatatgaccgaccaagttgtgtttaaacttggtaatacttcagtttttctctaagatgactagctgaccaggcagcctttaatctcggaattatatcatgctttgtcatctttaaatgaatattttaccttgttttaataattgttcgtgcaaactagtatgtttttttgagcttgttatttaccgatactttgtacgggtatagttaccccctaagtgaccgagcagacttatgactcttggtcacttgcatttcactagtttaatttctgtatgtctggcttttgggttagagcaaacattttgtatgcattatgacggtaaattcataacttgctataaaagtaattgacacaattagaatgataattaatctttattcattcattgatcaaaataattttgtcaccgtagtatctttcatttatgaaagctattacatgatctaacttatctttagctaatttaaaaataaaacaatggcacttttaaaattgtattttaaaggtggccatccgatctgagtactagtcattttatcaaaacctttgagcgggatcgcctacaaggccatctacttaaaagtaaatgttcttgcattgtgtacttaaagttgtcatccgacattgtacacttactggtagtattcccttaaatgtcccccattcaaatacctttgtactagaatgagctccatatttttgttatactgtcccaacttctgtgctccagagtctgtcacttaagccacctggtccttcccagttagctccaagcacgctagtcgcactatcttttgtattcaacaatactcttctgaggaccatatctcccacaaaaaatatccttgcactcacttgcttgttgacgtatcgagcaacctttttttgatgtgctgctaactttaggtttgctaaggcttgtttttcttcaatctcgtcaagtgattcgactaagagagcgtgattagcttcttgatcgtagatcagtcttctgtgggacagaggttctaattccatgggcagcatagcttcataaccataggcaatagcaaatggtgtttgttcagttgctgtgtttctctgttgttcgatatgaccacagtacttttagtcgttccttcagccagtttcctttagctgcttcaagttgttttttcattgtgtctttgagtgtcttgttgactgccttgacctgaccatttgattgagggtttaccactgcggagaaactttttatgattccatgagtgatacagtaatctgtaaacaattggctgtccaactatttgccattgtttgaaaaaaaaatttgcggtagtccataccgacatattattcaccacaaatttaaatacttttttatatgtgattgttgctaaaggctcagcttctgtccactttgttaaatactcaactgcgaccactgcatactgtactctgcccttgcccttgggcaattgtccgatcaggtctattccccaaatggaaaaatgccaaggactttgaatctaaattagctcgttgggcggtgcatagggcataattaaaaatctctagcatttgtcacatttctttacataggcctttgaatcttccatcatggtcccccagaaatatcctttccttagtattttctttaataggctttgtcctgctgcgtggttaccacaaattccgtcatgtacttcagacatgagttgtgcaacttcatcttttgttacacatctaagtaatggcacggagaaacctctttcatacatcccaccttctagtatgatgtaccgtgcagctttactcatcgttctcagagctttgtttttgtcatttggaagttctctagtattgaggtaggctattacgggtgtcacctagtttgctgctttgtgtatcattttgatttcttctacaaaattgatactaggttcttctaagaattggatagggactacgttagccttatctgttactgtgttacgcgcaagtcgagctaaagcgtcagcagttatgtgttcttctcttggaatctgcctgagggtgtaaccttgaattttccgagcaggtattgtatcttccttagataggccatcattttctctcttcacgcctcgtactctcctgaaacatgattcataatcaactacgaatcactacgacctcaatgtattcggcacgtacctcccaagaaagttttagtccagcaatgagggcctcacattctactttgttgttggaggcctttaacctaaatttgactaatccgttcaagcgttgccccccaggcgtgacaagggcaattcctgcaccaaaaagtttgtctttggctaacccgtccacgtgcaatttccaggtagttcgatcttcggtgttttctaccaagggttcttgtactggccctgggttctcccttatgttgctttcttctttcggtgtgcactcaactacgaagtctgctaaggcttgtctcttaacagctgttagggattgaaagatagtttcgtattgacccaactctattgcccatttgagtaaccaccgagaggcgttaggtttttgtagtacttagcgtaatggttggtcagtgtatacccgaacatggtgagcctggaaataaggccttaacttccttgtttctaagattatgctataagtgagcttctcaattaagggatattgtccttatgcttcaacaagtctttttctaatttagtagactagatgctagacgttgttctcttctcttatcagcacggtgcttacaacatattctgtgacaactaagtatactcctaatacttcttcgtctaggggttttgagagtacgggaggttttgcaagttttctttttatttctggaaagcgttctcgcattcctccgtgcattcaaactttttgttacatagaaggattttgaagaaaggtacacacttgtttgttgacttcgaaacgaatctaatgaatgtggctattagaccagtaaagctttggacttattttgtctttgctggagatttcatatgcaggagggcttgtattttctctggattagcttctataccccgaccattgacaataaaaccaacaaacttactcaagctgaccccaaaggaacattttaagggattgagttttatgttgtattttctgaggattttgaagcattcatctagatcttctatgtgcccccaaacctttttggatttgacgaacatatcatccacatgtacctccatatttcgtctgatttgatttttaaacattttatttaccagtctctggtaagtagatctagcgttcttcagacccaacgacataaccttataacaatacagacccatatatgttcaaaaacttgtatgttcttggtttggtggatgcattttgatttcattatacatcagataggcgaccatgaagctcaggatttcatgctcgactatcgcatccacaagctcatcgattatttgaagtggaaaccagtatttggggcatgccttgttgaggtcggcgaaatcaatacatactcgccatttttggttaggcttggatactagtacggggttagctaccaaagctgggtacaaagctgttgggttttatgcccnnnnnnaaactctatttcaatgtaatctcaatcatttaaatatcaataaagaaacataattactttcatcacttatttattgtgtca

SEQ ID NO: 15425 - DNA, 13441 bp, Cannabis sativa
aaaaaaaaaaaaaagaaaaggaagaaaaggaaaaaaaaaagagaacttttattatctattttccatgcatatatgtcaaagcaataactgttgcttattatctatttgtcttgatgattttacgtagtatattgatttgtgatgatgcctcgcattctccatctctctatgatgtttttggaaagtgcacatgtgatgtttgtttaatttgcttctcacagatggatgcagatgatgatgttgttgtgatggtgcaaaaacatattgtcgtggactaccaagagcagaaggtatatgtttcttggttattcagaagtatattgttcatgtttttgtcagtttgttctataccccattctgtatttgttgtttttcattttaatgcttgagaattggtttcagggacatgagcttgtattacacatcttgtatcatctctattcactcacaaccctagattcagttggaaacacctcttatcctgctgccgtgtatgaaaaatttctcttggcagtggtgggaacttttatctctttcgacttcataattacttatgtctctcagatttaccatatatttatgaaaatatacacattttcaaattcatgtaggagagttacctctttgttctttctattaatgcaggccacatctttgctcgattcatttccagcttcagacaaatcttttagcaaactactcggtgaagttccagttttgcctgattctgcattgaaactactaggtgatctctgctacgctgatgttactgaccaacatggaaaagatattcgtgatgtggaacgtgttacgcagggccttggtgccgtctggagtttgattttgggacgccccctgtataggcaagcttgcttagatattgctttaaaggtaccatggactgagcatgttatctctgttgacaagagctttactacctgcaggcgtcttttatcttttcttgatatctatccgatctgtatgcctgtgactttgttattcttgttcaatattcacgttttgagtcatcccacatcaatgttcaaactattgtttgtttttctcaattttgtattattctattcgttaactttaagatgttttctttctgtagtgtgctgttcatttacaagatgaaattcgtgcaaaagctattcgcctggtatggaaattgattatgacgtcttgctaactgtggttgctttttcaagcagtttggctgggtttttctttcataaataaaagtttatttcgatcttgttttcactcttaaagaatctcagctcttgttatttaatagtttttctggtttttgggataggtggccaacaaactctatcagttgagttatgtagtggaaaatattgagcagtttgcaactagcctgttgcactcagcagtggataaccatgcttcagatttagagcatctgcaatctgggtccactgtacatagagctacagggatggtactgttttcagtttattttttcataagagtcttaccttttatgtggcaattagaattcaaaataggaaagaagattttgatatctcttgcgacggtatgcattttaagtctagtgcatttcacccaagaaagaaaaatgtgattgtcacatatgtttgctgcatgtgcatggaccattgggtttaatcttgcatcatgctgtttctatattatgatctgttattgttatgaaatctatggttgttcagtctagtgcatttcaccacaaaaaaaatgtgattgtcgtatatgcgtgctgcatgcatgggccattgggtttatcttgcaccagctgtttttgtattatgatattttattgctatgaaatttgcacatcggtttggcattgaaggcacaatatcatcgagtcactttctggaaattcaaacaccatattttagcttcccatattttgctccggtcaaacttctacttggtaataaactgcactgcatgtaatattttatttgtttcttaatcgattttcggggttctaggttggaagccaagatacatcagttagtgattctcaaatttcagattctggaaattctgagattgattccacaagggagggtcagcgtgtagcacatagcacaacaacaatttctattctggatgctcagcgactcgtttctctcttctttgctttatgctctaaggtttgagtatattttctttttgaccatctgtgttctctctttctgttttgcataacagtaacatggcttccctctacatgcagaaaccaaatcttcttcaacttgtttttaacatttatgaacgagcgccaaaaattgtaaagcaggtatctctctcatgataggtgttttaccactgtaataaaagtacgtatgggcatccatgacattagacatttagaaccactcagtacaaaaaattgacattatcatgctatttcctcattctgccaaacaaattgatgttgtgatactatttcccatattttttacacgacctttgtattgtctgaaaaatgggaacacttaatccgagaaactataatgttgcaatggagcctttgcaatctggctttttgagcaacatattttacattgttttctctcctatttttttttttttttttgagtgttttgtgagtttttgcatgggtcaatgttttccatggtcaccatgaacttgggccgttgggctatgacctggttatagttcgaaaaaagcccataatcttactggttatgggcgcttaagccaagagggatgtctagagtgatagaaacttgtgctaacttattctatttctaaggaggacgatgactttgatgacttggaaactctacagagattctcttctctaaaatcacaaacacaaaactaaatgaatctcgctaaatgctaaggccactatttgtagtctatggctaataataacccgccgtccattggatacaaggaaatttacaaggcaatatatttattaaaatgatagatagccaagtcttaaaagtaaggcctgatctccacaagatatgtgaagactggagaacaattaaaaaatattttcacaaaaactttgaatggggtgcaggttgattatgtttgtaacaagctaggtatgattaacatttatgcttcagcttgagggggagtgttagaatatatatattttacatagtttccaatttcctcctggtttcctatttagtctccctagtcttgtatatacatacttagctattttattgaataaaatataattccattcactattttctaccgtgcacaattggattcgttggagtactacaaggttttgctcctaatttttttgtgtcagttagcaaattaagtacatacatcctttgaaatagaaaaatgtcttatttacttcgagtgacttcaactcccaagacatacttgagcacccctaaatcatttgtgtgtaattgagtataaataaaagatttaagggatgagatttctctagtattaaatgatactaacagttgatattttatagaacacaaaatggtatcattttgttagttgtgtatgtggatgacatcgttaataaagaaagaacacccaaacactaagtgagaaatactaaaccacaaacggaaaagaactatggaaataaacgacaagagatggttgaacaaggagcagaagtgaactgttgccgtattcacggtccctcgtgcctacatgtaccgacgcgtggggaaggataccacgactaggggcggcgcaagcctcgcgcgcgatgtttctggtggccagactcatgggttttgacgattgatggctgggcagtcctcgtgtggacggtgagaactaaaacacacttcaaatagggtttccgaaaaagaacctaaaataaagaaagaaccaaacttcaaacacaaaccctaattttggaatcaacctaaatttcgaattctcaaccgtaatcaaattgcacgataccatgttgaaaatggtcaatcaattgcatatattattcaataaaataacatgtatttatatacaaaactagcagagaaataggaaactaagtaattacagttagttcctaatttcttagctaatccataactaatagacaactaatatatcctagcagcttctactccctcactagaaattttatggctgaggtatgcaattgtttgtccatactccaacatttttttattggagtgtagttgatgttgtaggacattataaagatgctctttttgggctaattcatgtataatatgaactggaatatcaggaacaaagataagaataaattttcttaaataagggtcaaaatgttgtttattatgggctgaaaagtggcaggggcgttggtgagtgtcgtaatgtgtcctaaaagcactatcttgtgacatctgaccttaactcgaatatggtatcaatgatgtgtgtaggaaatttatccagaaaggttactttaatgctcagttgtccacgcaaaatcacccggagacatttattttatacccaaaaaaaacgtggttagagtattgactctggctgacttttgtgatgccttttgtgatgcctccttgcagcatttgttggaccaagctcaatttcattttttggagtggttacacgtgtcccgtgagcattattgtgtgctttcactcctagggagtaggccttcgggtagtaaaatgtagttaaaagcttgcaacactctcttaaaagttctggttctgtggcgggtgagttataaacagaagagttcgaaagggtcaaatctttgatgatttcatcgtacatgattgaaatgcgacaaattttggataggtattctacatctaaactgaattcttttaggttaaaaaatacatgtttagttgctcgagaatagttatgagattttctagaagaaataggggttctgcttctagtgacaacatgctatattggggggtgttatgtgggactgcaccccatatatgttatcaaatcactatgttctaagaagaaatatttgaatatcaatctcatcgatttcataagtatgatatcatcactattcttttaggaccataaataaatctaaggactagattcctataattctagagtattctttttttaagatagatagggtcaaatttctgttacgacatcaataaatggctttagcgttcaacgcgagtggaagcatatggttgcccgattggttaaatgctattaatgaaatagtaatttactattcttaacaataggtccgagagatttttttgttcatcatgctattgctctaagcttacgtacaattacattgatcttagtaaaaaaaagctttaggaccatatttactgggtttagttcaatcaaaaacaattgatccctctttcttgatggtcttcatcacattcttgagactacggattgctctagggagacatccccatgaagagtaacattctgcccacctagctaggatgtcatcattagaagtctcgaaatttccttgccattcccaaatttcccagccattgaatcccaagaatcacatctgaactcgccaagttcaatggtaaaaatatctccacgatggttaatccttgaaagcttgagtatttgtccattccatgtgcctttaatctcgtcttcaggaccatgaaatagatttctttattaggaaatcctaatgcttacttttactaatttcctattattaaaaagaaaaagtgaaaaaaataatgggaaggaccctagataaatgggtcttttctcttttcaaaaaaaaaggaaaaagtgaaaagaaaagaataactgtaatattttaacaatacataagcaatcagtaaatagtaataattagattgtagttcttagctgattatgttttttcactttagctgtttggtttttgtggaaatggattttcatcacccaatatgattatgtgcaattaaatttgtgtgatttcaagtcattatgtaattttttatcatatcttttagattttgtgttacggttctgacttgcatttcaggcctttcatcgccatatcccaattctcataagggcactaggttcatctaatcctgaattgctctccataatatctgatccaccccaagggagtgagaatcttttgatgctagtaagtttacttgtagctcagtgctgttgtcgatattgtttctgcaatgcgttttttctttaatctggaaacttttgtgcttttgtttggtttcaggtactgcaaattttgacccaggagacgacaccggctcctgatctgatagctactgtcaaacatttatatgaaactaaattaaaggtttttctaaatatgatgctgttttcacccttaatggtaattttttttttcatttttttttggtgtcttacatcataaagcgggttaatgttgctgcaggatgtaacaattcttatcccaatgttatcttcactttctaaaaatgaggtatgtgctattcttaattattatctttcaggaaaatctttgttttctctttagcaatggaataagtggtttctcctctttaaactgtttctagtgataatattaggcctagttagttagaaggttataatagaacctaatagtgctagggacttttaaggttcgtatggtatgttggtattacattgtattgcattatatattatgttatgtatttgcttgtattacaaagctgtataaatatatgataaatcaatatcaaacaaaatactatataaaaatttgatatataatgctaggtacctttcattcgtacattggcacatgtttcttcgtcaatgaccttgaacggtaataggaaaagtttttcggtcaatcccatatgagaattttgtttgcagtgattagagaagccaacatttcatagctcaagccttggtggatggattccataggttaagggatattttcctttctagcaatttggaatgaagaaaaaattgacgttgtgatgactaagtttgaaggtgacaccttactggggtaccaggtagatcacaaactatgacccatgctactttggtggtagttaaggtgcattcaagaagggtcactacctaagctatttagtcctctatggtatgatgtatatgttaaaggttattgcctaaaatttattgagctttcgacaccattggacaatatttcgagtgaataaacttttagcttcaactaggaaatgaaaacattaagaggacatccatcccttgggaaaactttggccactctatgctatgatgttgattgttaaaaatgaggggtttgggatattagtagcgcttaacatgtgaacacctcagatgaaacagtgtaagttatatgtggaaggaggcaggacacattttggacagcggctaccttggttgtgttttgggcaatgtagttggaaagaaacaatagagttttcgaagaggaagaggaatcaacggtaggactccgggagaaattttagttctggttcgcaacttgggtgtacctagctaaggggtttgagggattaccttttgtggatctcagcaaagagtggtcaacttttatgtgttcaaatcattatgagggtcttagattttatcgttttagggcctcactttgacgtttttgcttttgtgttaatagtattcgtccgccataagtgaggctccctaataaattttcgaggttagtctacgacatttgacctctatctctttagaacaaaatcatgtccatcacttgtgtcaatagaaattcaaattcttttacaagaaatcaaggcaaatcatgaggtgtttttaaaattccattacgccttcctcctagtcgagaccacgagcactccctctcattaaagatggataccattccaataaatgtgaggccatattgatattgttattggaatttaatccttttgccctctaactttcttggatgtaattgctaagacattagtaggttaagaatgaacagatatatagatgatgtgttgaagaatgagggaggccttaacggttaggggccagtctaagacaatggcctctgtctcttttttcaaaaaaagaatgagggaggcctaatagttgatattcttgctctttaaacaaaaattcttagctcacggttggcattcgcgcttcctagagaaggaggtgatgttattcttgaaattaaacaagaaaataaagtgaagcacaacgacaacttggacacagtactactagtgcaaatgaatcatgaggctcttgtttcttggaggatgaaactattcttctgggagtcctttttcgttaagattaaatagttgttctttaaaagaaaccaaagcttggtttttgtcacagctactgcaactcagaggtgaaaccccacctgaagaggagttgtcattgctccattgtaaacaaccaagaacacttccaccccaaaaaaaccattagattgcgaggaaaaagaatttcatcgggcttgcaaaggtcataggtggatagtgcgactcgatggtgaaccattattgatgttcatggagacaggatagaaagaaatggggcatcagtggtacggggatgttcattgagctaggtatttgcaatctttaccaatatcttttggttcatcgatgggggaaaggcatggtggatgctgggatgtcggtcttggcgtctcgggtgataaaggctattggaactctagctacgatgacaattgtctttatgggaggcaacattcaaaaaggaagtagaggcttagttactccaagagattgttgcaccacaacagctgatacgatttcatagttgggtgatcttagacgatgatgggaatttaacaaatgggatgagtacacctggagtagtctgctctgaagatatagtattttactaaatttagcacactattaatgatcatttattattacaccattactattcaatattatttttattcaatacatacgggaaagggattagtctaagataagtggcctctttatctttttcaaaaaaaattcattattattttgatatataatttattatttagcattaagtagagattttttatttatatattttgtattttctttttaagtcaaagctaattaaaaaactatattttttatttgttatttttttttctctatatatatttacatctatttgcattggagtacaattgcaaacagtgtgccaaatatagaatttgtatcttccattggtgatgatctaagagagattagtcaaagggttgttagtagaactgaacctataaatactaaatagctagctagatcactgtttaggtatctgattatttgtttatattggaagagtagaactctttttgtgagatctccgagtgtctcaaaaacttgggttagtgtaattgtctttgatgtcaatgaaaattattctctagatttcatattttttttgcacttctgtttcatttaaaatagtgctgcaaatatcaatctgcaacattacaaactacgtgctgtctcaggacttgactagcaagttggtggattgttttactaatgccaacttacataggaaaaaaaacaatattttcagatgattccatgttggtgttgtgttttattgatacttttgatttgtgtgtactttcttttccataatgaagattgactgcagatttttatcattttacattccccaactgtggtttggccctaatttactttgaaataacaggttttacctatattccctcggcttgttgctcttcctttagagaaattccaaatggctcttgcacatatactacaggtatttatttcttatttgctatcagattggacatcatggatgtattataataaaataagcccttgataataaaataattatttacagtcacttcgttaagtatgatagaacggcttaagactttcccgctatgatatgtagctagctatattagcagtatcagactacacatttttattattcttaaccaggtagcctttatgtaatcaggcaatagaatctggtatgaaaaaagcttaaacatttaccagaccatacacttattttgtgtgggagatattgcactcgattgttcaggcaatagaatctggtatgagaaaagcttaaacatttcccgctatgaaatgtagctgtattagaagtatcagaccatacacttttttgtgtgtgagggaggagggagatctgctcataaattaacagaaaggcaatatcttgtcagctagagtacttttattagttcccaactttgtcgtgatctgtagtataaggatttgcaatcgagcattcttctttctttttgaagatcaagaacaaatttttgtcgagagaccacaattcctttctttgagcgagcaatttccaatagccatttttgctatagaagaagattgttgtatgagtaaaagtattaactctctggtattgagaatacccaaaatttttcacaagcttagtaaaacaatcaaactgctctattcttcccttgaatgtcaattttgggaacatatggttggttttcaaaaaaaaaaaggtgacatccatggtgtagtcgaatttcttttatttttttgagaaaaagaaagaagcctctgtcttagactgaccatcccccattatgtatagatatcctcacgtatggcggaggaaaaccgtagtaacaatagctattatagttcgaacaggaaaaactgtaagttcaaatcaaaacttcgccttaggaactataaaagcaactcctaaagtgattaagacatgtctatagtagtattgtccaatctctacaaagatctaaaaaagaaaactcctcaaattgtttagtcttgtaaacccatgtagctgaccaaaatttgactttttcccataaaacctcgattgatagaaccttcaaaggtcctagaatttctttccaaccacacaacccataatgttgctaacactgcagtcctctatagttttgttcttcttttgctgccaactaatttgctcaccaataaatatgggatattattatgcaatacccaacaattctcgaattccttcattagattagtccataatctgtaggcaaagttacattccaataacaggtgcttcacatcttcctcattctttttgcaaaaaatacaccaacccggggaactggataagtaaggacgtcttttttgcaatttatcgtgaacattcactttgcctagcgccaataaccagctgaacactttgactttagaaggtacactgcttttccaaagaatttagtacaaaatcggcctttactactcagatctgatgtgaactagaaaaaagttgatttacatgagaaaatccctccaggatccgacctccacactctattatcgttcactactttaagcactttaacatgttccagttgctgaatcaattctatgaggttgcaaatttccctcttcattagatttctcctgaacataaagttccagctcacaacactgacacccacccaccccttgatcagctacaacatcttttatgctctcgttctttgccttggagatcacagctaagtcaaggaatgcagtcctcaaaggaattcctccaatccaagtgtcttcccaaaatcggatgcttttctcatcatccactctaaacattaccaatttcgggaactcattgtataggtctgaaatatctctccgtggcccttttggtgacatacgtgatcctcatcttgaatcccaatttttttttgcttttccatagcgactcataattactttgtgccatagtgacttggattccaatgggagtctcctaagccatttcataagtaatcatttatttctcatgtccaatcttccagtgccaaaaccaccctcctcacgagatctacaaacgtcctcccaagcaactaagtgattacccctagctaaatcaccaccttcccataggaagtctcatcaattttttcaaggctatgatgactatagttggagctttaaaaagggagagatagtaagtaggaagggaggataggacaatgagagttaccctacttccctttgataagaatgcacttttccagccatctagtctctctacatacttgtctaagaccgtttcccaaaactttcactccctgggcgattcccccaagggcattccaaggtacttcagtggccaacttccaacttcacatcaaatttcaaaagcatactgtgacaccactccctcattcattgaagaaaaatgggccaagatagtgtggaaaggtagcgcaccctctaaggtgaaagtgttcagctggatgttagtacttgacaaggtcaatgtccatgaggtattacaaagaaaaagaccatatcagctactatctctgggttggtgtgtttgctgtagaaagcaggctgaaacgtcttctcatttgtttttggagggatcctttagcaataatctatgggatagactgctgggcaaatttgagattcagtgttgtatgcctcagacatgcaaccaactaatcatgtgcaagctaaaaggtgggagaagaatcaaaagactatggacagcagccattctggcagtcttttggggtgtttggatggtacgaaatgagagaatatttgaaggagatgataatggggttgaagtggtttgggaaaagatcaaattctgggtggccacttgggtatttaagacaaaaggctttgagggatagtatttcaagacttaactagagaatattctacactaaaatataggcaattttaaataactcatgtttgtatatgatctaatatttttgtgccttgtgttatattgtaaccacggttttcctcggccgtaagtgaggctcctgaataaattttgggacttgggaggaggccagttttagacaagtgacttctgtctctttttcagaaaaaaaaatagaaattatttaagttagcaatcagcaactacaatattgaatccacaatctaagtaaatgaagaagaaacagaataggcaatatacatatattatgaatagatgattacccgaatcatttaagtcagggattgcagcgatcatttagaggagaagtatcaacaaataactttatttttggaagtgtgcttcttctccttacctggtttaccttcttgttgtgggcttgcatcttttggggaaaagagttttttttttttttgggttagtgtgcattaattaataaaacagaaacatagaagtgaatgacaaggatttgctgaattttaattttattgcagggttcagctcatactggtccagctttaacacctgccgaggttttggttgccattcacaacattgctcctgagaaagatagtctcgcacttaaaaaggtaaagtttgctatcatactgaacaatgttgtgatttatgaatacatgatattggtaatggtcaaacttcatctctctctctctctctc

SEQ ID NO: 15426 - DNA, 5432 bp, Cannabis sativa
agactagaagaaaaatagattcccatttagcaacattacattaaaaaagtaatggcttgtgtaaagtttaccataatcacacaacaatggatgttaccaaaactgaaattcagagagaatggaaatgcacagaaaaaaggctacctatgaagctcattctttcaccatcaaaagttccttaacaatggtaccccacatatttctagcttccgggaacaaatggccagcaccggttaactcgtgatagtgaatccatgggagttgctgggcgatgtagcgttgcagcaaaacagacacaagtctgtcttcatctccatgccataggtgaacagaaccttcattgttcggaaatggattttctagttctaaaggactgaattcccacttcccaaatcccaccatcaagtcacggtggacggactcatattcaccctgttgttttacatgtgcctgaagaattccaatgagattttagtctttataattagatatcaaaatgattatacttaaagccagcaaagaagcaagttctacacaatgagatttagttatgcatatgccaacaaaaggcattcttaatcccattgaaactgctcaattgggattaaaataaattccgggtaaggtaaattttgtccacacttacataacatagatttcctttcagtaaaagtagctttcatcaaaaacattgtaagaaccatgtttttgtgtatgtcaaattatgagttttctgccatctggacagtcggtagtgccatctgagtatgtctgttactggtttatagattagctttgacagatcagcatttttattttcaaatatcttgaacaactgtcaatgagttgttgtaagctatcaaatcgattttgtgtgagttggtgatatatattgattcttgaatattctgaccaactctcacttatttgattctttgatagagatttttctttgctagggtagaaatctttttcttcttcttctttgtttcttccaggttcttccgttgttgaagaattcaagcttttgtgatgaagtgataatggaggttgtttcatccaaaaggaaattcagagtcatagctaaagggatttcagctcaatcgaaacaaggggagcttgtcttcgaatctaagaggacttagatttgaaacttggttggtcaatcaagatcttaggataaattgttgtaagaatctttattgtattgttttacatacatttaatttacaaactagagtttgtatcttgacattgattcttatcggaggttatttaccttggttcggggaacccaaacactaactacctagaatgtgtttctagggcaggtgaagcttgtaaatctatagtgttcatcttgatttactttctgcattttagcttttaataatccttgaaaatttgtagtaaaactactaaattttatattgtgtgattgaatgtcattatttcaattaatagcatccgattagatcggtttttcaaacattataaactagattgaagctataaagagcagtaatactgaattttagctataaatgtcattttgtgctataaagaatcttttaataattgttgcaactaaacatgataggcattttcaaaagaagtagaaatttcagaactagttatgcaggtaccgtgtatgtctttcttgctctttctcgcaataaggcgaattctttgtcttctgaagaaagaacatctaaacttaaattaagaacactggaagagggaaaccatttttgagtattccaccagtatgcaagccatggggcatggtgagaaacactgtatgtcaaccggtcattccacaattctcggttgaatgctgcattagatagatttgcaggtaaaccaggccaccagtagtttacaacaggagctatcagtgctgcccctgctattctgtaagtatttacatattttctcagcataacagaagctgttttattacaccacaataccacattgcatttcaaagacataagtaaatcatacctgtgagggatgtatttcaggacactccaaagcacctgtccacccatggagaaaccaattacataaaatttggaaccaagtcctaattgatcagcaagctcttcaatatctaaagccatgcttttcactgtgcgtttcggattaggatcactctctccataaccaggtctgtcgaaagacacaatgtaaatgccaagatcttcaacaagttcctacaaaaataaaaacatagattaagctttagagaagaacaaaactcatagggcatagaatgaatacaaagagatagacaagtacccgagacaagaatccagcaaaagtgtcatgtctgcaagaatcaatagcatgaacaaagacaatcttatgcttggcactatcttttgacataccctgctctttatatgccaaatgccttccatcactgagttttattcttggtgctgtgactggggggccttctacagtgccacaaatcttgggtggaggaggttgaattgcttgatatgcccatgccagaattcccactaataacaaggctagtgttttcttaagcattattgaaagttgatctttagctaaaataacaacagggatcaaagactgagtaaggtcaagcaaggttatgatgaaaaaagtaatcaactttgtcaagtaagacacataaaaatttctagaccgcacatgtataaacgagctcaatgtaaaagtctcaatccatacaaagtctacaggcacatatgtagtgaagtatatttattgatactcttaaggagaaccactcaaataataacattttcaacaattgtacagtatttggtaaaccaaaaacttgaaaacagtgacaaaagaataagattaagctcatatccaaccccacctgaaggaaggtgagaaaaactgttttgcttgactcttctggtgtgagcctttgcagttgttgctgatattttcctatttactcctccagccaattataccaaacatacagacctgttctcactctttaacactatttaatgggttttagagggaggtcgaatggtgaaacgtacacttctgcctcaagttgaactttctatacttttttagttttaccttatcaatcattgaaaacatgattgagcacaatcgacatgagttgttctgtcaactatatcttgttgctttgagttatcccaccactagtgtaacgacactttttcaaaaataattccaacgtgacacaatgttgactaggacaaaaatccaagcttttttttgtttctctccaatttttttcagacaaaaatagatcaattattacttttccaataaatatattgtcaggatgcagaaatatatagattttatctcaaaactaattgacaatgagaacaatagtctatgtattttatctatagtatttagtttcaacacattatcaatgtgaaactttctaacattccctcaagatagtggctatttttttttctcaccaatcttgaacaattcgatcacaaatgaccctttgtggctcacaacgacttttttttttagctttgataccatgttagaatgcgaaagtgtatggttgaagaagtaagaataggtgagtgtatggtaaggtgcataaagttccatctcaaaaacaattagcaatgaagagaataactcatgtattttatgtatggtatttagttttaacacattattaatgttgaactcactgacatagataaggcatttatagttctactgtaagactaagagctcacactagaaattatacaaactatatgaaaatacataatgaagaaacatgtctttcttagttctatttgtgtaacaaataggtttgaatattacacaaaaattgatgacaatggctcaaaggaggctcacttcttcctcaccaaaagttccttaatgattttatcacacatcccttcagcttctggaaataaatggccagcaccggttagctcatgaaagtgaatccatgggagttgttgggcgatgtagcgttgcggtgaaataggcacaatcttgtcttcatcaccatgccacaagtgaacagaaccttcattgttcggaaatggatttttaagttccaaaggactgaattcccacttcccaaaagtcacaattatgtcccggtggatggattcgaattctccttgctgtcttacctgtgcctgagaaaccacattgagtgttaattaaatgccagctgaagaaaaaaggtgaagatcatccccaccgagtatatgtagcacattagcactggtaaaaaacaaagctttcaaccagccatccccactgaaacagcataacgagctggaatctctccattaatgcagtgcaagctacaatttactaatacacatctaccactgtcatcctagtgatcgaccattcaaatttgatcagggtgaaaagaaagtacctttcataataattttatcaaactaaattaaatgtctatttacaattgacatgattggaattggaatattcattcaccttctaaaacaatgttatgtttaacaaaaagtactaaaatcgtgttacactcagcacaaactaaaatggaaaataaaatattagcaagaattcttaaaacaagtaaaaaaaaggtgctttaataaagtggtttgcatgtaccatgtatgtttttcttgcttgccttagaggcaacataactatttctctgtcctgggaagaaagaatatcaggactatgagccacagcactcatgtaaggaaaccaattttgagtattccaccagtatgtaagccatgggatgtagtgagcaacacgaagtgcccaccggtcactacaaggtgtttgttgttcgaagacctctttagatagatttgcaggaaaatcagtccaccagtggttaaaaacaggagctatgagtgctgcacctgctaccctgttacaattttatagactcctcattcaggacataaaaaacaccccaacaaaagtattctctaggagacaacaatgccaacatatttcaaacattgcatttcaaaaaaggtaaatcataccggtgagggatgtatttcaggacactccaaatcacctgcccgcctaatgaaaaaccaactacatagaattttgatcctagttttaattgatcagcaagctcttcaatatctgaagccatgctcttcactgtgcggtttggattaggatcactttctccatagcctggtctgtcaaatgacactatgtatagacctagttcttcaataagatcctaaaagatcaattgtcaaacataagttaaactttaaagaaaaccgaacaacatggtatagagtgaatagagagatgaagacaagtaccggagacaggtatttggctaaactgtcatgcctgcaacaatcaaatccatgaacaaacacaattttatgcttggcactatcttttga

SEQ ID NO: 15427 - DNA, 1815 bp, Cannabis sativa
aaaaaaaaattgatttttcattaaagggttgcctggttgcatcatatgatttgaaaagggagggtcaaatcagaagaagttcccctgttttgatctattcgcaggtacttcactcgaaaagccacaaaagagaaaacccaattcttaatttaagaaaaagaaatcatgggattattgatttaggatatttttattaataattttccagaaatatggttatgaaagtagagtagtagtactatagtatagcagtgtgtggggataatgaagtgagtaataaagataggtatctttttttctttctgagtcttttttaaaaccaatctctcttttttcactctttcccttttaagttgcagagaagaaagagagtgtgtgtgtatatcatatgagtctgacagaggactttccttttatatctgtatatatatatatgaactgatattatatcaacataaaagatcgtatagatagttataggcaggtgggtgtggtagagcttctcttttcatgaatattagatatcattttctgttatatgtactttagccttaactgttttggtgctatgaaaattctctctcaattgtgtttttttttttttttcttttttccataaataaaaaataaaacttgcccttgtttgtttggattggagtttgtgggtcgttgttatggtgaagtgatttttcctttactttcttaattttttattttttgtttccaaattacagatgatagatgggatgagatgatgatgatgatgaagcacgtgcaaactcagatttccatcacaccaggtaccaatattattaaaactaatactataatcaattcttttcactctcaatcactctctctctctctctctctctctctctctctttccatatctcacctctctctctctctctctcactctctctctatatatatataacccaacgttgtttcatgttctacactctagctccatttggtttttttgtttttcagaagatgaagtgaacaaagttgtgaaaagttgtgtgtgtatatatttgtatatagatatcatatattatatatatatatgcttaccaatactattatcagctcaatcagctctgaagatatatgactcaatatttttgtgtgttttataaatacaaattcttttgagatcaaaataaagcctggaaaccagtagaattgttggttttggtacttggattttgaagatctatctatggtttataagttatataactaattaactaattccggattctgaaacggtcgtcgtttttgccctctttgactttatttttccaggacctctctgaattaaagaaagaagaagagtactacaattatatagagaaggccactgatctgatcatattaatggttgatcccagttctagattcagaaaaggtatatacaactatttttatttatatatataagtacatattttgcatgtacagtagagagagaaagagagaaatagtaagtactatataaatatgtgtgtttggatagtgtgtcatagatatggaggctaattaactaaactaattgttccttttcagagaagtaaaatctaaagagtgaagaaaaacataaatatatatttatatatatatatattacgatcgatggcgacgtactttcatggaaactcggatatccaagcacctgacggtggcctacagaccctggtgttaatgaatccgggaggctatatcccttactctgacacttctccgccgccctcggccaccggggacctcatattcctcaactccgccgccaactcactcgctcaacac

SEQ ID NO: 15428 - DNA, 2946 bp, Cannabis sativa
tattcatatatttatgtttgtttgaattcgatgatattgtatagtattgctaacaattattttttggagtcatgtttagcctcatcggctctaaatgtttcagttgtccttttctaaaatttagttcatggctggcattattgggaggggtcccttgattgatcattttgttgttttgctttctttcacgaaagagttcaatattttcaattctatcatactaatattattattataatagtcctattttatatatgttacttgtcaatgtatacaataatccctaactaatagcactacatctgtttaggctgagtcatcttttacccaaacatttttgtaattgtcttaatttcaggtagccaaagtgattcaagaactgattccgtctccagaaccaagctccaacgacccaagaagaaaagagcttgaagagttagagaatcagaagggtgagattgacgagagggccgagtccctggttcgaaaggagctctggtgcggtctggcttacctaatggttcaaacggccgggttcatgaggctaacattttgggaactgtcttgggatgtgatggagccaatttgcttctatgtcacatccatttacttcatggctgggtatgcattcttccttaggacatccaaagagccttctttcgaagggtttttccatagcaggtttatggctaagcagaaaagattaatgaagcaatatgatttcgatattggaaggtataatgagctgagaaaagcttgttatccatcatcatcatcaacgccttataattcgaccacttcttttgataaagcaggaaaggtccaattgggtgttgtacatgattaattcatttgataaaataacaacgatatagtaataagaaaaacaagaagagaaaaaatagcatacaattttggttaatattctccatttttttgttaatgtttttgttttatctttgcaagaagttaaacaaaattgttatatctctctaaaagtctcttaattctctggtttattttatatcactctgtatatcaccatttaacttttatgcttaacttatattgtccatcatccacaattccaatactaatatttctacctaatcatgcctttgtcattactatcatgcctttgtcattacttttaatttttttattattattattattattattgagaaaatttggagtgcactcctattcagacatatattgttgagtaccatcaggacttcttagtaattcagtcaaactttttggttattgaaaatgaaaatggttttgtagatttacgttttgggggatatatgaaaaattttagtatgaattaatttggtcaattttggttttgagttgagaataggatagttttgttttgggtattgggtttcgattccaacttagttggccggccatgaggtcataacatatctcattcccaatgtttgattattttatctttttattcaataatagtggcttcattcctacgaaatgctaaaatagcctagtattttccttcaataataatttttaaaaaatattgttgattattgtgagtggtacctaataataatgctggtatgaaaaatattgaatatttaagccacaaatcccacatttaataatttgaatagaataaatacaaattttatattttggagcaatctaatctatattataattcaagagaaatgctaaagggcaccagtggtgcttagcacccttctatgtgtcaatatcgctattgatccaattaagtatcaagtctcatataatttaatataatagcttttagagagtatcactaggcaatcgcaacacgacatgtcgcaaatgtactaagcaccattgatgcttagtaacaatgcttataattcaaaaccgtaatatttctttactaaatttgtgtcaggtattgtccattgtgcatgactactcaattttataatttatccaattaatattgaaccattaacatggtgttagagaataattttctttaagtaagagttaaaacttagtgcacatttcctatattatgttacaacttccaatatctcttttacagtccctacataaaaagcatgtggatagacaataattatatatattagggataaaacagtgttgaaaaatgaattataggcaatgaatgaaaatgatgagttgtaaccagggaaggtttcttctattttatctaaaaagagaagaagagaattgtagtttgtgttttttattttttaatttttttggattggatatgaagattttgtgggtttattttggttcaataatgatatatgtatatcatgaatgtggagtggtccttaaaggcagccacaaccacaagacaaaactatatgaaacgaaggtgctatgaccatgagtttgtgactaagggaggtgaactcaaacaacaaagaaatctccaccaaattgggaaaggagatttcttaccaactgtcatttgctcacttccaacctattccagttatcaccttttttattcccacattcttaatttcaacattatataatatttatactgttatattattatcattaattcctttctcaattttagatagtaagaaaaaaaagtaactcttagaattacttctagttaaaactaagtaaatgaatgaataatctaaacttatttcttataatttaccgaaatctaaaaattcaataaatgaaaaaccactacaaatttgagttggtatgccctcctaatatcatttagtgacatttacgtagtaaattgggagtttctttgtttgattatagtccgaaatgataataaataaattaaataatgtttcaagtaaatggtcatagtatagggctaaacctttattttgtaacggattaaagatgtaatatcaaggtgggctaaatataatccaaaacaatatataacaagttgtagccaag

SEQ ID NO: 15429 - DNA, 3864 bp, Cannabis sativa
ccggttagcttgtaagacacgtctggtttcactcctttgtgtaaggaacttgaccatgcaattgttgagtaactgaaattcataatcaaattaatttcaaacaaaaaagtatagtaaatgcatgtaaactagtttcaattactacaagtataaatttttgtaacttaaaattaatacatagtactataatataatgatgatgaatatgaaataagcatgacattatatttatgacaattaatactcatcacaaaaatatatatatgcccaattttggataggttaggcctaagaccaccaaactcaaaaaaagattttacttgtgtgttgtctcaaaaatataatgttaaatattaatatgttggcccattttgttaaaaaaaaatatataagcatacttttttagttttattaaaaaacatcttattccattataaatttagccctatataaatatatgacaaattaatataattaactatgctccttctgaacttttagctattgttgatgcggaatgttactgaataaattaatcaacttttgttcaaaaaaaaaaaaaaaactcaccgatgtgatcaattttgcacacaatttattgtgtctaactactaattctaattagatgtgtcaaatttgttaacaaattaattgtgtcattatttagtatagttctatatatatgtatatatagtttttttttttgaaagtaatatgtatatatagtttagtgtacacttaatgtttcacttttacaaaattaacacttttttttttttactagaaagtaatatgcatatatcaaatacgatatgataaacaaaatcctaatcaaaagaacacagattatataagtgaaaaactgatattatatatacagaaaattaatatatacaaataatatatatatatatttttatatatgacaattaattaaaaatgttaattaattaaaagtatgatgtatgtatataccttaaggacattacagctgcagccaaggaaacaccagtgatggaattgaaattgggaagatgagaaagaaacaaatgaacaataccaaacataagaatgaaccaagaggttctcatgggttggcaatttgggcaaatagtatcgatagctttctttaacgattttccacctgtcaccatgtaaacaatattcactcccacctccacagttaactgttggggcacaacaatataaagccctaatttttcaccaaacgcatgctgacccagctcgtggtatcggtcaaatctcttcccaggcaccatttcatgcatctccaccatttgccatagtgtgtacagcgttatcacccatgacaatattaggatagccacaccaggacccctaataatacataatataaattaaataaaatgtaacataaaatgtattgcactaaaatcaaaacttatttatttatacataccatcctaactccgccatggcatagggaaggcttagaacacctgccccgaccatggcggtgacattatggaatgcggaataccaccatttcgctttcctggaagaagtgatgggaagccaatcgtcgattgctttttgctttgccgcaacatcatcagcaatgttattaactactccttccacttccacttgggttcccatggttattttgtggttagagtattttttttgttattcgttctatataaatgattatgtaaaattaacctctaactaaacctttacctatttacctatttagtagaacaactacaaactaacactcctttattctctccctacaaaactaagtcagccgtattatgtattattttataggaaaataataataatatatattcaattcaacagaataattatagattcatctaaatataaatcaaattacagggtttctcctattatttaattaaaaccatacctctctattttatttttccgtgtgggacgctaaaaaaatattaaatattataagtatagtttaaatatttttactctatatagaaataaatatttttactttatatataactaaatatctccgatttaaccgaatatatatatatatatatatgcacatgatttatagagtatgattactatatcaaaaaacatatgatcatcaatccatattattatttacaggaaaactttccatcatattacttccaaagaacattttatttgcaggtccattactagacctggtaattggtataaataacctacaaacaaaacttaccaaacaattaatgatgtctaaaagatgaaccatataataagatgaaaaaagagcaccaaccaactccattgaatcaagcaactagaggattaaaatgtctataattctcatgtggtggtcctgtgcagctcattgtatcttccacaggttccaccccttgtgctccaaaactcaagtactcattcatcatcttcttattgaaagagctttgcttcaagttcatgttcttcaggcactttcgtttatccatgaaagtaggcgaatacaatggcgagcctgagtgagtactacttgaaggcgagtgagtcgagccagtaacatatggcattgtcttgatcacaccatgcattaggccagcagcatatttcatcttagtagatgggctagggaagctctcaactgaaagtgttcttctgtgggtggtattgttgttaggaagagaggaagatttcgagtacatttgccttagaggtataggattgtcttcaaaacctctacatctgtttaaagaatcaagagactctacatattcattgaattctattccatcagagcagcttttgtccttccttttacgccatctgagaagaaacttcagacgcgctgcagcagagcttagagaaggagcagacttcttcttattgtttttgttgttgttcaatgagttagccaagtcaaactgcctactgataagttcacctgaatgtgtgttgaattgcccatttgtttgatcccaacaagaatcagaataagcattctcaatcccggtgtataagaatatctcagcatcagggattctgaaagaagttcctggactagtaccaataccatgcattttcaaatgtgaaacaagggcatttcttgctttatggtcttgacaattggacattcctccagctgatatcaactgtttgatcaaaattgcagaagatactgactgtggcctttgcttgagaagatctaaaggagtcattccatcaccatctcgggtgtttagattaatcgatggaacagtcattagaagctctaccaaattactctgaatgttctcatttacagccatgtgaagagccgttcttccatcgttgttcctcacattgataatgtcttctacattcacaatgtcaccacacaacagcttttgcatcagctcaaattgcctgtcaattcttcgaaatccaggtgctcgaaaaccagacactgccatatgcaacaaagtatctccatagtggtttggcaaagtggttaaggaaggagatgcaagaattaagacctcaaccacggctaagtatcccctgtaagcagccacatgtaaagctgtgttcccttgctcatctctagtggtgatcatatcaaaggattctacaagatcctttacaacctgcattgataaatgccacaaagtaaattttaagggtatatttatagatttctgtttattgttatcagatttccaatgattaagaaattgagaaactgcatagattagcccaagtttctttcagaatatctctagtaatagacttttcttaatctgtttaatgactaaatattctaatgaccaaataagactgtcaccatgatgttaaaaataaagttaattaggatttttttttcccgaa

SEQ ID NO: 15430 - DNA, 3474 bp, Cannabis sativa
attaaacttttcagttcgttataaatatttcttgaattattcacactattgtaaattaatattttcgtcaaattttgtcacacgtgaaaataaaatgatgatatgtttacttagttaatagtcatgtcttgtaaattgatatttctaacaagttttatcacaagtaacaaataaaatgataatatggttgcttagttaattatcatatcagtgacacatgtataatttaacattaaaaagtttaaaaattatgcattttttaaaaattattaaattcaaaatcaattaataattaaaaaattacgtacagctaaactaaaataaaataaattatttttaaaaattaattacacatgtggcgttaacatgacactgacataacaattgaataaacaaacatatcaggtgtgacaaaacttgataaaaaactaatttaaataattgataattatactccaagcctaatcaaattcaagtcatttgtaagagaataatgattggaaatataaaaatattcatactaaaatttcaattatatgtctaaagtttaattattatcattattataagtaaccatcttttgttaaaagttaagaaaactcttgacttagtttccactttcaccttttgttagtataacaactttggctcaattattaatttattattgtaaatgttgtaaacatagacaagatttgaagcttaaaagtttagattttacaaaatgagcaattatattattattattattattatttattagcttgaacatggcataataatattaattataagaagtaagagactaaaatttcaataagaaagtgcgtatttccatgggaccaagctcaactacaagagttgagttgcttataggagaccctcgaattggtgtcgtttggtctcctttggtgtcgttttgttccactttccattccattttctttatctttgacttctcttgattagctgataagctcacttccttcacttcctttatctaaaatgtacacaaaatatcattaaccaacactaacatataaaactatgtcctattttagatcaaagaatattcaattaatcgaacaatacttactatttttcgagcgaaaatcttcttgagttcaaccgttgctaattttgagtaattgggatcttcaccaacctaaacattcacattatgaaaactaaaatgttgagtttgatatgttatgtctgtgtgtatcaggactagccctagagataggtcagaaggtctgtgcctagttcccactcgagaaaggttttgaattatgaaaaatactatcttgtataaaattatatgtgtgttgttacctacctcgtatagatgagcgagacgaagaagaacacttccatcatctaactcctgcaaaagaaaaaggaaaactaggattagagaaagaaagagcatgaagaatagttgtattgaaaaccgaggtgagttttgaataagattattacctgaagagtgatcaaagcaacattaagaggcaagctataatttgaattaaagctagtttctttggttgaataagaagctttccaatcctcaattttctacaacaacacatttacaatattaattcatatttgaatagtattgttattatgtaactaggggtgttcattcaatccaatccgtactattttgttcatagtgcatctgattcaatctgactttgtaatgatgattggttattttatgaacaccccaaagtaacattatttacagaacgaattggggtacccttgtcccgtgtgtttgtcttagaaatccagtgtgtctatgaatttcttaaggtatttatattctatcgtgacaccactcgctaaccccgtgatagggttttatgatgtggattaattcaggcttcgagatcaaaacaataacaaaagagaatccatatagtatgtgtgtatattatgaagtgaatacctcatgtgtgaaagctaagagaagtggcgagtaaacttcttggcctgtcgttcgacgccaacttgccccagcaccgggctggttgatgctcacgtaataatttcctcgaacctacgaacaaagtgattttgattagaagactaaacaaatgtgctataataatctatgtgatgtgttatgaaataactaacttacagttagtccttcacatgtatcttcaacacagactctctcatcaagggcttcgccaactcctctagaatcatctttaatcatgcgccttttcatttaagaatcgacaaaatttttaatcttttttgaaaagggcaactccatagacaagatttgtgatgacttatattgctgagaataagaaaatgtgtgaaattttttacctgtgcagcatcaactctagttgtccatctgcaatgctggctcccccagtggcacgatcaactaataccgataattcagatttcttatccgcggtgaaaattccaagattaagctgaggaatgattagaagattcatttaagtttgtgttccaagaaaattcatatcgattagtggttaagaaaattacagggtaatagtttcctgcttcaggctgagtaaccgtaagaggccagtcttctcgatgatctcgaacctgagaaaatattgtcaatgaattatgaatcatgtcggaaatagaaattaaatcaaatgaacatttaaagtgaaacgcgagaatttactgaaaattttggcccactatcaaatctcagctcactccccttgacccgagtacacccaaagttcttagtctcaaaagaactttactctctctctcactagctctcatgtcgtgttctctatctctctagatcgaatatcacaagttacaaatgaaagcattggaactgttgcataaccaactaacataactgcctaactgtttcaactaactttcccaagtaaagaataagttagttaagttagttaatcttgtggatatgtaagaaattcttactcgttttagaaaatcccttccgttcgaatcagtgtagaacactttgttagtttccatattcgctgtcaatcgagtaatgacctctttcccaacaccatcatctgtggggattggaccaatctttcaaaaataaagagttgttagagaactacacacacttaagtctataaagtctcaaaatttggtttgtttgtttgtaactcacagtgaattcaacttcagcatgttctttgtccttgtaaagcctggtaacctaacatgacataaaccgaaaagtgttatcgttaccaaatgaaaggcttaaaaaagaaattatactttgtgtatggtcttatagtttccaagacaagaaaattgcaatatggcctaagatattgaacccgaaaatatgttaataacctggtaaatccatggattaaactcttggtgaatttcatcaactaaagctccacgaatgacctttagctgaacctgtaaaatgcatgaaaaaacaacaaatcagaa

SEQ ID NO: 15431 - DNA, 7229 bp, Cannabis sativa
aaagaagtcttttattgtctttatcttaaatggttttaaaaggactagtaagtgtgacgtcttgggaaatcggggcgttacaaatggaaccacagacttcgttcggggtacgacatccatcaaatttggataaaggtagttgctatgaaagctttagtttagagtgttaacaaaattaatcaagagtggtttaaaaagctatattttgtgttgtttttgccaataaaatgtaagttgtgtaaaataatgtactgtttgggatgttaccagtgtaacttatagaatagagtgctttagtaaaacatcatgctaacatttattcaaccttaagaaattttggtcttctcatatcagttggcttattagagatttaagggttctaacttgtattttcatttattataatattgttgattagatattttataaataacttcttctagtgctccaagcaatctttgaaaagcttgagtgttggaagaacactttgtcttgaacacttcaaggtgttctttggttgagagtatagaaaacaaaggaatgtcaaatagaatttaatgtgtttttttaaaaaaaaacataaatgtcaaaaagaaaatacaatatatatatatatatatatttgtatgaggcattacaatgagttttgggaggaaaagacttttatttagaaaagaaacggtgcctggtggtgttaggtatagtttattgggtttacacgctaactgtcaaggagaaccagctgtcaaagtagttagttaattctgttaatgattagttaggactataatagattttttggttgttattatagtcggttgtgattgttatataaagctgtgtattgtactattcaattcaatcaatgaataacagattgtattttccaattactcctcttctttttctcttgattgcatcttctcatgactgcatcttcacatggtatcagagcttgatttcgttcatcaatagagatccctacctcgtctaatggtgtagcatcaagactgaacaatactcaggcacagaacaatcagcatatgcctttactgaaatcgtatcctatttctttcagccattctctgcctatcaagcttgacgaacacaactttctaccatggaagcatcaggtcctggcattgatcaaaggcagcagacttaaaaaatttcttgatcctactcaagctccacctaagtttctaacagttgttgatcaaagaatcaataatgtcaatcctaaacatgaagactgggaacaacaagacaatcttcttgtttattggcttctctcatccatgtttgagaaaaccacaaatcgaatgatcaggtgtgaaaccactgcacaaatctgggagcaattaacagggtactacacggcattgaatgcaactaacataagtctttataagactcagctacgaaacacaaaaatgatagggtcactgtgtgattacctgctcaagatcaaaggtttagtgcatcgcctagctacgattggtcattgacaaactactcaagatcacatagaagtcatattcaatggattaccattttgagtatgatgtttttgtcacatctgttactaccagaaaatatctttacactgtggcagaaattgaagatttgttgaagccatatatagtgttgtaagtttgtgtgtgccatgttgattctgctcgtatttatctatgcttttttaaaaacgagtcgtgtcgtgccacaaaaaaatatagatcgtgtcgtgtcgtaccaacactttaaagggcatgcttggtattttcgtatcgtgttttgctcgtgccggcctgtatttattaaacaggtcaatctatttttgtatccgggcttaaattcgtgttttactttttcatattttttttacaattactaaattatatgtatatttcaaaactttagttatatttatacaatttttaaacaatattttatagataatcatagaaaaaaattattaacattaaaatttgaatatttacttataaatagttaaatttttatatcacaccctataaataaattaatatataatcttagtttttcatgctttcataattttaattatagaactataatatttagtattatatttaaattttattattattttaacttatttataatagataaattcatatcttattattattaataataatagtaataaattataaggtttttttaatatatcgtgttgtgctttatagacttgtcttgtgtcgtgtttttcatactattctattcgtccatatgtattgcactttctgtacttctcgtgctgtgtcgtgcttaagaatatatttttcgtgtcgtgacgtgccaatttataggttcgtgtcgtattgtgtccaagtgcgtattttttcttgcttagtcatactcgtaccggtttcgtgtcatgttaaaaaatacgactcatatttagaacaatatatatgatagttctctttaactaatcatcttctaataaaaatgataatttaggtaatttcattgctaatattttattctttccttttcatatttttataaagatgaatgttaattacaatctcctattataatattttagtcaacctccacgtccgaaatcacatgccaaaatattttttttcaaattttttttcatagcggtatttgttatagttacagtatcatccctgtaaatttttgaaatttttgaaaaattctgaatagtttacagtaccaaaaatagagttcctgatattccagtttaccacgcgagttcaaaaaacttcaaacgtatttttggcactgtaaactattcgaaatttttcaaaaatttacaaggatgatgttgttagcataacgaacacccccgtgaacaaaaaaattgaaaaaaaaaaatataccgacatgtgctttcggacgtggaggttgactacgagtttgtaactgaaggttgacagtagcactcctcttttataaatacatcttcaaaatttgtacagtaaaaaaatagtgatttatcatttctttttaacttatctattttattggcttaaaaataaaatttatcttcttcacacgtcaaatcaattttcttttttcttacataaaatatttattacactatttactctttcttacaaatcacttttgttacaccattttcttactcttttttctttcttaaaggttattatcttttttgtttttactctcttcttcttcaagttctctctctcatattagttttttttttatttcttgttcaatttttcttcttcatcttcttttttttagttttaaaaattttcaatcatgtttttgtgtagattgcggttgaaagtttattttacttggttattgatcaattttttatttttcaaaaacaatttttgtttctttttcttcttcttcttcttcttcttcttcttgtttctcttgtttttgttagtaaattagcaatgggtaagaaatatttcaaagaaaatcccatagccctacatctttaatagcttcgaaaaggaaatcagttgtttattctctaaaaaagagaaaattaaaacttttgaaccgatcattgaagattcagactttgattttgaacttgatgatgaatattttgagatacccaaagtgtcgaaggtatttatgttatttttcaattattttagttttttttttaccttttttgctatagatattttgggttttttttttctctattataagtcttctgctcattttaattatttattgttgttgttgttgttgttgctgctgttgtgtattttgtattttttgttttttataatatgcatatttttttagtattttttatggttgttttgacttttttttgagttagttttttttttttttaaaaaaaacattatcctaaacctattacttactgatcttcttatctccatcatcttcaaaattttcttcagctttttaagcttctttttcagtcttatttttttattttttttttatttatgcatgttcagtctcaaatatcaatttgagattttgttcatcactctctgattttgtaaaatatatattttattattctgtatgtgctattcgatatttattattatatacttaatttttatattttttaacggttattttttagttgttctgaattattcttttactgtatttagggtaaggaaaaattttccaagattatggttccctctcgtaatgttatggtagtccctactggcaaaagagttagtgaggtatagttttttttttttgtgattttatttagttatattgttttgtaaatttactgttgttttagtaattttttatgttattgttctaagattggaattttaaatacttacgttcatactggaaaaataattattttctaactgttctggtggttcggtctgtaggtgttgaagatggaggtttcgtatgtgttttggggtgtgtacaatataaaagaaaaaaattaaggtgtggacaatatttttgtaaaaatttaagtatggcggtaaaaatgtaaaactgcccccaaaatctagtatttttgtaaaatgcccaatacgaaaatttacacaaaatactaatttttttttttcaaactttatatttatattttaattaattagagagtagtcacatcatctatgattaaatagaattatgtattattaatcttatgttacttttatctttaacagtgataaattcaactcaaaacaacatctataaaatgatatggaatgagaataaatcaaaaacattttacttctatttttagaagtctaatgtatgtctaagagtctgaaagactttgtattgcatttgtttcgggattattaagtagtatcaaaataacttaagttaaccctcctttatacaaagtgatgaagtatctttcttgagatacattaaatattacattcatgcatattttattgaaatgaattgacattctgaaaatatagttaaacacttacattccaacttctctattgattcacataaatcaatatttgattacatcattaagattaccagtaagttatatcacggagaaccataattattatttctattataaaagagattcatttattgttttaaggatacatctcatatagtatattatagagtttcatacaaggcctagagttcataattatatttcaactcgttaagaaaattttgtgacaaattcaactacaatattaatagataagaactataatagctctagtcgaagctagcatatctacattaagtatttagccataacgaggcatgataagtggtcattaagcacgcaacactgatttgggtgatcgtaatatctttgactaataggcatgtcacaacacaaattcaaggatcgtaaagtaaatatgagattcaattacccctatgcagtttttggttgtacaactaaaattattcaatgaaactctaattttgatattttttatatatatgtgcaccttaatttcatctgagaaaattatcgtaagagaactagaataaacataaggtttagtgtttgttcgcttaagtacattgtcaaataaagtatattattatataattaatatattgtaatacatggaggatgatactcgccatataataaggacatatcgccataattcatatgtttgttatatagcaaggataatcgttgggttttaagtggtaaatttatttaaatactaacaaagtaggagaatatggtaacaaattatatattttatttgatttgatttataaaatataattaattatttactagtgaattaaaatattataattatagtcaaatttaattaccaaatatttcaattattcaatttaattttctgaattaattgttaaaatattctgacaattaatctagtagagactttgataaaatgtctcacctatataaatatagagtctcggtccccgagctcactacttattttgtgaaaacagtaaattcaaaaagagtaaagagagcttggaaacccaattacctacactaatcagtttccttttcttttgcatatccaaagctcgcatgtggattgaagctcaaaaaaatcaataactgaaggtttttttatacaaaatgacaaattatttacatttttaatgccacgtgctatttttttttttacttttatacaaactttttcatttatacctttctaagttttgttaattacaattatacggaacttcttttttctctaacttttacttcatccctatcttcaattacagaaagctcatctccaagtcccattctgtcaataagatcgacctcctcttcatccctcaatggccgcgcaaagtccatctcccttctcatatcgttcatctccattctcattttcttctattaatttgtaagttattttttttgtttaattttcagaaatatattattaattttggatgtcatttcagttttttttttttttggtgtacattaattgatggttgcaaatttttttatgtaaatatattatattggtgtttggatttttttttgtatgtgtgcatttatatatatatatatatatatttaaatgtatataaagatacacatgctatgtgtttgatgaaatacccaaaaaaaaattgagttttcactagcctaaagaaagaggacatattcaattgtattttttcttcttttttaagttgagctttttgtagttccggcattaatttttgttcattttggttttatgatttagtcaatttatctatagattttttatgattatgttgatatatcgttatttataagttgtttatatgttattttgtaaatgccttcactatttatgttgttgtcctgcttctacagttgaatgcaaaaaaatcttaattttttagtgatggtaaacttcaaagttgattaaaataggcttgttgtccatttttattcatttgtaagttacatttttttttttcataatagattattgattttgatgtcatttcagttacaaactttgttcggtaaaatttattattgtgagagtttgcatctttttttttttttgtgtatatatgtgcacctatataaaaacacacatgctatgtgtttgatgaaatgcccaaaaacactaagttttcactagcctaaagaaagaagacatattcaattgtaccttttttttcttctttaagttaagcttttcgtattgttgttctgttattattttttgttcattttgatt

SEQ ID NO: 15432 - DNA, 6665 bp, Cannabis sativa
taaccaacagaattcattttcaatattggcagcacacaaatcgtgttctaattaatgttgcacatgtataatatgagtcatataattataaataaataagcatacctcagtcttcatcatttgggctaaaccctttccttaatacctcttcttcatctatttactttcactgcaaatacacaaatgacagttagttatccttgcctcattcaaacaaattataatatttactcatttatatatgttttttttaccttttcaataataatgttcgggacatgacaaatcttgggccaatcatctcctgtctccctcttgcaagtattctctaaaatatcacaacgacgaatctccaaattcttcagtggtgttgactcaagaaagtcaggcaaactttccagcacaaggcagccagtgagttgcaaggtctcaagagaaggcattattttcaaagggccattcattttccaccccaccactcctacccattccttcaatgaatctgcattttttatttggagttgtttcagtttgggaaataataacaactctgttgctgatgatgtgttgtcatagatttctactcccaaaaactcagcccccatcttcttcaaaccacgagaccattgtatgtaaagcgattcgaggcatgggagtttccccaaaggaggcattttgttgtagttaacacattcatacaaacataagcttctcatattaatcaatgacaccatccaactaggagaaaatgaaccaccaagatatccttcaattcttaaatattgtaagttttcatgtggtcgcaaagtttcaagtacaatttcatgagtctccatctctgaattaaaatcaaatatcagatgcaagtggacaagagatgttttgttatgaagttgagcttccttagcctcttccttgtgttcttctctgcctaaaccttccaaccaaattttacgaagattgttcaagtttcgaaaatctcttacctccattgtcattctgttttttttaaaggcccaaaagcgttgatctcgattttccaaagtttgaaggcttgtcaacttcccaatactgctttgcttagtttcagttcccccctcacttaacagaagatgccttaagttagttagttttccaacttcttctggaagttctttaatccgactaaagaactttaaggtttgcagattaagcaaatttccaattgttggaggcacatttatcataatttcaatacccgaatcgatgctaatatatctcaaatgtatcaaatcaaccaatatttgttggcaatttcatcaattctcccttcaaaattaatgtcttgagacatctcaagtgctcaccagggaccatacaccctaaatcacacctaaccataagagtgtgcaaattcttcttcttcttgagatttgagaaagttggaatagccaaagaaacatgaattaagttgagatgacgaatgttcaactcaactctcttttcaacatcagaaatgatttgaatcgaatattcatttttcgtaagatatttggcgaaatcatgcactatatcatgcatcttgcattcaagagtgaagttataattatcatacttaaattcttgaaaaaatgaccgcgtagctaaattttggaaacacaccagacctgattgttcaaattcatgctgaccattgttccttgacttgaaataaccttgtgccacccattgttggatcaagtcatctctatcaaaaacattatctttaggaaagatggcacaatacaaaaaacaccgtctttctacaggagtcaaatcataataactaaataacaatggattgaaaagctccacctccatatttttcaactcccaaatttcacttgttaacatttcacgccaatattcaatatctttaacacgcaaaagactccctaaagccttggcagcaagaggtaagccattgcatttacgtgcaattttttgaccaatcacatcaaaattttgcttctcttgctctgtcttgttcgaaagtgctacttcttttagcaacaaccaacaatcttcttcgctcaatttactcaggcttatcttacttgtatctccaatcattttggccacttcctcattccgtgtagtcaccacaactctacttccaattgcgccaagctttaaaacgtgttctaatgaaagccacttactataatcagtagtccacacatcatctagtacgagtaaaaacttcttgccctcgatagattccttaaatttaatcattaacaactctaacccagtgatcagttggggttgacgagtgagttgttcaataatttctttggcaatcctactaatatcaaatgggtctgaaacacaaacccaaatcatgttacctttaaaaaggctcttaacttcagcatcattataagcatttctagccaaagtagtctttccaatccctcccattccaacaatgggaatgaatttgagttccttgtcatcttggtcagtccctcccagccttaactgattaatcagaagttctttgtagtcgtgttgaccataaatgataggcacatcaagaaaagaggtggtgtagtttggtcgcttcagtgaaaaaagagaatcatcacttgtttccctaaaaccgaacctgttttttctaagggtgatcatctctagttttctgtttaggctttggatctctttagcaattttaagacgatgagtaatcacagaaggactcagcttggtacaatgaaaacaagagaagagaatagaagacccaacctttagttctccttggtcgaattttgacttgagaatggctgtgttccatttatctaggacagagtccatgtcgtaggatacatctttgagatcttccagccagagtttcacagcttcttctctcaattgtctcatttcagcatctgtaagaactgctttgatggctaccagatttgctccaaggctttcaagctctttatctactctggtgaccagtttcaagttttctcccacatgttcttgagtgactgaagtcaactgctggaggagaacagagatcactgcatcagccatagatgagtgtgattaattgtttattgcaaatgaaagtgatgatcaataaacaataatataggatatatgaagagtaaagcaaattgatggttttcttttctccacgtatatctcacttggtattgactttgacttcctgtaaattaataaatagtattggtcgttatgcatatcacttcttatctactttgatttttcattttgttttagttattaggagctttagctctaatatataaataaatatatatattataataataattttaattgttgtcgtgagaagggtgtatattacattgaaatcctttactacaatatttatattacaatgcataataataataattttaattgttatgagagtaattgttgtcatggagtgcacgtatgattactcattggagtgtctttagtacaaacactcttcaaaagttttcataatctcatcaaattcaatcacggaattctatatttctatattttagcaaaagataataattatatgtgccagggtaaatattacaattttccagcatcaatagtgaacatattccttttttcctgaaagtatttcacttgggattttaatcacaacatcacaaaatctgacaatcttgatctttggttgtcaagaagtgtttttcagtttgggtaatgttaaatgttaaaattcaagtgtgtgaacataaagttagaattttttttttcagtgtttatcataactaatacagcatatttgtatgttatatattaatattgagtctccatttataataagaagtgtagaattgtgtgatccctttttcatgtttcctcaagtttaatagtgtcattgctacaatgaacaccgtcatgaagaaaaaaaatgaaagataccccgaaatgtatttttggggacggaagttgaagaaaaagaaaagttaaagaaaaaaaagaggtttgcactcctcttagttatctgtcaatcttgaataatcagccaatagtcacatgactgttattgtttacaaattgaaacaacacaattaaaacataaacattataccactttactacttttcgtttgcttcattattttttgacactgtttagttaaccttaaacactatcctctgtttgaggaataaatataaaagcattcatctcttgaaaataattttgaccaaaataattttattttaatttcatgatataactactttattttttaagattcaaattttaatacttaattttgattaaataaatgaaattcaagtttaacaataaaaagtatatattattttactttgttttgactaaatatattattttgattaattaacataagaagattcatatgtgtgaagatttataaaagtttatgcctacgaaaccaaaccagacaaccatacctccgcttccattatatggttctgtataggtaatcattttggtctcaccaagtaggagccccatgtctcattcatagaagttggcagctgaacccaattccctcatttccggctgcgaaaattccaataaactttgtagtttaaatattttggtaaggcaacaatagcaaatagtttactgctaagttaaaaccatttaaacatatgagcagaaaaattagcattctcaccttccccctggtcttacattggaatcccaagttcttgtcaccagtatgaaacattctcattaagatctacaccagattaaagcaatgcaagaagcaaactactctactaataatactataaatatactaactcagaattcattaaccatgttccaagcatcaaacctcaataaaggtgcctatatctattgctcccgtgataaatggtggtagaattcaattggctggcttgtgacaaaatcataaactccattataaagttgtgtctccatgtctcaattaaaattctcatgaaatttattctccatgtctccattagaattcttatcaaatttcaccggagcaccctgaatgttatcttcctcaattgtgtccttttagatgcttcagcagttgcaatggcaccctttgcagtctctgtattagctgctaggagttagttaagtcttaatcacacatacacagaaaacaaactgaaagaatagtcaaccaccaaaccttgttttacagtctttgaatcccaattgaatgtagtaggtcttgtaatttctctacacaatcaataccagctccagctgaaatatgaaatttagttgtcaaactgagcataagtgaaaaaggttaacaatggtgttttgaaataagaagctttagtatctactcctaaatcactggatttcgaaagcaagtcaacaaaatctaacctcagattctagcctctttcccaaatgatacatataacatatgcataggaatataatccaacaccctgccttttgaaatatccttggccattttcctagctctccactcatcagcttcttgatcatcttggtcaaaccacttatgcacctaagatcatcacgaagagaatgaatgaatgtgcaagcaaaataagcaacaaagggatatctattctcaaaagaaagaagtcaaaccttggaaggaacgaaagcttattttgtttaacttccacattttactagacaacctaacagctgcacatttctcctcccatgtggatatttcatccattatcatcctaaatggttcaagttgagctcttaatccaaaactcaggaaatttgaagtttccactgaaagtaacggtttagattctaaatcaactctactattctccaaaaccttcaccaactaaagcatcattagacccactaacaacatcttctttcaagttcttactgcctacaccagtacaaatacagaaacaaactaaaatagaccacaatcaatgacatatagcaaatctgcaaactcctataggcattcattcatacatctgcaacttctaacatctagggccaaagcagaaatcaaaaaggaagtaaaacagaacacatgagttacattacattaccataaatgatatcagaatgaacatcatgagtaattccattgctcaatcaaacctgctctgtatagaatacaacaccattatgtttcaaattcaatcagccattttctccaattatttagacttaaacaactttcattttttagacgcattaagagatgtagtagtacttgaattgcaaaatatgtttcaatgagccattttctttactcaaatcttgaaatttgatcatgtaaaatccctattgacacaatgcataggaaattcgaagcctcttaatcttataaaaagacagaaacttagaaaatattaaaaacaataagaagcaaaaccataaagttgcctgaaacgcacctattggcaggaatgaaaatcagccatgagagaaaataatgtgaagtcaagaaccctaattcccaatttctcattataaagctaaccatgctaacaatggcaaaaccataaaaactcgccagcaacgctcaccggcgaaaaaagaacagtttccagaaaacgacacgtcgtacaaaatataattagataaacgacatgtcgtacagaaataaaatggaaaataattgtcagaagtgggatttgaaccca

SEQ ID NO: 15433 - DNA, 9054 bp, Cannabis sativa
  modified_base (7294)..(7297): a, c, t, g, unknown or other
acaccacgggagttgagaagaagcagctaaagaatcaatgagttgccaagttttgaatcaaaagctttggtttggttccccatagataccagtcaaaggccaagggatgcaattaggagcacgaacaactacatcaatatggttacttgaacaccccagaaaaagaacatcatcattaactctccaaagaagagaaagaccccctttgtggccgtgagcttccacacagtaagctccttcaaaaccgagcttgtatttaatctgagtcacaacatcagttttgcaaaaagtttcacacaagaaaacaaaatttggcttcttttgaacaacaatgttctcaaggaattgacaggcccgtggactcccaagcccacggcaattccaacttaaagtattcataatggctggtgggcctggaaaccagaacccaccgaatgcaagttttttggatcaatatcaatttgacccatagtgttagtatggcccgtagtagtagcatggcccatgatgttaacgtggcccatagtagtagattgggcctcattatttaaaacactagcaaatcttttcctttttaattctgattgtgccaactcatcagcatcatcttcttgattactataaacaatcacctccttatttttgttacgtgattgagaaaaattaggggaagacaatcccatgaaattagcacggttgggattggcactggtatgggttggaccggttgcgttcacaccaggagagaagctgctgccagctttgctcaatcggaggtaaggagattcagtgaaattctggtgccgctgagaagctgatttcatgtgaagactgtatggttttacgataagatgctcaggagtatcaaaatgccgtgggcataagcgttccgaatgccccatgagaccacaaataaagcagaacgttgggacgttttcataccgaaaaatggcgtagaaggaactgccatcacgtttcttgaacttcatacgtcttttcaagggtgaatcgagagaaagagtgacacggatccgtagaaattcacgccaaacgcctgtgaagttgttggggtcgaattcgagaaacttaccaacgtaattaccagcatctttggccactttcatggtcgagaaaccggcctgaagatcgtgaatatgaacccatagatcaagtgtgttgagcggcacaaccctaggattgccaccttcgttgagacacttgattatgagttgttttcgatcgtaagtccacggactgcctttgataactcgttgaatgtcgatctcatgatagaattgaaacaaaaaacgattttgatcaagttgtttagcgtacatacctctgtcgggtttccacaagtctgccataatgttctgaaagatacgaaaatcagagatctttccagttaacagccgcccaacgagacaccatggattgtcagtgtgctgatcatcgtcggcctctatttctttatagaaagtttcctctgcttcttcttcttcaagctggatatttttccatccttcttctatctcattcaatggtgtgctactggaggccatgggacagggacagggacagggacagggagaaaatcagatcgcaggagacaaacacaaacaatcacaggacactcacagaggagagacaagtaaacactctaaaaagagagacatttggtatttttttttttcttctactttctttctttcttttttattaggtgcttaacactatactaatctggtacggtataattaattaataatttttcatataatttattaattaaaatatataaaatctaatattaaaataaatcaatcaaaatagttaagtcagtgatcctaagcattttcattttatagtttagttctttcataatcatgtgagtcagctcagccactaggcactatcaataatgaacacaacaaagaaaaggaaagccgactcaataatataataatatatgtgaaaaaagatggccatacatttatattggacacagaaagaaacaaaatatctgtcacacactgagtcacactcccacttatttatttctgttttcacacaagaacatgatctttttagattccaattcctttgaaaatctttagctaattaaatgaaaagaaaaagtacagccacacgtgttgaagaatgagaagactaaaagtccaactttgctccaacttttgcttagaagtttctcagtacaggtgacttttattagctctttctaattcctctcactctgtctgtgttttacttttcagtttatctttttcttacaacaagtattatgtttctaagattgagatttgtgtgtttttttttccactattggtcatatcaattctttgggttgtgggaatgaaaataacttctaagagagagagataaaaaagaaaaaaaaaaaaactgtgcatgaccgaaattcgaagtctgtagttaatgcaattgattattctgctcactgtttttctctgcagatgtagtttgttagagaatgagcttaaaataaccatttggtctgtattgaactttttgctgctgttgccagcagaggcctggcctgtacaccaagtaagtttttctagctcttttcagttcaagcaattttctgagtttgtgatgtttgtgttaatagtggggtcctattgcattgcatccaattaaaaatgttgaatatgaaaagattgtgctcaaagttgttggtccaaacttcactgttttgaatacaaaactttttgaagtttattagattctctaacatttgtgttttaaatccatttggtatgtgtatctagactcctagagggaatgaaattttaggattgaacaattaatttgtcaaaagaaatgatagtacacaatgtcagtagtgtaattaaacagcttatgatacaactaaattttctttgatagctcatgcaatgaggtgatctgagatgctaaggccgaaatggccgagaattttttgacccctgtgattgagagtttggtgcacctgctaaccaatgaagtacaatcgtttaagggggttagaagaaaagttgaatgtctaaagagagagctagagatcatccagtgtctcctcaaagatgcagatgcaaaatcggatagaggagagttgagtgatgctgtgaaaacatgggtgaaacaactgcgggaggaggctgatcatacagaagatgtcatcgacgaatacaggcgttatgtggctcaaagcactggtgacaagcgtggatttgttggctttctcaggaaagtaggcctccaaatcaaagccttgaagtcacgttatccaatagcttctcaaattcgcggcattaatgaatctctacgaagaatcaaggatgaaggacgagcatatggcttgagtcagtccctcggtttacagaggtcgagtagagaaaacacatacatggaggagcatgactcgcggttaggttccctgtttattgtggaagatgatgagtatgtggacgttccttccattcaagaggaattgagaaggagtttggttgaaggggggtcaagtcgtacagttacttcgatggtaggccaaggaggaatcgggaaaactactcttgtcaagaaggtttttgatgaggtgaaacacaattttgattgtcatgcttggattgatgtatctcaatcttatgatgtaaaaatactagtaaagagcatgatacagcaaatgtttgaaattgctggatgtactagtacttctacaagagaacaccacacaatccaaggactaattactcctctcaggcaatacttgcaggcaaaaagttatttagttgtctttgatgatgtttggaatgctaacttttgggaagttataaaacatgctttgcctagtaataacaaaggcaatagaatcattatcacaacgcgtaattctacaatagctgcggcctgtaaggaatccccattcgatactgtccaaaagctggaaacttggtctcaagaaatggcttggaagttattctgcaaaaaggcatttcgatacgagtttgagagtcgttgccctgaggagttagagagcttatctcataaaattgttagcaaatgtcaaggcttaccgcttactattgggactgtggctggtttgttgtcaagaacaagaaaagttcaatttgaatggcaaagagctcttgataatcttgattttgagtttcaaacaaatcctgaacttacaagaattacgaaaattctttctcttagctatcatgatttgccttaccatctcaaatcctgcttattgtatttcggcatttttcctgaagattacaaaattagttgtgacagaatgtatgagttatggattgctgagggtttagttaagacttatggtaacaagacacaaaaggatgtggctaaagagtacttgaatgagctcattgaaagaaacttggtagtgtttgaactttattatggcgcattaccatattgtcgagcccatgatttgattcgtgaattcatttattcaagagcagacgatttatgcttttgtagagttcttgatggaaagaacttgatatttggaggaaaaagcaggtgcttatcaatccgaggcagcatgaaaaatgtttcagaaacaatgaaagagtacaccagtgttcgttctgtgtttcttttcaatttcaatgatgatttgatcaggaacatgtcttccttagttactttgcttcaaacttgtaagcttttgaaggtgttggattttgaaggcgctcatcttgattatctcccagaggagattggatatttgtttcacttgaggtacttgaatttgaaacataccaagataaaagtgattcctaagtgcattggtaagctgcataatctacagagtttgaatcttatgtttaccttagtgcagaggcttccgaaaactattggcaaacttcataaccttcaaaatttgaatctcaagctcaccttagtgcaggagctaccattggaaataaataagctccaaaatcttcgacacattagtagcttttttaaggacaggactagcagcaacactagtagtgcccatggcaccaaccttggggtgaaaattcaagaaggttttggctatttggagaacttagagacactagaatatgtgaatgtgcatccttctggtgtggtttccttcattaacgatctagagaagttgatgaagttgaaggcgctcggtcttttgaaactgacaacagaaacttcaagggctatttgtgctgctaatgctaagaacttgaaccaccttgagcatttgtacttagcaacaactaatgaagattacatcttggatgtggagccactttcggaatctcccccacttcagctgcagaggctcaacttaataggccaactaaaggagctccctcgttggatttcagagctctggaatttacaggcattgttcttatccttctcaaagttgacagaggatccactgaagtacttgaaacacttgcctaatctcacgagtcttcgactacgcaaatcatatgaaggagaccaactacactttgaagagggtggttttcaaaagctcaaggatctaactttgttgaatttgaaagaactaaagctggtgaagatggatagagggacattgtctcaacttaaaacactcaacattggttcttgcagattaatggaggagattccagccggaatcgaacacttgagaaacctcaaagaacttaaaatccgggacatggcaagggaatttgtggttcggattcagccaaatgggggtctagattatcccaaaattcaacatataccaatggttcatacattttaaattaggtgaggtgaagttgtgtttatgttaaattgtcttgaattttctactagacataaccgtatgctgacaaattatatgttttcatgacaggtgattttgttatgaaaagagcttcagaatatttatatcaatttgtgtcttgtatatatatatatatatgataatgaaattccaagctactttgagctctgttttccctctttttttatagttgggaaaacttgatgtattactatggactttaaaagtagctgcaatgtatcaattatagtatgtatactacctttagtttgttatttgcattctttgcaatgagagcttacttgtaggagggcaagagcaatgacttgtttgaggtagtaacatttttttgtttttctttttcaagaaaacaaattatttaagttttttttagtgattaggcatatatacgaacagatgtagtgtggaagttgttaagagcagctcgaggcatgaaatatgtgggttgctatgtcaggtggtagctatttaaggaatagctattgcattggagagattttagtgggcatctaccattcctataaagtagcaatggtaacattccttatttttttaatattaaaaaaataaaattaaaaatgaaataaagaaaagtaagaatttaaaataaatatatattaaaaaatattgtgtgggaccatattattaaatttttagagttgtttaatattagagtattttttttagaaaaatgttaaaaggcatcaacataaaaaaagatttggtaattttatttcagagggatccaaagaaagtttactttttgaattaagttctaaaacaattctttttacttttttttctaattatttaaaatttatttaaaatatggtgcctagtatcatcatatctgttaatatcgttattgatccaattaactattgtgttttatatagttcgatgcaataatttttaaggagtatcggtatccaatcgcatgacaacatatctagaggtgttagacattagtgatgcccaataccaatattttttttaatataatagaaaggtagccaaaaatgatgtaaatgagagagaaaataaaatattatatttaaagtgatgtggagttttataacaattttaaccattgattacattggagatactctaatgacattttttaaaagtaaaactcagtaacaaaataaatgcctaatgagataatagtactaggaacaacattgttattagtggttagcgatattctttaaagttatatgacttgatatttaattttactaataaatgtatgatactttttagcatatctcgtactaaaaaaaacggcaaatactattttggacgttgtgttttgcaaaagttactaattaaaccttctgttttgttaaatgacaaaataaactatatattttctaaaatggtaaaaaatatataggaccctgaactcaattttttaacaattttattttttannnnaaccaactttaagataatttttaatacgaatagatataaaaaatgtaattagtattgtcataacatctttagattagattattattaattaagttttattttgacaaaaaatcagtttaaggtcttatttgtacaattttagaaaatacaggatccattttgtcatttaacaaaacaaatagtctaattaataacttttctaaaatacatgaatatatttaccaaaaaaaaataataaacatgtgaaattgtgaaaagtcaaaagacaaacaaactactcttaagtgcctataccaataacaagttacatctaagaagttagcttttctactcgattttttgaaaataccttattaaaactctactttctttactttaaacttaaatagtacatgaagctaaaataccaagtttcttaaacaaaataccactacaataaaatatatatattatataataaattgaaacgagtactaaccatcagatcataaactaggcacaaaggacggccacgattgtaagcggcaccaatgacgtgtcctatattatattataaatatcactcctttctctttctttctatttcttctctaccacttctcaaagcccaaatttccctctacacaccctcatcaccatggcaagcttcaattcccggtactacttctccaaacgagaaattgacgcacttctttttgtgttacttctcttagcggcggcgttagctagcattggagctcaggcgccacaacattcagaatacgatcatacaagtactgatgatgatgaccagaagacattatggaagttggatgcaagaacttacctgtatttctttcttgctttcattggcatattctccgtacttttttcggtcatgtactcgctcataagtttcttcaacccgtggtcgtgggtggagaccggacgcgtaggcggtggaggtggaggaggaggccgaggactcgatgcagcaattcttgagacgtttcccacatttgtgtattcggaggcgagtaggctcgagattggcaaaggtgatcaacagaaatgtgccgtgtgtttccttgagtttgaagacaatgaaaggttgcgtttaatccccaattgctaccacattttccacgcacattgtattgataagtggctaaaatccaagtctacttgccctgtttgccgagccaacctcaacaacacacacattggatctcaaaacgacggcgtcgaagaaagacccaacggacaggaacaaggtccatcaagattcacacgcggatatctccagctatctcagtactactcggccggtggtactagtactgctacttaatatttcttgatgatttttttctacgacgagtacgatttttccttattttccaattttatatgtgtatagattcatcatgactacttacaatctttgatgtttaatctaatatttcttttgtcatataaacataatgattaacttcaacgagaatattacaagattcagatttccatctttcttgagttgaccattttatttttctatattgattcaatgttgaattacgttaattacatgcatgaagtaatcaaaatattgatcaagaaatgattataataattattttttttcgtcaaaattaatcaattatcttcatggcctacctgttcttttttcaaaaaataagaaaaaattatagcagtgtaattaaaattatcattattatttatttttttccagtaaattaagtaatactgtaattaaa

SEQ ID NO: 15434 - DNA, 6420 bp, Cannabis sativa
tattgcaactagcgctgcaaaccactttagaaactcaaacagtaaattttaaaaaaaagtttaaaaacagtatataaggtaatttccctaataataaactataataattatgacatgtttggtttagtgtaatgagaattgtaatggaaacattattaccattacattgtttgctatcatttttaaacctttgtaatgactttacattataatggtcattacactatatattataatccccattacatcataaaaccaatgtaatgatgattacattgttagaaaatatctcaattattatagtttattacagagttaaaccaaacatgagaatactattcctattacaattcttattccattacattatcattcatattacaattaccatttccattacattacatcaataatgcaaacaccacctaataaatcattatctaacctataatgataggaaaatggagctgaagacactacaaggcagcacatttctcccaaccaaatggccaaaaccattataaaatagtgttttttttttttttggctagttcttttgggtacgaagttttaagacccactagaaagtagaaaaatggctataaattgttggagactactgcctaaaactccattttctacaaagcccaactctgtccttccagttccaccatcttcctccttctcaagacgagcctctctagttgtagctgctgctgcattttccccaatgacttacgataaggagctcgctgcggccaagaaggctgcctctctcgctgctacactctgccaggcatcgctcactcactctctctttcattatctatctatctatctgttgattctgtatataagttgtatatatgagtttctctatttctgcagtatgagaaattgctgtattcctaaagcccagaacactgattaaagatttaagaatgaatttctagtatggaacatctgacgtttcaaatcatcttttgagcaaaacccacgcagattttaatctagtttcttcttttgtgtggatttagctgttgttgtagttatcgacccattagaaaattgtggcgataggttaccgatcaaatttacttagttgcaaatcgaaataatattatttggatgttatggtgtttggggatttaagttaatgttttccttctaatgccaatatggatggtcgtctttctgctcatatccttgctgtaccttcttatctttggcctgttaagttaaagtatatatatatatatatatagatatatatatatagtgaaatctagaggtaataggtctcattttgtgcattatacttcccatagttttattcattacatttagcgaacactagttgggaaatgtttttggtcaaggatattgattcagttgatttcaagtttgtttgtttgtttgtttctcagaaagtgcaaaaggcactgttgcaatcagatgttcattcgaaatcagataaaagtcctgttactgtggccgattatggttagtttttatgtattcctatgtgttgacttttttaacaatttgacaatttaatgtgtatcttgatttaaaagaaggtacataattatgagtatcatctttcctttattacttgtactaaattcaggttcacaggctgttgttagttttgtattggagaaggaacttcctactgaattattctctctagtggctgaggaggtgaatatttggacttccgtagtctccttgatcttctttctctcattagttgtaaatttaagttaatcaacttccccaggatacaggagatcttcgcacggaaagtggccaggaaacactacaacgcattacaaaacttgtaaatgattctcttgggaatgaggaagtgtatgctgatacaccttcattgagcacagaagatgtgcttagagccattgaccatggagaatctgaaggcggtgctgttggcaggcactgggttttagatccaatagatggtacaaaagggtaagcttcaaaacttgaattatatacaacgttttgaaagttttttatcttcatcttcttcaaataatattgtatcctcacataaataattagtgagtagttaccttatttctccatgattgaagaataacgtgtggtatgtttgagcttgagtataaccctcatgtcgaatatcttttgcaacttaaagtcaactttacaccacaggacaaagaagaaaagttgaaagtctgtcaaaggataataaactagctaactaccaaacccttatttacaactctccatgttctctcttcttggatagcagatggtgttattgctaatgtacattcatctagacagttgtagaatgaatggggaagagtttatacagtaacatcttttcagggacttaatctttatatggtatatttattttcccaacataattttgcacttgtgcccacatctaataaaggaaataggattttctcccggaatatggtattgtagagttttagcccttgatttcttttgaaaaaaatcctccagaactataacaatcattgacaattgtaccgtaggtttgtcagaggagaccaatatgccatagctttagcattgctagatgaagggaaagtagtcttgggagttcttgcttgtccaaatcttcctttggcatccattaatcaacattcatcagaatcatcacatgataaagttggttgtcttttctttgccaaagttggtgaaggaacatatatgcagtcacttgatggttcttcaccagtgaaggtcgatgcctgctcacattcacttatttcattatgcatttaattattattttgatagattttctcatcaaaaaagtcaaaaaagtaggcattcgaattttgaaactgtaacttattacatgtgtggtgtccccaggtacatgttagtgctattgaaaatccagaagaagcatcgttctttgaatcttttgaagcggcacactcattgcatgacttgtctagctccatagctaaggtaatgcacatattttgcagttaacttctaagcttgctgtcattttccttaacatcttatttatcacagaaacttggtgtcaaagcaccgccggttagaattgacagccaggcaaagtatggggcactctcaagaggcgatggagccatataccttcgtttccctcataaaggataccgggagaagatttgggatcatgctgcaggatgtattgttgtgaccggtaagcatattaaagtttccaagtaatcttatttttcattctcttttcttgggttgaagttgcctgctagcagatatactcgatgcagggaggtatccgaatttccatagtaaagtaaagcaactgattcacttctcttcctgtatttttaacgcctgtttgttgataaacgtaatttacagaggctggtggtgaggttacagatgctgcagggaacccattggatttttctaaaggaaaatatcttgatcttgacacagggataattgttactaataagaaattgatgccatcactattgaaggcagttagagcatcaattgaagagaaggtttcttccttgtgattcatttagtaccattgactgttaatgtcaaataaatgtgtcaatataagaatttgtgtttttttatgtttggcaagtcatgagacagaggtggatatgttttcatgtaagcctcatgattatccaaacctgaacatgcttgaaacttcaataaaagtgatttcttcccattattgggagttgctatggccagattttgtttaagataaattatataatgtgaggaataagtagaaaaagactgtttggaacttcaaatgaaagtgattttcccttcgttaacgttttaattattgttattgtagagacattactttttacaatataccgaatttcagttattaaatagactctctttgcctagaactttggttctgagtttacaataacacatcgtaaaaagtgaagaaaaatgagttttttttagtagtgcttttcatttacattgggactttgaaatggtgatataatatgaatttgacaagaaaaaaaaaatatccataatgtgtttttttttaatgcaaataacaattttattagatgcaaacttcagctaccagacaaggtagcaaatcagtaggaatagactccatattaaaaaaacaatcaggatataacatagcaattaagatataacatagtaactttcgcgaacttatgaaccaccacattgtcagatcgattaacaaaagaaaccaacacattcctcaaacttgcaagcaagtttttacactcattaataatcaccccaaataaagaaaccatagataaaggactctgtaaagcttgtactacacataaacaatcagtttccactttacactattgaaagcttgatttctttatccaactaagagcttcccgaacaccaatggcttcagcaagggcaggttccacttgggcgtgagctaagatggtacgtccttcaatcaacatgttgctgttgtctctagcaaccatacccaaaccatagctccgtccctcgtcaaatattcctgcgtcgacattaatcctcacactatttgcttcatgagaaacccaatgcccatttccaaccgtaagctaacttgaagcctgtgttgtatcattttttcgagcatcaatccgttggtgaagataagtttttgcaacaacaactatattatcaggtcgcaccccttttcgattccatacaaaatcattccttgcaccccaaatcgcccaacaagtgactgccaacatacatttcaggtcattgttaactacttgaaacgcctccctacaccagtcaaaaaaagtagcaccaggagtcgtttgagtgcatattcccacactgtctcagcatgtcctgattacactgcaagtgactaagcaatggagaatggtcttctcatgctgacaacagatcaggcaaatgcttgatacatcaacccgcttgatacagaggtgtgtaagggtcggcagacaattcgcaccagccctccacaccaggttagaaacttttggaggaagtttcaggctccaaagtttactccagaacaaagacgcttcatcctcaaaccatgtgccttttaatttttggaatgttgagtatgcactcttaacagagtacatacccaaaacctctttacaccagaacaagtggtcaacggttgatgtgagtttcaatgggatactaagaatcaattgttgatccctatcattgaagagatctgcaactatttctttatcccaagttaaatcatccaaagtcattaaattagacatagacgcaccaacaagaacatggtggtccgattccaccatggggttgctgtcatcaagtagccacgactcaccaagaactgggataaaacttccgttgcctatgtattatctaatgccactcttcaacaggtcttgagattctagaatgcttcgccacacaaagctcgaattggctcatatttgggcaaataaaaacgtaccatgtggaaagtatatagccttaaacacctttggcacaagagagtttggctttgtcaagattctccaaccatgcttacctaataatgcaagattaaaatcgtgcaagtcacggaaccccatgctgccaccgtttttgtgtttacttagtttgacccacgacatccaatgaaattcttttcgatctctattagactgccaccagaacttattcataagcttctcaatttctcgagtgatatcaaggaattaaagcaacacactcatggcgtaactcggtaatgattggaccacaaccttcactatcacttcaatatctcgtatgtgttttaagaagatggatacctaaggactctattatacatggcagcttttagggtgggatggcatgtctgattcagagtagaaagtagaagtatcttttaataaaatagttttacgtaaaattgatctttaactataggtcctaagattttcacatgattatataaattagcatgattatataaattaaatttacattacaagcaaaataattttatttctttgtccctattagggttttttgaatttttttcgtaatttatatcgaactttcaatccaaacaccgaatgaacttgatgaagatcatttaaactaaacacttaatgaacttgatgaaggcttcacattagtgtctaccagatcaaccctcaacatttatgataagagtgggtttataaaattaaaacaaatgatgtaattttttatcataacttgcactcaattcatcatgcactgtgaattgagatgagagaaatcacaactttcactagagatagaaagagagggagacactatttgggttagaaaattataacgcataatttcttatcaccaaccaactaaatacatattatgtatata

SEQ ID NO: 15435 - DNA, 9581 bp, Cannabis sativa
  modified_base (8062)..(8069): a, c, t, g, unknown or other
tttttaaatactttgccaattttatccatgtcactttaatatactcttcatgtgactcttttatgtgagagtattttgggtataatatacataaaaagagatatgtttcaattaaatataaattaaagataaatttgattaattaataaataaaagaagtatttttcaatatactccaatttggacgacagcctacaaaactacgatgcactgcatttctcctaaaaaaatatagtaatatatgaaataataatataaattagtaagaatttatacccttaaaatggtcattctagttcatttaatctgttttaacatttaggaaaactttatagtatacttttttttctttataattgttgtgaatattgtactagtttaaaattacttataaatttttagattgtaaaatttaaacaattacttactatatgtataaaaaaattgggcactaataaaatatttaaattttattttttatatccttacaaaaaagaaaaatattttctacaatataatctagagtaaataccattttaaatcttgtgttttgcaaaagttattaattgaaccctctattttgttaaatgacaaaatggaatatatactttccaaaatagtaaaaataggatcctgagttcaatatttaataattttattttttaatataaccaactttaagacaatttttaatacgaacagatacaaaaaatgtaactagttttgtcataacatctctagatcagattattattaagttttattttgactaaaaattagttcagggtcctatttgtataattttaaaaaaaatacatggtctattttgtcatttaacaaaatagaaagttaaattaaaaacttttacaaaacatagagtctaaaatagtatttaccctataatctatttaaaaattttaaaaagtatatgtaaatagccataaataactataataatgtgcataattattaaaaaaaaaaattgaaaatttctgcaaaagactgaaagataaaagtataaagaaattttttaaaaagttttaagtgatgtctagtattttttctagttgccataacataagtaataattttaaaggaatattattaatctagagtgtcatttaacaaatagaaatcttcaagtagaaaaaccactcaaacatattaaatgtggggtaacgtgattattagagtctattttcaggaaaatggagtagtagcccattaattaatcttaaataatcaagccacttccctcattatatttgcgtgtgattggctaacaaaatccccaaaatccaaattgggcattctcaaacctcaaccagaaactaaaccaaaccatgtgggcactgccctacctgtccccaccctcccaactccatcttctcctccaccccaattccaaaaccaaaacgcctcgccccgtctcggccaattcccatcagccaccccaaaacgacgtcggaggcttaggccgtaccagtctcacagctctacactccaactccaattccaaacccaccaccactactactccaaacccaatccccaaaagagaagctagaagtgaagaagatgagacgcagattagtgggtcggatgtgctttgggctatgcagaaagcagccgccaagaagaacaagctgagtggtggtaagagtatgaagaagaagaagaagaatatggtgattatcagtaaaggagggttatcctctgtggacggtgacagggaagaagaccttgctggtgttcgacccttgtgcatcaacactgagtggggccctaagttggatgaattggagaagagtcttcgggagctttatcagacaaagtaaataagaatggagctgtgggagggaactgctttcttcaatataaaaacttcaacaatcattcatccttatgtaacttatgtttgtgtagtttttcttcttggccattcaaacttttcattatttggttttggttgttgagaaaataagtatttaggttaatatcaagtaaaagaaatgtaaattttttttgtctccaattctctatttggacatatctctttacaatttggccaactaggaagcaagaggcttgctataaggatacaaatatgaaagactctaaaatacattatagcactagacgatccactaatgacattagataccaaacaacaattgtaggttatggcattaaaaagagaaaccactattatgaacttggtcttcaacactcgtcatttgggaaattggttccacttgagactaaatgtttcaactttaatagttgacccaaataaataaagtatacaaccattttcttatattctccagtttcaaaaaaaaaaaaatcttaatgaaatatttcattacaaaatcaatgatgatcaacatattaaagtgtaaaactttgcttaaagaggaaacactattctatagtcaaaagaaggaagaagattgatcaacttatttaagccccaaacatgcaactacaaacaatttttgggttcacacatccaacatatttggccttttcattatcaacgaagaaagaagagcaataaagagaaaagcaaacgaaaaaagagatgaagcataacaatgcgagttgtctcattgtgtggcacaggcaataagaataaatgctttctctgatgggtgtcaataaaaaaatgctaacacaaaaagcattacaaccagataagttatacataaaatacttccttcctagctgtcattgagatatcaccaacattaacttgtgatacctcatttctttttctactcctaacgacccttttttttttgttttttttctctttttttgctataattttttttttttgaaattccgggacagggatcaaaggggtgggattgttattttgttccaagggatcatcatccaatcacaacatatctctttcacataacaagaaaagaaacagagataagctgaaatagtaagctaccactagtagggtctgtatctcctgttacgacttccttcatcactgccactgcctcctcctcgccctgcctgtccacttggaccattgtttcgatcaattctcctgggccgaggagtgggcatctgtacacctggctgctgactgcacaagcccaacatggtcagaaatgttcttaagagatggaaaatgatgtgatgaatattgagtaactacttacagaacatagccaattcgcccatctggaagaaccatgggcaccatttgcattccggctggcattggtccacgaccatatatcattggctgtagatcatgtacaccaatccaattaagaaaaagcagaataaaggcccagtcgagacaagactcaagagtaaaaaactaaaaaacaaccgaataacaagccaagatagcttttaaggtacctgctgaaaccctgcagcagcaacaccatatccagaccctagagtgccataaggatttccaggaaaaccgccatagcctgggtggggaagatggcttgcatgaggtgcggtattgtaagaataagatccatcaggttttctatcagtctgaggcttggcaaggacaacctctagagcttggcctgcaattcatatccacgaaagattcagtatatctacgtgtaaattcaatttatataatagttattccaaaggaaggagtaggttcagttcaaatgttggaaaatattatgcccatccaaaaaaacatttaggaaaaatcaaaaaacaagagcatagcttgataatccaataatacccttcattacttgtaagaaccaaagaattgtaccttttctccttaaaatcttacacctaacctattaattattttcattatcaattcagtaaaataaacctaaaatcaattttttgccaaaaggcatccaaatcccctagtattgaattgaagatgggagtaatttgtaatatacaagatctgccacagttattcaatatgaacctaacagaatcgccagataaagtaccatcaatttcatatttctctgagtctttgacagccttcagagcacttgacctttcagcataatgaacgaaaccaaaatcccgcttgccttgcccacctttgccaggtggcatgactacttttgtcacttcaccatgacgctggaaaagctccttcagttgttcagtggtagtattctcaggaatatttttcacgtaaagagccttcacctgagaatgagagaaagcatataaaaaataaatacatagcatgtaccgcattaaaccctacactactacaatattttgggatgcaaaaaaaaaaaactatagataagagcttggtagttctatttaccaacttaacaaaaaatgattttttcattcacataacattttagaagctgtaaagaatacagtaattacaaatacttttaattccaccactgttatcttaattgaaatttacctgcgccgtagctgtctgatcaggtgtactctttggatcagcccatgtaacagtaggagtatttccatcaagcttaaagttagaacttgacattttttgtcttgaataatcagcacatgcattattataatacaagacaaaagcaaaaccacgatttctggttggaatttgaggatcctgaaattgagcagtacaattgaacaaataaaattagttgtcatcacccatcaatctctgtaaattcatatgaaagcaaaacaaagcatagagagaagaagaataacaaaagagtttacctttattagttcaatgttttcaactcctggaccaacgtcctcaacaactttccgaaattcatcttctgtccagtgctttggaacattaccaataaacaatctgtgtttggtttcagacagcgaacatcttaatgttttaccctgcagagaagtttagcaaaattaataccaaagcaattggagcatattccagaatgtgtatgaaaaaaaacctgaaagtcttaaatagtaagaagcatcatgactaccttgaattctttactatgtaactcttcaatggcctgttgtgcaacctctttcgttttaaaagctacaaaggcatagcctttattctcaccagtttccctgtctttcatcaacctcacctgcaaaaaattaaaatcaaaacatcatcattagcagtaccaacagaaagaaaatactaaattcacaaggacaagaaatcatattttacctcaacaatatcacctatattatcacataaatccctcaaatcttcctctgtgacttctctaggtagtccaccaatgaaaacttcagacccatgaggaggaagagcaagaagttcagcgcgcttctcttgctcttcttcgtcaataggtgaaacaggcttatcttcaccttcttccacagattcagcagtaatgtggcttctttctgcatccggtgattgttctttatcactagctccattcatagaatcatgtgcttcttcagcattctcttccacattttcctcatcttctccatcactaccatcttcatctaattgttcttcaacttcatcatccatctcttccatgtaattttcatcatcaaaatccacccgttcatcgacttctgctccttctgccatgactttttcaagtctcagcttttatcatccaatatcccacctagaactgctcctatgtcacctgcactatcccaattaaaaaaaaaaaaaaaagcacagaaaccaataaagactcaacaaaatgaaatactagctgctctaggctctagctgataacagaaatacatttaagcttaggaagattgctctagtaacaaataagcgataaacaatgttcaggagaacaaattgtcaataaaacctcgaaaaatcacttaacaaacgacaaaagagaaaattcactagtttgccctattgcctcattttcatagaagagatagtacactggtaagtggaacataacaagtgccactgcaaccacaccatttatcaactaaattttcttacctcaggttcgtttgagtgagaaataaaagaaaatattaacaattccaatgccccaaattaaattagaggacaaaattatagttcaatttatgagggtttacgtttaacacataccttaaagaaacaaatgaaatcgaaagcacaatacttcaaaaggaaagaccgataagggttacaaccaaggaaagaacagcacaaaccatgaaaccccataaaccctattaggggaagagacccaaatgattaaagagggcaccaatcaatataaaacaacattctagagccaatcaataaatgcaacaaaacccataaaaaaatataatcaaaacaaacctaatagacatgaaaatttgaggattcgaacttaaaaatgaatcagaagtgaaacggaaagggaatacgaatacgaagtgtgagactttgttacataccaccagtggtgcaaattttgagggaggagatttgggtttcgcggttttgggtccttgagctatgattgggttggaggagaaagaaggtgaggagcggtgcggggctggggttggtgctggggctggagctggagctggagctggagctgggctttgatgtatccgacgacgccaaatttggggttttttatttggtgcagagcccttaagaatgacccaaatggacaataacaaattaggtttaaacagtctatgatccaatcaaattcagccacgtaacctctatgccatttaatttcatcatttagttttttctcactttttatagcatcgaatttcattttcttgaaaagcgatttatagcattttcgcctttctattttgtaaagatatcactttgcttatttaaatatactctgtactgtacaagaagttaaaatgaagattataaacatctcctttctaatatttgcaaaacaaaacctaaatatgatttacttttagaatattcgatgagtaatttgtagaaattatattttatactcactttattttatttgttttaatttttaccttcatttctctattcgttaagatatatcctcttttataaatgatgtctctattataccccttaaattaatgtaaattatgtgttacatttaagtggggagcaaggatatattaggcaactcactcatagaggtggatagattttaataaaatataatataagggtatttttgattaatgaatacaaaaaaaaagtattcctcgacttattccgagtaaggccctaaattttttgaagcccattgcaacatgtagtatttttttcttaaaaaaaattagacattttatttggggattggtatacacttaagtatagggatattaccttttactagcacttcaaataattttattaaatgttttgagtatatatgagtccacacatgttgttgcactttttaataattttgatgccttttacggtttatgtgccttttatggcgtttgtgccatttttgtggcttgtcccttttagtttatagtagttttgtgctatgatcacttggcaagagaagtaatctattttgtgctcatgatttctatttcgacgacttttctcttttaacagataagtatttcaattcttttaagtcattaaatttaagatggattaatttaccatctttctttcgctttatcttttttcattatattgtgtggtaatacagttttatgtttggttgttttgtaggttgtttcgtggagagtctacacttacagagaatttatcgataagtttaattttaaatataatatgttggatattgattttttgcagtttcttattaggatgctattttgttgttactagccaaagggtaatacctttgactagtttttcttagaaattttggttgattttttagttttttagtattgttgagctagtgatataggttgtgttttaaattctaagtttatttttaattttattttgagaaatatcattctaatataactgtatttttttggtttggtgttgtgatgtttttcagttttgctagctctgacgacaattttatattgggaaggtatcttttcaatgtgatgggctgttgtttgattgtgttattagctttattgtctaaatttnnnnnnnnagttttgtcccatgtggctcgggataagaattctgcaacgcatggtttggcaaagcatgcccttcggttagacgatgagctatcctggctcgaggaggtgctgtcgccgattgtggattgttgttttatttatcatgtgtgattttaatcaccgcgtcaaaaaaaagtacatggatattttttatacttttgttagtactttattagctttgtatttgcaccattttttatggtttggatgctttttatggcttttatgtcatctttatggcttgctgctaattgtttagggtagatttgtagtatgatcaaaatgggtaaaagaaaagtttcatatttggtattcatggcttctgcaaacgacttttgagatttgacagataagtgtttcaagtcttgatattatatgaattgttttacaatctttattcacattgtatttttttcattaaattgtgtggtaatagagtttcattgttattttgtaggtcgattttatggtaggcctactgttacagactttgctgataagtttttaattataatttatttgagagtttactattgagattttcttttagttcttaatatcatcgttaggggttaattcacttttctctatctttttgttttatagatagtttgtggagcattctgatctgtcaatgagttggtgtatagttttcgatgttacaagttgaagctctagctattttggtgtgctgtttgagaacgttatagctttattgtctaaattttcgggagcagtttgtctcatgttgctcgcttattttttgcagttaatggtttgacaatcatgctcttcgattagacaatgagctattctggttcgatgaggttactgcgcgatttgcgaatatctgcatcgtaaattcatgagtaattctaatcactacgtcaaaaaaaatataaggatgttttcatatatctctaaaaaagttaaaaaaaaaattataaaaatacagtcgtataaaatttcaaatattttttgcggtttataagtttttattacaaaaacatagatgatttattttatttttttgagttgtaatcttgttgtattttgttgttttattattatttttatgttgtatttttattatttttatattgttttcatgttattttataggacacgtaaaattgtaattaaaaaaaataaaaatcataaaattgaacaaaaaaaagattttgataaaatgtgaaaaaacttatttgattgtaaaaatattaaaattttgtcgaaaaataatatttaatgtaaatttcttttaattaattaatctcaactaaaaaattaaaagtaatgtagtattaaggcctccgaacattattctcatcttagatttgttgtaataagctattctgtttttttttttaatcccccctgttaggtccttttttggcaatttagttgtcaaaatatttcttaattaatgtgcattttattgagcattcaatttgtttttatcaactctagacccttttttc

SEQ ID NO: 15436 - DNA, 3976 bp, Cannabis sativa
  modified_base (51)..(51): a, c, t, g, unknown or other
tatttataactggcccaaattgggacttgatttttttataacaaattagangttattcttgaatagagtattattaaatagacgttgtactgtaagtgagtttctcagaaaaaaaaaaagaataaagaaaaaaagagtaattttaattttaaatacatttttattaataaaaaaaataaattagttggtttgattgaccattgggtggctactgaagagagaagagaaacttctttttttctgttttgaagcaatgagattttgaagtggagcactggaccaaatctgaagttggaaagatcaagtacacgaggagtacattttggtttggggctggttgcttgccacagatcatgaatgtcatatttggttgcccgagtcatgtggatgcacaggattggtcacccatactctcaaaattttcaaatacttatattacattagttactcagaaaatacaaatactagaaaaatcgcttttgggcacgaagttcaatagaagtagagcaatcttctgcaaagtttttcttaaccaccttatcttaacctgcactactaactgtcacaaaaatgcaaaagacaattagaggatttaaatagaaatggccaagtgggagagagagagagagagagagaaagacaattgggttcaaacctttgaagaagttaagacaagtgtgggtggtctatccgttgagcaatcaagttgattgctgcattggctgaagagaatgctccatgaaagctctcttgatacgaaatggtctccaattctctggccatcttcaacagaatctcacccaggtctgtttgtccctctatcaaacatttgtagtaggagtaagaggcaaccttgcttatttctacattggtgggttctgggcagtactcatcatccaaccatttgtgtaaagtaacccttagccactctgactcctaaacagattaagacccaaattcaatatcaaacactaatggtaatccataaagctgttgttgtttgttataataatgagttaatgaaacagcacaacaaatacttaatgccaaaaacagcacaaaaattactcatgaaatctgtaacaatgcatgtctcgtaacacttatatgcctagatatgactgtggtcattgaatgagggaatgtgattcatacttgtaagcttttccaattaagaaaaatgatgaacaataattgtcagtgcactataacaaagaatagattcatgtgctatatacatatgattaattcttgttcatttccatttcttttcacttttccttgttaaaggagaattttaggaaatgcctaatatttttgtaaataaataaataaataaataaaactaaaaatagtatagaaaaaagttttacaaaaatacagaggtacataatcctaatggggcatttggtatgaagtttaagcttcatgagaatggaaaagtaaaatttaaattaaatttgaataacaaagaatttgtgtttccaagtaagtctgactttttaaattaatatagtagtaatgttaatctcctcaaacgcatgagtttcatattccctctaagtttactccctccaattctactttctccaactcaaactcacataacaaacacctcattaagtgacatttagttggaaagaatgaaaatataactagaataaaagagacttctaatactttaaaataaaactaaacagaaaaataaaaaaaagtttcatttccatttcattctctctaactaaacgccacgtaagagtttagaatttattttctaaaataaaatttatgaatttgtaacaatataattttttaaaataaaatttataactaaaaattttaagttggtaactatttgtttaaggtagtgattttttgtttcgtctgtcagaattacataccaaatctgatttggaatggataatttgcattatggactatttggtgtgacaggaataatatcattcatggcaaagctcagaaacctgctgaagtttatgctaaagcagtagcttatttgtgaaattttcataaccataatacaatgccacaacctgctgcaattcttgaaggagggatcggaaaaggaagaggtcatgggtttaacctttaagctacaaattattaattgatcgtaaaatattattagatgtaaaatattattagatacgcttaaaaaaaaaaaaagatgtattgactctttgaaaaacaagaaaaagtttatgaaattgatctctatcgaagagaatggtctaatccgagttaccaatcactctatccaattgttccttaatcaaaccataaccacgccttttagaacattcgagaatttgcccataatcacaaatagatcagagcgaacaatctcaatttcaagcccaaccttcaaacaaagacaaagacctccaacagacccaacaacatcaactacctctgcacttggtactattttctttgactcattaaatttataataacaaagcaagagaccttttctgaaaaaaaaaaaaaaccatttgttacacacatttttataatttctataaatgccttattttattttttaattagtttgaaactgtgaagtagcttattttgtcaatatatattgattatctaataaaaatagttagtttaacatttttatttatttattttattgtttaataaaattaattaaaggtattttcttataaataaatttaaaatttgattacgattttgttccgtgatgtactttcacggaatgtatttcgtgctacattattagatgggtctcaagatacattaaatgagtatctaagtaactttttaactttaattatccctagatcaatctcagccgtgagatcaaataactccctcatctgacggctgccctagatcacggaatgtattccgtgaaagtacaatcacaggacaaaatcatatgcctaaattttatatatttaaaaaacataattgaattatattaagtttaatttttattgttattatttaaattaataattaaggaaaaacatgttaacttatagatatactatcacaaaatattaagaattgaactaattgagataaacttttcgacaaaggatgatggttgtatattgactattgagggatgaaaattacaaaaactgagtgataattcattagtgagatccagaataaactcagattgaacaattgaatgaaatacctccaaggccctggaagggggcaaccactggtctggaaccctaaggtcttcgacttgggcgtctggttcttcttcctccggagcagaatgagaggtcagagctttgtacaaatgttggtttagggttttgtttagagcccgaaattgcagcgacgagaggaagaaattaggggaaggagaagcaatagcaaacgtagtggatgatttggaattgggattagagggttggaagggtgtaattgtacatgtgattggagaagtacacaatagtgatttcatgattgagaaatgaaatgagatgagagtgaaaatggttggttggtggtggcgggaaagaaactctggattttgtctactcaattactcagagagacttgttgatgggaggcttggatttacaaggttcttttctgatttaataattttatttaattttactatttcattctttatatactcaattatgttctctaaattttaatctctaccaaatcataatcctcaaattttaacatttactaaattgaactttcatttatgttaaattttttactaaaattgaaaaaaaatctttaaataccagcaatcttaatagtccagagtatttagagtatttttaactagagacataatttagtacatattaaaatttagagagtaaaaatcttaattattcttattcttattattattattattattattataaacataatttttttaccaaactcaagaaattaaataaaaatgaagaatttttttttgggaaaaaaacaa

SEQ ID NO: 15437 - DNA, 8552 bp, Cannabis sativa
  modified_base (4493)..(4496): a, c, t, g, unknown or other
  modified_base (4550)..(4568): a, c, t, g, unknown or other
  modified_base (4799)..(4800): a, c, t, g, unknown or other
  modified_base (5274)..(5275): a, c, t, g, unknown or other
tttttttttaaaaaataattgttattaaaaaaaagagactgctagaaatgtgacaagcaacatcatatcaaaaccttttactaattctttttaattaaaaaataaacagttataaaagatggcataaaattaaacaggtgtcaaaatagagatatacgcaagtttcatactattttaaaaaagacagtataaaaagtgtacagtaaaaaaataataaatggcgtgtcacactataaaagtaacgaaatataaaaaacaatatatcatgtaaaaacccctattttttatttttatttttttgggtacaaaatataaggtgcttctacaatgcaccccctaaaatgagtacaccaatgcacccgtatctgttttgacatctagaaaaaaatctcatcttaatttttttttcatagttgtgtatattataattatttaagacatcctgtaaaatttcaagaaattcgaaataatttataatatagaaaataattttcaagtagtctatttcacacacgtataaaataaaagagtcacgcgcaggggcggaacttggatgagaagttagggggccaaaatattttataaatttaggtttgtttgataacttttttaaattcactttttatttttataattaaaaaatgaaaaaaaaaaaattcaaatcatgtttggtaaacacttttgctttttatttttttattcaaaaatcaaaattaataaaattttaaaaacacaattctttcacttttaaacatttttaaaatcagtttttcttttttcattctcccatatgatctactctaatttcttcttcttctctcttgaactcttccatggctgactgatccactttgatttcttcatcaggtaaagcttttatctattctactctctcactccctctcctctctctctctctctcactttctctcttctctctctctaacatcatctcttccttcaatcttagatctgagaatagcacgacagtaaaataggtttgtagggatgattttctactattgaaagtatgattatattgttaaaacatttggattcatatgtataatatgtttgagtttatgtaatgaccgcctgattagaatatcaattagtagggcaattagtattaattgttgatatttaataattttacgtgattatatttgttgtatgccctatttttaaggaatatgcattagagttgtaatttctcaattttagagattttattaaactctaaatgtattatgttatatgtgaaatttataatttttatgatttttgctcggtagggatagaaaatacgacggatgatcgttaaagtcacatgggttagcttagaaactttgttctaataggacaaacattagtgatatttgggaatattgagattatgtggggttatggtgtttgaatattttacccctaagcataaaagaaaacttaagcttcaaggaagggcatttttagaaatgttacattaagtggattttgtcttgtagtggttttagtagaaatttccttagtattattaagccgaatgtttttattattattagattcattaattaaaagaaattaggaaagaaaaattagataaggttaacctacctcttggtccccttttctctttgttcggccctaaggagaaactaaaaagaaaactcctcttcgtcaaaattctgagggattcagtaagtattcaaagtgtttttgaagctaggaatcaaaggtaaactctagtaatctttattctttgattttcggaggtttttctttaggttcaagcttgcaagttgttcaattgtgttctgtacaattagggctttgtttttggctattttctgggttaattttagattgtttgacatttatttaagctggttttgatggttatgtgagtggttgagcaagtttgaatttaaaaactcaaacttggctcaataatggcacttttcatttccgtgaatatatgttgttgttactgcttggaattggttgttgggtgtcattgcaggtatctggaaagtttggttaagtttgggaaagttttgagagagatttaaggtttttagggttttttttgtagataatcggttaacctattctgtagaactagttaactatttctccaggcaggaccttaggaccactttgccatttgggattccaatttaccaatttaggtagtttctagagccttagttttgatatttcctcgatatttagggtattgccatgctatttattgatgggaaaaacttttagttgagtttagatcctgagaaggttttagtaagttgtttaaacatttatatgattgtgacatagggcctccgttcagcgagtgatttttcattcaggtcgaccaacacacttgtgtttagaaatgaggtaagattagtatagaacatgtatatgtatatgtatatgtgtatgtatgtaaattgcatgatgtgtttgtgattcatatactaccaacactagtatggtagtgatactgagtacattggtacaatatatgatgttcaaagggtacaattctgtgttaccaatactagcacagttaagtacatagtgcatgtggtacaacactcagtagtatttggggtacagttctaccctaccaacactagtacgggacaagtacttagtgcatgtggtacaaaggttgtacttctgttaagaacattcttgatcatttgtttagccatgtggataggtgtatgggtgcctaaatacaagtcggtaatatattatatgttgtatgcttttcttactgagtttgtcgactcacatatattatttatatgtgtaggtaaagaaaaggctaaggctgagcaccagtgattctagagttcggtctcgagatgaattgggcttcattttttagtcgatgtgcgacatatttgtaaaatttattttgaaaatgaatataagttttaaaagtaggatcctgactttttgtatggatatatgtatgtatttataaaggtttaaaactaaatcaaaagtttaaatttgtcacaattttcgaaaaatcctttaatttgcaaaggtgtgcacagtaattagaaattcactgtagcgtgcctaagcattagggtattataattttggtatctgagccgccaggttatttaccgaagatcgtcaagacatgtacaatcattgttagagacaagctcgacccttggttcagtaagcctttacttgtttagtaagttgtttgatttaaaaagcatgatatgaagcatgttagtaatatgttatttgtttaaatgcgttgcctaaaatccatgaatgtgatatttaaagttttatgtgatcactgtctggcctacttgacttatggattcacaggctaagtcttataatatggacacccagcaaaacacgagtcaaggtaatatgtgttggaacttgttttaccaggatctagatttactaacatgtattttgattatagaactataatctaacattctaaatatgaatttcctaaaacaatgaaataaacacacataaagttatagaaaaccttacattggtagtagcagaatataatgtctccttctgtttagatctctaacccttaatcctttttgtcgtagagtatgatcaagatctgaacctggatcttcttcagttgttggaattctacacaatcttccataaaggtctaagtattgacttgaattgtgtgggtaattcctcaatccactatatggtttcaaaaatatcataggaagaagaagaggaaggattcaaaaatagaatagaggctctctttttattttctaagttgtttgacaaagtagtctgataattggttaagaaaataagagcatcttattctatttataggatttcatctagggtcaggtttagaattaaatggaattaaaagaaaaaagataaaattggctttaattgaaccttgttggccgaacttattgtgggccctacagggtttcaattttgccattttatttaagaacttatcttctctttcacaaatgtcatattttaattctaactctataaatgtcaaatctatctatttaataattatagttaattatcaaataaaattaacatttaacttatttattaattaggccttacaaagtctattaattaataaataactcctaatcctctctttcttctcaattaagccattgcttagtgaaaattcacaaacaagacatagtcttatttagaattctataattgattaattaaaactaattaattgaatctacaagacaatattatcgcagacaatgtggggaccatgggcctatgtaaccaagctcttaataattagattcgaaatttaccaagtaaatttcctaatttattaattcctcatgattccactatagatttggaatcacactcctaattacatagaacactctatatcttccaaatatagataagctataaattatccattgtttcaatctaaataatcaaagatnnnntatagatgatttacatcgagtaggtacatatttactgttctacccttcaatgtnnnnnnnnnnnnnnnnnnntagcttcctataaatgatatttccgtaaactaatataattactgaaataagagctcttctatttatgtctgttaagccaagctcaaagaaaatcatcatttcacttctatataattatagaagctatagatttcatatctatgattaccgctcgcactcaattacattaccatattctgaagatgtaagtactgggccgatccaattggtcaactttaacgaacaagtcanngaacataaataatacagttaagctagaacctaaccatctcaggattaagatttattaacctaagatcaacttagtgatattgacttagaaagatataacagtaagtttatgatatctttttccactatcaatatcagtctagtctgatgtatattccatacaaccgatactagtatactttactaataccctaaaaaggacataccacatatcaacgtgtaagtaaactttatcattaattatcacgtcagtgtaaattcagtgcactgataaattatgggattaaagactttaaagcatataatcacaattattttctactgtgatgacatcactgttattgtgaataactatatgttctggatttaacagaaattgtgttctaaaaccataaacatgaaaactatatgtaaacttaaatgacttctaatcttctattgatagaaaataagattatattgaaatagattttanntagggcataaaatctcaacaaactcccacttgcactgacataaaactagaagtacatttcaattaatctattgtcttgatattcatatcaagtgtagtgtgttgactatacacaaataacaggaattgtaaggttctagtaagcaatagctttctctaccattacttcattttgtattcataaaacattatggaatatcatttttctatatgtattactcttttagggatactgaatgttttactgcctcataagtgcatctgaatatacaaaagacaaaactctcattctattcaaaatggaatagagataaagcagtcaagaactttcttcagtttgaataactttctagtgtcttttaaaaacaacttagttatctagcttcactggtggaactaaattattatagattagttttacaccctttcagaataattccttcactcccaaagtaattaccatctcagatattaagttctgagttagtgtaaatataaagattctaaatacacccatattcatctaacatatatgtcacttttagagattctttcttgattgtttccctatgttcccttgttggattacatatttgatggctcccattcaatagtaggagcatgatttaatgcatacacaagtgtacatttaacctcttactattggtacttagggacatcctgttgtgacattttatctttatctggaaacaataaattctttatagactgagtcatcaatataacattctagtattaacattaatgtaaaatacttgcttaagattaagtaatcactagagatactataaaacacttcataaggaccaggaattgtgcttaagtcttcgaatagacattgcaagatttcctatcttattctcatacttctgataagttacaactatccatatgaatggttagattaacttttcttagctttatctcaaaagttcctttcttgaacatatcattgtaactcatcactagtgtcatccaaataataacaagctggatttgttaaaatcctcccactacgataaggtaatgtgattctatttccagggactttagtggtatctattactattgtatgagatattggaacatatataggatcaagaataagttatactagtttgttagcttaagtagtatattatatctatgtcttatcaaaatatgtgtgttatagatattttgtggtattttgaatatagtttagagttcattgtaaaagatctttgaattatatatatattactaacttctccacccctatcagatcataagatcttttattaaacaaaattttaacaatttcttaagaaatgacaattattcataaacggatataacttcaagtgtttatgtagtattatctatttgctgagattattataccatagattttgtatcaataataaatgtgaaacacataaaatcttgataaacagacaaatataatttggtattggcatacaagttacataatataatgttaaattcataaaaccaactcataaagaaatcattttaaagagaaaaatttaaattaatactctcaaaaatgtcacaatgaattgtctgtaataatataaaataggaaataaaatttccaaactaaattgaaacaaattattcaaaaataaaacaattaattcaaaataacaaaaattcgagcttcatcttcaagcttggacaatcttcaccccttgccgaactatccatctcaagtcactaggataataatccaagactaagcagttggagctgaaataagaagaacataaaggcaaaatcctaagattaagaatatggattagcgaatcctaactagataaatgtgtgtttattatggaattatattattatataatttattgtatatgaattactttcataaatgacaagttaagaccccgttggggagccaggggcatttttgtaattttgacccaagaagggtaaaattataaatttaatttaattgtgtgcttatggattatattattatatagtatacttgttttgtcctatttcaagtgttttctgacaagtcggcgcggtatagtcataatcgggtatttcggtccaaactgggtttggggccgaaatacattttgggattttattttggcattttattgatatatgagtattctaaaaattacttgaatagtgtgttatgtgattaatgactttattgcccttgaatgtgttatgagaccttagggacaatttgtcgttttgaccacttgatttattgtccaacaaaatgcatttttgagtaatgaaaaggaattttttctgatatttttctcagccctaagaaccaatctcttcgtctctcttttactctttgccttgaatctgtttattttgagaaaatcacttggatttggtggtggttttgaacagattcttgttgcactttgaaggcttggatttgaggtagttttctcttcctttttaattgagtttgttgctgaattagtggaagaaggtatgctatgctttggttatagtttagttcaagcatgcatgtatggaagaatttggtgttaattttaatgttcttagcttgattgtgttgttgatgaggagtatgtttacttgtaatttctgatgagatttctaaggttatattgtgtttgaaatataatctttagttctgattttttttgttgtgttcaagccctgaagaagaggaatggtgacagctcgtgccagactccctcaaccaaaagatctcaaggcggcgaggctccgtccaaggagaaactgccggccggagaagtaattgacctctctgagataatgcctgctgtggacccttcggtctaaaaggtatcaaaatccaagagttccaaaggggggagctcggatggatctggtccgacaaagacttccttaattgccgcggttctaagctcagaggccaaaaagggcaaggacatgctccagtattaccttgatcggtcacttcccgaggtgagcaatcagttgtccggggcagacaatgagttttccttacaattggtgatggatggagtcctgaaggaggttgctcgggtaaatatcatcttttttgttgttattgtctttctactagtttaggttttaacattttctcgtgcaggtcactctgacgatagcctacgcctactcccgagccaaatccacgactgaaaagaatcttgccaccactaacactttgtagagggaggtggattcagccaacaagaaggttgtggatgtgaggaatgagctcgggg

SEQ ID NO: 15438 - DNA, 8613 bp, Cannabis sativa
atttttcaatactccttatatataatgcaaactaaagatgatgagttgactctctaaaatttattaactttagattatttatattttgcggttgatttagtttaaagtaatttggttttaaaaaaattaaatctttcatatattttaacacaaaattatacatctaattaatatatatatatatatatatatataaagataacaaactcacattactatagtaatatttcaattagataatgtgatttaatattttaatattttttataacataatattttaacatattaaaatcataatttttattatttttttatagaatattaatatattaattaactaatattttttctttaaatatattaaatataaattttactttttacaacataataaaaagatattaaacaatcgggcaaggcgcggtattgttccctagtaagaaaataaagtaattttcaattaaatatttatgtgtctttattatccacaaaagtaggtcacgatttgacaactattaacgtgatgtggcgtccacgttagtagaacatcaatgtctcatgggttgggtttcaccaaatgagcccaaaatcaatgtattatttatatttatcccatcaatagacaatgcatacatactagaaccctaacactataaatataataaaactcattcatgcaaatgattagaatgtcattccttcagtgtcgagacaaattctagggttcaaacacttgtgtaaatcataagatttttccagtcttattataataatattaactcgtggattagtggtcattaatccttgaaacacataaaaactttgatttcattctttgtttattatgtttctctaattttattatattttattggtttttgaatatctcagtaaatattttggtgctttcattgagagctgaagaaagaagtgataccaacaaagttgtatactaacagctataaacgactgcctttcattcctacactatacaaactcattttttactcaaaataaaatgttgggcaagcatttatttcatataccaaacatattaaagtgattttaaaagcacccaagtttaaactctaacaaaacacttttcacacactttgagccaaaatttgtatatatttcttttaagtgtgattggaaatcactctaggttcttcattgtattattatatttctagagggagtttgcttgtaatcataaacacatttccatattgtgttgaggtgatgttgacaccgatattgtaaacaacctgattagagtgagattggcactataataatctgagattgaggttaatagttcttggcagtgtaaaactattgtaagaggtttggaaacaccttcgtgaaaattttccagttttaagggttagttaagcccactaagttggctcgatattggaactcaaagctaggtccatggctttgaagactaatgatgtaggtggctttgttctaccaaaacttgtaaaaattaacagtttgcaatttcttacccttaaaatctttactttacaagcttgtttatttgctcaacatatttgcttgccatactatttgcattacgtgattaatttgatcaatttcataattttgtattgaaagttttaatttattgaaatttgttcaaatttccaattcactccccttttggaatcatatcttgggttaacaatttcagtagtggcattggcaagacttctatattcagcttcactgttggatggacactgtcttttgcattttatagctcctggagaccaggttggaccttagatagatgcaaaagcctgaagttaatcttctattatcagggtcagatgcccaatcaacatcacaaaatcctgtatgagccagttttgagcatggttttaggtttagaccatagttaagtgtgcccttgagataccttagaattttcttgagtactttgaaatgaggctcaagatgattgtgcataaactgtgaaactttgttgactgcatatgctatttttggtcttgtaattattgtatattctagggctctgactagatttctgtacaaatgtggatcagcaacaggttctccagtaagactagataatttttctgtgttggacattagatttggcagagaattggcacggtccactttcgctctatgtaacagatctatgatatacttcttttgacataaatgtaggccatttgggagatgatgcacttgaatttcaaggagatagtcaatagagccaaggtcttttaatgcaaaagctgcattgatctattataagagctgataacacaagtaaggagcttcctgtgacaagaatttcatccacataaacaaggatgaaagtgacatgacaccctgtgattctcataaaaagagatttgatcaacttttgttgaagtgaagcaaaaggtatgcaaagatattttaaatttatcaaaccaagtcattggagcatgcttaaaaccatagatagccttttctagtttgcataccaaatgtggagagtattgattaatgaatccaggagactgagtcatatatacacctcttcagttaactctccaactagaaagacattatttacatcaagtttccttattaaccaaccatttgtcaaagcaatggttactatgactctgattgttgttggtttgatgagaggactaaaggtttctataaaatcatagtcatattgttggagaaaaccttaagcaacaagtcttactttgtattgagttactatgctatctgaattctctttttccctaaacacccatttgtaaccgataacaaaagaacctaagttttgttctatttcagagcaactattttaatattcatagttgaattccacttatgagatttgagagtagtagccactgtaagagctgtttgagaagccaggagaacttttggcttataagtagctactttggctcgagtcaccattgggtgattgttggtgacaggtgcaggttatgttatgattggagcaggctactccttagaattagatgcaaaaacaaatgtgttgtgctcatttggctcagtaacaaatgtagatgagagatcttatgaaccaacaagattagttatgtctacagatagatgataaatttgcaagtgataaattcatctacactagtatcgaaaggagcaggttactgattctggaaaataggtggtgatggtggtgcttgacgagaagttggtattataaatgaagtaccatttgaaacatatgagcatggaacagtcattattagagatattagcaatggaaaaagtatactcatcaaacaaaacatctctaaaaatgcaaattcttcttgaagaagccaaacacttatagacgttgtgttataaactatagccaatgaaagtacatttttcatatctaaactccgatttgtgtttattatatggtctagtgttagaaaaacaggcacaaccgaaaactttgagggtggagtagtcaggttgcttatgaaataatttgttaagaggagtatctttggatacgacaggagtggggagcctattaatgatgtagcaagctcttctaacaacttcatcccaataagagagaggcatggaaacttgggcaagcaaagtgaaagcagattctattaaatgtctatgttttctttctactacaccattttactggtgggtagttggacataaaaatctatgagagatgccattttgaattaagtaaggctctgaagattgaaattcacccctagtctaattggaaagatattatggaaggttaagttctttttcaatttgagttttgaaatttatgaaagtttctaatgcctcatatttagctttgagaaggaacacccaagtgtacctagaaaaggcatcaacaaagtgaatataatacctatatccacaagaggacaacattggggaaggaccccaaatatctatgtgcccaaattgaagtggttgagtgaatatagtttaaaaattaggaaaagggaacttgtgtattttgcctttacaacatgcatcacaaaaatcagtgacacttttatttctttgaggtattacatttgaccattatgacaattacgactttagcagaaggatgttcaagctttttgtgccacaaagaaaagaaattacattgagaatgagaagtggatggaacatttgtattggcaatagtgtacactttattagaattgaaagaggaaacaaagttggactttttgagttgagtgagatctatgaaatagagacattgttggactttttgagttgagtgagatctatgaaatagagacattgtttaagatgaccttcaacaaatgtctccttcgaaacctactatttgatgaaacaatgcttaggataaaacacaaaaaaagcattgttgttagcagcaaattgacatacagaaattagattttttgtgaaatgaagcatatgtagcattcaattaagaaacaaaggtttgattgagtttgaaatgtgaaagagtgtattacctatgttttgaatggggaagccatcaccatcacccatgtgcaccgattcttgaccaaagtatggttgttttagggagaaattggcagaattaggggtgcaatgagaggttgctcttgagtctgggtactaggcttcatctgtgactttgtctgcagtggccacattgattgatttcttgtttacatttgcagcacctactctaggaaaatcaaaatgaatcgttgataacaaaaagcagcaaggtgacaagttcttgaacatagttgacaaactagatttgatctgataggcatgtttgaagaagcaacttgaggaggaagggaagatccacagacttgaccagaattattactttgaaaagaagagttagactactgacctcgaggagacagcataaggattccacaatccatgaccttgattaggaatgttgttgtctgcattatgagaaaattgtggagcacattgtggttttggtataaaaccacatttagtagccaaattaactgaatcaagatccttgtatgactttccatttgatgttcttgagacaataacaacgtctctatctcagcaatcaaatattgatcatttctagaattgacagagataataaatgtatcatagattaaaggcaatcctttgaagatttcagctacatgttctttgatagaaactctatgaccaaaagacccaagtttgtcaacaagagttttaatttgaagaagatattcattaactgataaatgacctttcttataattttgcaactgagtagtatagaaatcaatttttgcagaagtttgagttacaaaatatacctccaacatcttccatacttgagcagaggtttcagctccaacattcgagtgagagtaacatctgacatagatgaaagtagctatgaataaaggagctagtcctggacctcccagtcagtgaagcgaggattgactcgacaccgtacttaatcttctttagtgagatttctttcgtggtaattgtaaggaatcagagatgaaatcttccagacgatgacctcgaatagcagacaagattttaggacgtcaaagtagaaagttattgtcatcgagtttcacagagactttgtgagcaaaaacaaatggattgaatgcttgagtaggttgagcagtcatcgatgcaacgaagaagcaaagaacaaacaaacaaagaggaaaagttgcaaaacacaatcacagatggtaaaatggcagaagcaaaaaagttgctcgtgataccatgttgaatataaaaatagaggatgaaagagaagaaatgattgaaatgaatctcattatattgatatgaataaacagtagttctaaaaatacaagatacaacacaaactttaactaacctataacaataattagttaaatgtgacagttggacaacataaatcctaactaacactaaccataaactaactacttgacaacccatacatccatagagagaaagtaaccaaagaagaaaaagaaaaaaaaagaggtaaaaatagagagaaaatgaaaaaggaataaaaagtgaaaataaaaaagattaagtcaaatccaaaagtgcgagagaatataggtctgattgatattgaaagagagtaaccacaaaatagaggatgaaaaatgaaagtcactcacacttattatatactatcagactatcattttagatctttaaattcttaattattacatacatatgtagagagtgaatcgaaatacccaagctcatattacttaagattgaattggataccttaaaatagatggtaagttggagaaaaattggattaccaaatagggtccaactaaacaaacaactaccaagtttagcttgggtatttcaaaatctatgagaaaaactccaaccaaacaaacactagtttcttttcttttctcaacgatgtcttagaaaaagaaactaaaacaaagaataatattatgatatgcaacaaaattataacacataccaggcagcatggtatctattaccattttatgtgacaaacagcgattgatataatttaatatcagattgtacataattgattttaaattgcaccaatttacatcacgtagtgttgaactgtgccataacaatgctccagacataataacacaagatcaattacattattagcttcagaaattatacaaagctttggcaattaaaatcattggattacttgagtttgtaaagatatgtatcaaggaagaaatggattgtgagaggggtaggattgtttttgctttgtgtaagccctggtaaacaaacattgcaatacaatgcaatgggggaattgacagttagtaagaaacaaaaagaaaataacaagacaaacagtatggtactatggtcactccactcacctgctgccaatgaagcctcctagtgcaagtgttcccagtacaagaaataggaatgggaattgaactaataaagcatgatgtctcccttgtgtcccccttggaattggaacccccctatcatatcttcttcttccccttttacctacaaactcttatcaacacaaactagtacatgttatatttatgtaccaatataaaaaccacaaacataataatatacatttatatactataaaaatattttacaactcaactttagaaccaagaaaactcaagacaacctttaatgaccatagttcatataagctccctcatcaaaccctttcactaacaaaactaatcagaacagagtatctatggaaatcctcgattgaagaacttttccaacctacctagtaacaacacaacccaactatatatatagttcatacagcttagttgaacacagattctgaacccaacctttttttttttttgcttaaaaaacaaatactttctctcttccacataaaaatatcacactatgtagcttgtctaataaattttttatgtgtctgatctcaaaaagaattatattaagattataaataaatttatatatacataataactaccatcaactgacaaactaaagcagttgtaatctccaaaaatacaatattatatacatatatgcgtgtgtgtatgtatgtatacctggtgagggtgagagcaagaaagagtaagcctctgaaatctagatgaagcagaatcaatgaaattaaagattgataatatgtaataattgtgaacagagaagaagaaagagaaaaagggttttgtattttgtactgatttgaagttagactcagcaagaggcttgagatgaggtgggaaaaggtcaggatgagactcccatacctttcttctgtaagctgctttgagctgagaatgattgggttcacaattgggagacaatcccagtaaaattcgagccctttcccccttctcctccattgattttcatcttcatattttcactatttataactactctctctctctctctctctcaccatgtctcttccttcctaccaaacttttaatacccttttcttttttcaaaaatgttcccgtggttcaataccaaccttatatatttcgatttaatttttttttgttaattttgttagaccttattaagtactttcattaaaaaaatccaattaaagtaaaacataacaattaatttgattataattagtttatttaaaattttgtaattactctaaaataaaatttgaaatatccatataattgtctatctatctatatatttatatatctatataaaaaagagatatgagacggtgacatgtactttatttctctattttttttttattttttattatttataaatattattaattagttaattaaaaaaatatttatataaattcaaaaaaaacatatactaaaaagtacggatgctttatttatctttaccttattttctctatttacccaaatctgtgtattttttttttatttcttatacttcgttcaatgatttggcatttttttctacttaatagttcaattgcaaaggaaatgtgatttcatttatgtctttgaattcttctataaatttatgatgatatatagcatgtaataatacttgtacaacacaattataaacaaacttggttgacaaacat

SEQ ID NO: 15439 - DNA, 7425 bp, Cannabis sativa
gaatatgccacgaagacttcgtaagaatcatcattgggaatggcccgagatgataatatgtcaaactgggcgctggtgactaggttcagtgtcgatgtgggaattaggtcacttatttggcctcaaggttgatgtatttctttcctaagtgtacttgtttccatatttttgatgaagaaaaataaaatgcccaagaaacatctgtagaaagttgttggaagcttttcaagttgacaacatacattaacttgggcgctaggtgcatcgctagatcaagctgggcattggtgtctaggtgcctcaaatgacaaattgcttcgattatgattatcgtgcctttagcatccttgtgataggtcttatacatgtctaagttcaaggtttagtcaattttcactaagatagacttgaaaactaaaaccctagcctagaatgtcaacctggccactggttgacaccctaggcgcttgggtttgctttcaggatgccaattgaatatttttaattcttagacatcaaacaatagtcttcctgacttgttggttcagaatactgaaggatgttattgtgaaaacaaatttggcaggatagaaatacccatttcggagctcccaaagtcagcctaggcatagagctagggacccctccaagagttgactactatgacttggggcacttaactccatgaattgtttctttcttatcacgcattgaacattgatattcacatcatcagggtcattttttggataaacataacgggtataacaatccaaaatcagtgtatacaacatatctgatttagtaccgaaaaactaacaattttaggatgaaccaaagttatctcgtgaggagatcaaaatcccattagccaataactaataattattagggttggagaccagatagttatgagttaaggtggcatttggtttgaggtaatgaaatagaatagaaataaaatgaagcaattttcattctgtctttatttggttgcatattaaagtattagaatgtcattccaatagaatgacctttctaatgactattacattttaaaataaaaggaaagaccattctagtatatgataaaaaaatccataattttcttttatgcattaaattttattctatcgcattcatattcatattctcattttcattcttatttttatgttttccttcctcctaattaaacaacacctaaatttaactagatgatgatgtacataacataattgtctttatatataatactattttgtatttgttatgtagtatgaaaattttaaaattttttaattattggtgaatatctataatgtatataaacaacaatgcgtcaccaattgatttatcaagatatagatacaccatatatactcatattacatacagattgatgagttttagtttaattgaaatattgatacatttcatcttaataagaaagactatcaatacacaataacttttacaataaattattctcaaaagatggcaacaaaacccgagtgaagtactctcccaaggcccatatggggaatatgtttctataggcagaatagctgatcatgcaatttctattgaacactcccataatttcctattattaatagttgacaagttaacacacacacatacaaatgtacatatatataaatatgtatttgaaaataatttaattaatactattatttatatatcaatatatatatttgaaaacaacttaattagtagtatatatatacaaaaaaggtataaaatgtatacctgttgtgggaagtctccattttccatttgtgaatttatcaacaattttgctgctcgatgcaagggtgtgcgatctctctcggcctatatattcaaacgtatatggtcataaacatatgacatatattagaggtgtatgacatacataaatatatacattttcgttggtttatattgtacatacctgtccagcttcgatgagagccaacatggcccatgcagtgtttaccaagtgtggtttacctccttctaaatttgtgtacacctacatataaatatggtgagtgttttgcattatatggtctttgttattttcaattgtttttacactattaatagaaacataatatgaaactacattgaagtggtattagatacctcaatcatctaacaacattattaatagtggcactacaataaataatagccttgattttgaactaaagttgaaatcaataatgctggtttatgaaatagacgctaattcaattgatatatctatataataatgttattatataataaattaataaatattttatgtagcatacatatatatatatatatatatataatataagtgtaccttattttggcatgaaagataactttctccccaacccccagtcgacaggagttgcttggagagcaagaaacgagaagcttttcttatggaatgagctgtatggtaggagtgcccagcagccaccaacccttttagggcgcaacaagtggcgtaggtgtagcacactccccatgacccataccatgacccatcgtcttcttgtctactcactatgaactcagctgcctttcttatacattcttcaatctctttctttctatattctttgtatttctttgtgaatgacttcagccctttgatcactgctgctgtacattccacatactggtaatcgattatgatgtctccaaatgtttcagctggatttatcatctgcacacacacacacacgatgtcatgttaatctaaaataatctttcaatgattgaaatccatgttttaaaattccttacaactccaaacttaaaataagaacataaaaaacaataagaaaagtgaaaatatcaaacataaagaaaataagaatgcaaggtttatactggatcggaccaatgtaatgttctatatattttatggttagagctctgacatgaggtcaattagtgttagatgataggatagttaattacattagttaattatatgatagtttttcatcataactaatttctctttcatgtaactaactttccaatcttaactttgtgtatataaacatcaataatcaatacaaatacttagtcaagaatcagtacaaacactaattttattcagcttagttatttttctctctgtctctcatcactttcaacatgttatcagatgcctaaatcagtcctctcgttcctccatggtcgattcaagctcaatccacaaaggtccaacctccaactcgttgccaaagtcaaatactctttagttcaatcattcgttatccataaaacttgatgaaaataattttttccatggtatcatcgagtctatgcaattatcaaaggaaattgtctactaaaatttcttgatccagcaactccttcacctatatttcgcactactgaagatgaacttaccaattgcatctctgaggaatttattgaatacaatgttcatggcaatcttctagttttctggattctctcttcgatgattactaaaattctaacacgaatggttggttgtaatacagttgctcagatttggtcatgccttgaacaattttatttcgatgagaatcaagccaagattattcagttttgcactcaacttcacaaaacaaaactcattggtaatcttaatgattatcttctcaagatcaagcatatcataaactctttagccccgatcagccatgttctctctgcacaagatcacatcgaggccatcttcaatggtttcacttgagattatttcatgttcatcacatcgctatcaacacgaaaggatgcttactatgttgctgaagttgaatatctactaatggctcaagaagtgcgaaataaaatcagtgagtctgagctagatatctcaaaactagaggtcaatgttccagctcaagtaaagtatcccatgccaaggcctagtttttcctctttagctcctccttttcctcaaacatctaatggttgtcaagggtttcaccacactccttgagttggttatcctctatttgggtcgacttatccaagtcctctatacaaaaactacggattgcttcctactccaccttatttaatatttgctccatcttctcaaccctctcgtggtggttatcatggtactaccccatgtgattgagactcctaaaactcaatgtttttatcgatttgaaaaatcctttactgggcctgagtccttccagtctttcaatggtggctctattaatgctgttgaaatgtagatgatgcttactactcccgagactttatctgattcctgctggtacccaaattctagcgcaactcatcatctagcccctgatctggccaatctatctattgctcaagactttccaagttcatatcgaatttacatgggtaatggttcaagtttttgcatccaacaaattggtttatcactcttatttcaccttttacctctcaagcattttatcttaaaacatcttcttcatgtacttgcaattattaaaaatcaaatcaatatttcccaatttgttaaagataacaatatcttttttagattctatcctaaccattattgtgttaaagattgggttaatatgaagacattgttggttgggagagttgaaaatagtctctactagtttgataagtctattcctaaatctcagtcaagcctcactcctcctgctagttcatctgagttctctacacctcttaccagtgactataattttcaatgtttcaattccaattacaatgtacctatgtccaactttactttgtggcacaacagattaggccacctagccaaatctactgttatatctgtaattgaatattgtaatattttcaataccaataaaattttttttgagctatgtactgcatggtgtcttggtaagcaccataagttaccttttcccaattcaataacatattttacacatcaccataacagttgttagatactgatctctggagtagaatcgtttaatgtctatagatattacataagctttattgatacttactagaggtatgcatggatatattgtaatgaccgcatattgaaaattagaagattattagggcttattgtcaaaagtagaattttaatacttattttttataattatggaaatatagttgaattctaggtgtattaattatgattatatatgaaattttatgtttttcatatttttatgcctgataatagtagaatgcagcatttggaccatagagtcacttaaataaattataatatcttagtttagtaaggtagtatagttacacatttagaatatcagaaggatctgaggttatgtgtttggaccatattacccctaggttttaagtttacttcatgttgaaaaaagagagcaaattggtaattttaccttagttttatcataagtaaaagtgagtggatttggttttaatgtttttattattaaataagggtcaaagtatgatgcaagcggctggcctcattgcttgggacctggtgtatttgtcaaagaaggaaggaggaattgggttcaaaaagatacctgaatggaataaagctgctctctttaagtatgtgtgggaaatagctaataaagagaacaacttgtgagtacgatgggtgcacaatgtgtatctcaagtagaatgatttgtgggaatacaagttcccaccaaatggcagctggtattggaagtagatagttgctgcgaaagatcaaatcaaaagcatggttgatgttcagcccttcacttaggtaaggtatgttatagaagatggctctaaaatgctttgtccaatacaacacaaggttaactaggatcaggaggtatggggaaggctcaacacacctaaacatagcttcacattctggttggcaatacagaataggctgagaacaaaagcaagattgagagtgtgcaatatagtgcaggatgaccaatgtgttctctgcaatttacagtaggaaaacagtgagcatctatttttcaaatgttcaatctttgctgtttgtgtacaggaagtaaaaagctggcagcaatggggagcacaatgcatgactttgaagcagcttgtgaggtggattgaaagagccaaaatgtccaagtttagaaagaatgtatacttagctattgtagcatgcttgctttacaacatttggagggttaggaatgattaaatttagaacatgaagatggttaaagcagaagaaatcatacagagaactaaagaggttgttaagaatatagtaacaaccctttggccgaaaaaggaagacactagttggttttcgagatcctaaagagatagagggaaaatgaatgtaaattgagatgtatataatttttgtaaaggagtatttaggtcctctcttacgaggatgctatttgattgtataaaacagtgtagtgagcaatacaacaccttcattcataaaaaaaaaataatgagctaaaataatagaattatttcattgattccacttagtaaaaaatcacaaattaaaaaggaaaacctatctccttctctctctttcttgttcgaccctaacgagacccaaaaaaccaggccttttttttgttaattctgggtattttagcttgattgaaggtgttttggaaagttaagaactaaggtaagccctaattactttgttctttgctgtttttagaattttaaggatggctcaagcgtgcaaagttgggtttgagatgttgttcaagttagcagtatttcagagttgtttctgatgttatatttgacttgattaggttgttttgtgactgttactatgattattgcggtgtttgagctaagtttgagcttaaaaacttaggtcattaatggtaattttttatttcttgccttgatgatggattcagttagtatatgttgtgtatggcctaattaggtgttttggagcatttggtgagatttgggatagaattttaggagagatgaggttctttatgtttctgttataaaaatggcagactatttttgctaaaatggtctaccgttttcagtagtctaggacccgaaaaaatggcctaccatttatagggagcgacatgctatattttatggtattttcccaagaatctcatttgtcggtattttctcgatatttagtgtattgccatgctatctattgataggtaaacttctagttttaggtttaagtccctgaaaagtgatctagtgtatcacttatcggttttatatatgttgtgacttagggacctataaatcgtcgagtactagtttccattaaagttgatcgggacacttgaattcaaaatcaaggtaagatttattataatattatcatgtgtttacatgtttagagtgcatgttttatgtttgcctatttgataagtattggtagtattagtgcatatagagtttcactgaatg

SEQ ID NO: 15440 - DNA, 4379 bp, Cannabis sativa
tgaactttcattcatgttaaattttttttactaaaattagataaaaatctttaaatctaatattaacgtgctccacttcaatcccatatagctgtgtaagatcaagatgaagtcaataattctgaagttgctactggccatgattcagcaattcccatgccatcatcatcctcaaatagtcaaggcaaaactccaaattcagtagaatcttattccactttaccacttgaaattgtcttgcctttcttaacctcaccagttcctcataatagctccacctccccacttccctcacccattcctccatctcctcaactttcccgtcaccccatgataacttgctcaaaagtcggcatcttcaaacccaaaatcttccttactattgctgaccacaacataccaattaaccgtatattagaatgtcttgctcaaacacttaaatttcctcactggcttgctgtaatggatgatgaatatattgccctaaaaaataacaacacatggacacttgtagtcttgtaccccgctaaccaaacatgcatattgttgacaagaagtggttgtatcgcatcaaatacaattttgatggctccattagtcaatttaaagcatatcttgtgattaaacaatttcaataatagtcagggatcaatttttttgaaacctttagtcctgtagtcaagcctttcaccattcgtgtcatactctcctttgctgtcacacataattgggatattcaacaaataggtatcaacaatgcaactctcaatggtactcttcacgaagaagtttacatggaacaacctgttggttttattgattccactaatcccacgactgtttgcaagctcaacaagccctctatggttaaaaacaagctcctcgtgcatggtttgataagctcaaaagttctcttcttgcctttggctttcgaaactcctctattgacacttccttgttcttttataacaatggtgatgctttgctttttgtcttagtttacgttgatgatattcttctaacaggaaacaatgcctctcaagttaccaccatcattgccaagctttaaagtctttttgccctcaaatctctctgatctgttacctactttttggctttgagatcagtagggggcatgatgcattaaacttatctcaaactaaatatacaattgaccttctcaagaaaataaacatgatcaacgccaaaccatgtcccactcccataaaacaaagcaataaactcagcctgcaagatagtgccgagtttaagcacccaaccatctttcaaagtgtcataggggctcttcaatacctcacccttagccggcccaacatcgcttattcagttaacaagttaagccaatttcttcaagttcctactcaaaatcattggagtgcttgcaagaaaatcttaaggtatcttgctggttcaattggagaggaaattacattcaccaaagcagccaaacttatcattaaaggctattgtgattcagattgggaaagctcgttagatgacagaaaatcaactataggttttttcatctacttcgacaataatttagttagttggagctctcgaaaacaaaaggtcgttgctcgatcaagaaccgaagcagagagtatagagctttgctcaagcttgtactaatgtggtttggttacaatctttacttactaaaattggaatcaaatacaatgaaccagctgttctttggtgtgacaatgctggtgcacgacaacttgcatcaaatctagtattctatcccagaactaaacacatcgaaatagacgcgcacttcatcagagaaaaggttttgaataaggaagttgatgtgagatatataccaacacaagaacaaatcttagatatacttacaaaatctcttagcatctcactatttcattatttcaagaacaagcttgttgtatctcacctacagcaaagctttaggggcgtattgaaaatgataaaattgccataacagaattgcataacaaaatttgatgaggacaatcaatatgacagctaacattgtgagggaatatttgtaccattgtgacagctattttcggctatacattttactctatacgattgtatattccaattgtaatttcgtattccctttataccttgcttttactctgtatatatagaagtatttaacattgtataaaccaatcgctgagaatatcaaatatttgtcattaaaggagcattcaattattttcttctctttttaactaacacgacatgaattatgatcaagtcgtagtcgtgttcgtgtccgtgttttataaaattttcgtgcacgggttgtgtttgggtcagtattatctgaacacaacacgccaacacaaattatcaccctactctatatagataaataaaataaaaagaaattttgtacatagttttttcctaattgttttattagttgttttcataatttaaaagtattaataaactaaaactaatataatctctagagtctagatgccacatagcccataaatgagttaaatgcgcgcggatcctataattgcaccaaaaataatgacaggagtggcttgtgcactatgcaatactgcaatattattgttttactctacattaattattattgatttccgttgcagattaaaaacgacagaatagttcctacaagtacaagtaattgtaatcctatagttttgctcaagtttggctagtcatttaaaacttttttcttacttgatcaggacccagtagtaaaagaaaaaacttgtgttatcatagtcaacacgcaaaaatctaattggtttatatttgtttttgttcttgtacttggtcattcccattaatcattatcctccacaactcaatatatctcctacaagttttcattttaaacacctaatcttcttgcatcatgataaggatatgattttgtcccgtgatgtactttcacggaatgtatttcatggtacattagatgaatctcagggtacattaaataagtgtcaaggtacatttctactttttaaccctaattacccttagatcaatgtcagccgtcaaatcaaataactcactcatctgacggctgccgtacatcacgaattacaatccgcaaaagtacaataacaggacaaaatcattttcccgtcatgataaagcttctaataagatattaccaacactaaactttctgaagcagtagtgaagagtttagtgtacgtcgaaattgtcaaaatatgaccacaatttttgtcacttttaggtagactaagacaactataataatagtaattattattaataatattataggcaatttgtcacaacggctatgcacgtggtcacagttgttttgaaaaataaataaataaataacttttctctaggaagacttatcggagggaccaaactataaggaatgagtttctgtttccctttcccaatttacaaggattttaaaaaagagttttggggagtagtaattaataaaagaaaaggaaaacttagcctaatgtcttcctacgctctttccaagattacctgttcttttggattttattttggtcaccaagtacctcatctttgttttgggtctcactcaatctgtgtgcctaaatattcttatctactactactagtttttcttttttagttggaaaaagaaaatgtcatttataatgtttttcttataacccaattataccaactataaaacagttaacaaaatttcttattgttttcaacttataaaaatgacaagttaaaaatattcttaaatacagaccaaaatgttgtcttcaatataccatccatgatccacacataaatttaacacttggagatgctcaaagggtacattaaatttttcaaaaattgattttttttttcaactatatatataagaaaatgaaactcattcatgggtaattaacatatttaataatttgattatttaaaattgctattcattattttcccaattttaataacttacttaaattacttgattggatttggtcttagagtttgataacatactaaaataacgatgactagaagacactataaatatatatataaaaaaaagaccaaatgtgtcattgtaagtgaaagcttatattagttaacctcttctcttgaacttttttttaaggtttcttaaacaatttattttattattataaatatgaaattttttttgaggaaatatatgaagtttttttatttttatattttatagccgttttaatatttttacgaaaattcacgtaacaaccaacataacaacttaaattgtaactcaaatccatatagcaaccatttgaacaacccacaccgtaaaaatgaaaaaaaaaaaaaaaaaggttcaaaaa

SEQ ID NO: 15441 - DNA, 9339 bp, Cannabis sativa
tccccagaggtgatggggattgcattgcacagcttacccggtatttctccttacagatcacgggactactagattgtcacaaaataatttagtattgttataattattttgtagtatataattttattactatggtatattaattttctgtgatacgattatatatttaatgatctaatatatttaatatatttattctatgttaaaatataataatatgctatactaaaaaaattatataatttaatttaattattacatatatattttaaaaaataatatataataaatgcatttttataatttttattaactaatttattatatttgtttattttgcttctcaacctttctttttaatagaggatcttgattcttatagttgggcgaagttgatggaatgaagagattgacaaggagacacttccctattttcatcacatgctctaaataataaaaccaaaatgcaaacccctaataataataataaataaataaataagtgaataaaagggaaagcccctttaataaaacaaaggaaaagtactagtactattattgagagatattattcttggttgcatggtaaataaaaacactactactacactatacgtaataataatatataaatatttatttatatatataaagggtataattaattaagaataacattatgaacatatcttcaaagcaaaactactcaataagagagatttaaatacacttaattaacataagaatgtgattctcatgtgtcctaatctaacggaagatgacttcaaatgtctaccaaaataaataaaaaataaaaaataaaaaactggtcagcttggtaataagtcaaacgtatcattccttttattcagatcaaatttgcaccctaaaaatagtgaaaaaataaataaattaattaataagatcttataattagtcaaaaatgaaataaaatccaggatctgttaaccaatctttttgttctctgaagtattcttttacttttttttttcctttgaagaaaaaataactctaaaaaaatattgatgggtgcatatatattcaattcacacacatatatatatatgtacatgtatgtataatgtatgtatagtagtagcatagcatgttcttccatgattggaaatttggaatataatgcaccgacttgtgtacaacaacaactgcagagactttgtttaaattataataaattaacaaacctttgttaattaacaattaatatttatctatatatataaataggtacaaatctaagcaatctatcataaatgagacttattattattgttgttgttgttaattattataaatatggtctcttcattaaattattattacaaacccctcttagaaagaacttgataaaaatactattgtgtcaagtgtccaaaaccaaaagcataaaacgccaacatcaatccaagttgattgtttgtttggttttaatttttataataaaaagaccatttcaaaatttcatttttttcatgtcataattataatgagcagtgtaatgttattatccatgtctctcttacttgatcaaccattactaccgtttcttttggttttagtagtgttgttctacttaatacaccaaatactatgtcagctccggcgagtactcaccggaaaaggaggcggcagcggtggtggtggtggcggcagcccgccatgttatccggtattggggtgtttggtttcattctacaaaaataagactcggttgcttgattggtatactgagctcttagaagggtcaccaacaaataccatagtggttcaaaggcttggtgctcggcggaccatagtgacagccaaccctgaaaatgttgagtatatgttaagagccaacttcaataatttcccaaaaggaagaccctttactgaaattcttggagattttcttggctatgggatatttaatgtagatggggagctatggaagactcaaagaaagcttgcaagtcatgagtttagtacgaagtctttacaagaatatgttatgaacactttggaggatgaggttgagaattgtttattgcctttgtttgaatctttggcagaggaaaacagaggagttgtggacttacaagatttgttgagacgttttgcttttaatgttatatgcaaagtttcacttggtattgataggtgtagtttggacccttgtgttgtgccaatgtcaccacttgcgcgcgcgtttgatgctgcttctgagatatgcgcacgccgtggtgctgcgcctttgtttatagtttggaaaattaagagatggtttggtgttggttcggagaagaagttgaaggctgctgttgaggaagttcatcattttgttatggatataattcatcaaaggaagagcaaaatcaacggtgaagatggtggtggtgatgatgatgatcaagatcttttgactaggctaataatggctggacatgatgaggaggtgattagagatatggtgataagtttcatcatggctgggagggacacaacttctgctgcaatgacatggctattttggtcactttcttgtcaccctgaagctgagaaacaagtggtgaaagagattgaaactattggtaatgaagaaagtaataagttgggttatgaatgtttgaagaaattgaagatgttagaggcttgtatttgtgagtccatgaggctttatccaccggtaccttgggactcaaaacatgccataaaagatgatttgttgcctgacaaaactcatgtgaaggcaggtgatagagtgacttatttcccttatgggatgggaagaatggaagctttatggggaaaagacaggttggagtttaaaccagacaggtggtttcttgaaccagagaaagaaacaggagggaatctcaagaaggtatgcccttttaagtttccagtctttcatgctggtccaagagtttgtcttggtaaagaaatggcattcattcagatgaaatatgtggtggcttcaattctcagaagattcaagatcagaccggtaaccggttcgaccagaccggtttttgttccgttactgacggctcacatggccggaggattaaaggttttggttagcaagagagactgactaagattgaaaagaaaggaaggaaaaaaaatctaaaaacaaaaaaagcattaaaatagtaaggtcaatggttctttctttctttcttttttgtttaaattaaaccttgttggatggcataacatgccacatgcctctctctttcttttttttttggttgttgtataatcatcaaaaatcaatagttgaaaaagaaaagaaaagaaaccattgtgtacgaccaacaaatcatacagctaaaaattgtatacataacatattatagctttttattccagcaactttctcggatctttatcatcaaaatgaaaaacataataaaccataaagcttgttctaataaatcctggtcagaatactaatattgcacatgcttgtttggaacgatgtagtttcacatgttctttctttcttttttattttaattagtttgtttaataataatatttgttgggatgggaaggaaagaagtatgagaattcacctcatttataattaattaaagagaggaccacgaatctaattccagaggcagttgatggatcaatcaattttttgcaactgccattactattgaattggacacctaaagacctaatagtaggcctgccactttacaatatggttattttaaagaagaaagaaagaacatgtaaatctataaaatgatatttattacaatattattttctttttttgtttttttttacaagttctattatattgagtttgactgtgattgtattagagggacaagcttccaaattggttgttccatttctcataggtaccaagttcattcaaggaaacggatggccgaacctcttgcaatgcttgttcaaagtcctgtaataccaacaaaaataagttcccaaactttttcaaataaattactaaagtggtgaaactaatgagttagttactgttttaccttcagtgttactggtctcatatcctcctttttcagctttgtaatttctatgccttgtttcaaagcctctctcagtggccccattgaagcatccttaaccaagtttttcatgtctgatcctgaataacctgaaattcaaagtgccaagtaagaaattgtggacagaaaccacaagtagtggagtgtggagaagattatccataccttcagttaatttgcatatggtatcgatatcttccttttcgagtttgaataatccatccttttttagtagattttgtataatccatgctcttgcttcttcattatcagtaacagctcattaaccacaaattccaagcattaaacattatcagcaaatctaaaagttaaactctggaattttacctgaggaaggtaaagggatataaagcctttttgtaagtcgcctccgcgctgcttcatctagttcctgaggccgatttgttgctcctggacgatgaatctattagcaaatttacagtgcagcatactaaaaagagcggtaaaaaagaaatcaacttgagctgtgaaattgaaaagacacatgcatcagaactactactaagtttagttgtttaacaatcacctataagtaaaatttgttcgctgccactgtcaaagccttccatttcaatgaggaactgtgttttgagtctcctactcgattcgtgttcaccttctgatttacgctgtaaccagaaaacttacatcacaaagtatacaaaaacaagaagcaatgaagaaccagtgatactctaactagagtatctaaagtggtcatttcataaaccaaatacagtactgtaaagatatttgctagagattaaattccgcatgctgcatgtgaagccgttaattcttacatttttaccatttataaaaagttaaccaccttcttgacattaaagttttgtacttaaaaagagaattgtccaagggagctacactgagcacaaaagagtaactaatatatctttcaaggtaatataaaatccagattccagaacataccttacctgagagagaagtgaatcaatttcatcaacaaatatcacagctggctgacgacaactggcaactccaaagagggctcgtactagcttttcaccctcgccaatctacaaaattcaccactaaaattgttgaaacagcacgttttctaagtactattagttgttacaaggggtttgaacggtcatttctgaatgattcagataaaatgaaggaaaatatggataaatcttaattccaaagtccatcaataatgatagctgtattaactcaagttatgcttacaaaacttcaaatcagactcagttcaaatcaattcagaaagataaatgacacgtacccacttgctcgtcagtgaactagcagatatatagaagaaggtagcttttgcctctccagctatggcttttccaatcattgttttgcctgttccctaaaacacaaacaagtgtacaaatcaatggccaaacacaaacaagcgcatctgctgctcctacttaaaaggacacttactggtgggccaaagagaagtaggccttttccaggagaacgacaacctttaaatatatcaggacgcaatagaggccatatcaccatctcagtcacacattttttggcatgatcaagaccagctgcaaacattgtcaaataaccacgttaatgagttatcttcgctgctactgcaccgccacataggaaaacttgcgatttaaagaaaatttggaacatggtatattaccaatgtcctcccaccgaacattgggatccttgtccatgatctcattgctaacatgttcaataagacgaggctccaaattccttaatttttctggaagctcaccatcaggaccacatagcaattccaagctgaaatcatcacattaagcatacagtatataacatcattatccttatccaaaaccagaacatatcattaggacaaggaaataggtaacgtatacataataaaaaaagtaaatgcatgtaccagaacaaaacaaatcagaccttcccacactagaccatgggcattgtgttataaattggtagaaaatagaatggtagaacttgatcttagaaccattgcataaagcagtaaaggggcgtgatatcagtagtaaatttttagtggacagactaatggttgaaagtatcaaatctgttgggagagggaacatatgaggataagaattttcaaacataagtatccagtcattgttggccttctagagctttaatcccagtcaatctgtgtcatgtgtgtacatataattcaaaaacaacttaccatctctttgtagaatcatctgcagtatcgtcgccttttccaccaattcgtgaagttaaattcccagagttgccaccattggatttaatagggggaacaaaattaccacgaataccacgacgtgaaaacccatatgatcttccaccataaccccttggaccattgttatcactttgtggggaaacagtagcattgggcgatccagataaccctcttttttgtcttgcatccatttcctgtttgaaaaacaaaagtagaattggttcaagatcacataacatatattgatacaaaaagtaaactgaagtttcgtagaaaagaaaataagtattatccatttcaagtgtttgttttatacctaaaaaaaggacaagcatataaattaagagatgcttctaactcaactaagattgatagaattcttccattgggtatcaatattatgaaaacaaacataatccagttaggcaggtttgacaaggtagaaacataccataaagaaaacttgttatcataaatgtaatgcttaccaattttgctcttgcagtaacaaatccattcgccgaaacttcattgttctcttcagaacttaagggcgacttcaggctggggctacggatatccacatgcatccgttttgcacccaaggaatttccagaggttctttcttcctcgtccttttgaataaacaatgagcattgacttttagtctgattatgaaatgacatgggcttttctacaattctgcattcatcatagttgcaacttccagaggttgtgtactttggggatatgttgttattctcccttgaaaagttgcttctcaatgctatccgctttgcttgattattagaattaagggccttgctactcggtttgtcctgcttcaccgattgatctcccttaaatagagaggaataatcagttagcatgttaaacaaggaaaataaaaaggaccaatcaagaaaattgtctatgaactacaacatataaaaattgtgtggcatttggaaaacaataccagttcatttagagttattccattagagtgctgaataagagctcggatgtactttgattgcttaatcttctcagtatcaatatctcctcttgagccaaaaacacatgttggagctttctttgctagctcaaatgcttttctggtggcataataggatagaaactattagcagcaaaaaccaaaaaaacagaacaaaatatagttttggaaacatttttccagacccaacacgaagcacaacaaagtagaatagcacaagtaggattgtgttaagttttttactacttttagctaggattagtaaacgttatacactgtgaaaatgatgattacatgagcaacacacaaatttccaaacactcactcctaaagctaattagtccatcgttttaataataacaaagcaaaattcctgaaaccaaatcacacaaaatcgatctatacaaagaataaaaaaaagaattaatagacttcagagcttcaatcccaagttcaaacgtacaatcacatttcagagaaagacataccgatcagaatcggaaatgagagaacggcgagcggaattaatattagagatagcttcgcatcgaatgggacggacaaaggcgtggtcgagttcggagtgagaatgagagtcaaggaagccgaggaggcggagccccaggatttgagccgaagagaagtcgcgtttcttgagagccgtttcggcgccgaagtggagggaatggagcctctttaggttatcgtcaacttgttttctccagcatacttgttccgccgctgtggaaccggaaccctcatcggcttccttctttgccgccatttttctatttcttttcccgctcagctcactcaatcaagcttttccaaaatccacgaagatagaagaactctcacatcatacacaaattatttacctttttaaaacaaataaataaattagttttagttgtcgtttttctgtttctattgtcgtttttttcattttttttaaagattttattttcaaatggttcttagatttttttcaaataatttattaaattttgtacttttttttattttattttatctcacacttttacattaccatgtttctttatattttttctccatatcatttaaatataatatctttacatatattttattaattaaaattaaaaaactgactaaacaaagtaaaaaaaacaaaacaattaattaaagagagagaaaataaaatatgtttaactcaccactattcattgagctatatgtagagaaatatttttttaaaatttgggataaggtataataactaagcttttagaacatttgatgaaaatcaattttaagccaaggccgatcttgagaatatatggactttaaactatttaaattttgaaattctctctttcataattatataaaaaaatattaaataagagtatcattagatttgaacccacaccattgtgtaatgtgtcattcatacacctcaactaattaagccgggccgacccggcataacatacttaattttactaaaataaaagtctaataagaccattaattttttatattgactctcgaaaagtgtaagtcttagacatgagtctaacccgggccaaccctatttaagctttttttttttttttttaatctttcagctattataaatgattgaatagagtgctcttaactaggagatttagacactaattgagtcccatacatatggggattatttttgcgacattttttatttatttttggtaccagaaaagttatactaaaaaataaataattttttatatggtgttatatattataactaaaagaaatattttttatgtttttataatatcaaaaataaaatttaaaaaaataaatacgagtgcaaatgattttttttttaaccatttaatttttagcacaataaattatttataattaaaaaaaaaaaaaaa

SEQ ID NO: 15442 - DNA, 4476 bp, Cannabis sativa
atttctaccttttagtttttgtatttctcacttggtttatccaattcttgtctatatccaccctacaactattttttttttatttgatgatcctacaggcttctccgtctattagatttaacaaggaaggaatacttttggcagtctcaacaaatgacaatggtgttaaaattctggcgaattcggatggatttagactgctacgaaccatggaaaatcgtacgtttgatgcatctagagttgcttcagcagctgtagtgaaggtgagtctttctgctttagactcttgacaattatccattacttgaatgtgaaactgaaaagtctttgggggtattatggatttcatttttgactcttaaattattaatttatatgcagcagcaagcggctcctgcaattggcacattcaattcttccaatattgttgggacaagcatgggagatcgaacccctccagttggggcaatggttggagtggtaactagatcatctctgttctctctctctctctctctgattgcattgtgtatgaaactactgtgttaacttgataatttcccctgtttttttttttctctgtctgtttccattgacgcagaacaatgataatcgaagcatggttgatgtgaagcctagaatttctgaggagtcaccagataaatctaggatctggaaagggacagaaattaatgaaccatcacaatgccgctcgttaaggctccatgataatttgacagcaatgagggtatggatttgtactttacatctccttctatatttcatatgctccactttcatgtctttactgtttcatctctctgattagttttagctgagctgatgcccttatagtttgtaagagaatcttttattaactatatagttctcatttgtttatgtttattttcatttagtcgatgaagtaatattggttgagtttgttccagctctaacacaatgataattttcaggtttgtagactaatttatacaaattctggactcgccctattggcattatcttctaatgcagtacacaaactctggaagtggcagagaaatgatcgaaacacaggaaaggtattagaactttatgttagaagatttcacttctcatttgttagctttaaacttgcccttcatataaatttcatcttttgtaggcctctacaagtgttcaaccacaattatggcaaccttcaagtggaatattaatgaccaatgacattggggatacaaatccggaagaagctgttccctgctttgccctttcaaagaatgattcgtatgttatgtctgcttctgggggaaaaatttccttattcaatatgatgacgtttaaggtagtatattgctttcttttttattgtttaactaatctagcttactcggttgtgtatttgtttttagttcttgctaagtaatccccattgtattatggcattatactccgtcatgtaaacagaattggagttgcaattgtccataccgaaaatactaaaagtacccatctatagtgatcaaaacctatcactacttaaacaattatttatatatatatatataaatatatttatatatttgaatatctaaatatgtattttaaacagagttagaagtattggtgttgaatgatttcatggagctttgagattttttaaagtaaataggaagttatgaaggtatcttctgttttacctttatcttgttaaactcacttctgttctgtcttcattgcagacaatgactacttttatgccacctccaccagcagctacatttctggcatttcatcctcaagacaataatataattgccataggcatggaggattccaccatacaaatttataatgttcgcattgatgaggtctgtaactgttaactgagccttataagtatttttttttcttcatgttagataggaaaataatattggattgctaattcttaaaaattttctttttcacaggttaaaaccaagttaaaaggtcatcagaagaggataacaggtcttgccttttctcacaccctgaatgtacttgtatcttcaggagcggactctcaggtaaatattacttcaatctataaacgtatatggtctggtatgttagttaagccaagagaggagcagtattattagagcagatgataggttagggatgcttgatatacaaatcttttggtcgttggctgctacctgtttgatattcttttattgcctttcattgttcatacttaaatcatttccagcttgtgactattaactgggaatacatgtctgaacataactcatttcttgcttcatagtcaattcgtaataataaacttagattctgcatgttatgagtgaagcataaatagttcaataacgtttgcattcacaattaatcttaatatacatttttttccccaacagttgtgtgtttggggcacagatggatgggataagcagacaagtaagttcttgcataaggggcgaatacaagttgcacctgcagatacccgagttcaatttcaccaagatcagatacatctactggcagttcatgaaagtcagatagctctatatgaagcaccaaaactggagtctcttttgcaggtacacctcttacttattatgcttgtaatggttttcccatcaagtttgatcatattgcatgtaaaccaactattacagcattaatttccttgcatttatttgcacataggtactgtgctacgattatagtattcttgctaatgatttttttttttcagttttacggaattagttaaggattgacttacctctttgaactatgttattatattgtagtttttccctcgagaagctagtggtccaatcacccatgctacctattcttgtgatagcctgtcagtatatgttagctttgaagatggaagtttagatgtacttacagcatcaacgctcagactgagatgtcgaattaacgcaactgcttatcttcctgcaaatccgaggttcattttattatcttaaaattctcaatactcgcccctgccattcctctttgcatatgactaaattgatttataatgttcaacagcataagagtctatcctctggtcattgctgcacatccatccgaacccaaccagtttgcactaggtcttacagatggaagtgtacatgtgctcgagcccttggaatcggaagggaaatggggcaccaaccaaccagctgaaaatggtgctggaccaagcgccgcggctataggagcagcagctggttcggaccaaccgcaaaggtgacaaccaaatgtagaagcttttagaaaggacctcgagtagtgagtggtatatggtgtttctttcgtaggatagctttccctggtcccagcgtatttaattttcggggggaaagctgcgatagttggtacttaatagttttagatgcctgaattaaccacagtagaatttctttgaagtgccgctaatcgaatgagttcattgtcaagtattaattggtgctgtaaattggagacgaggactacaagcatatgaaaggtgggctctgaaatagaaatttctaagatatttgtagttggttcgatcccctcttagttactcagtttctagaagattttattttaattgtaattgtggacattttttctttctttctctctctttctaactaaataggtttattttattttattttattttattttatttgttctatatatgtaatcaattttctgtttaattataataaagatcagttttacagtttattctctttctctcttgtctgattttaagttttatattaccctaaacgagtttatgatcgatgcttaaatttgttttacaagctactaatctattattttaaagaaaaaaatgggtggctgtaataagtgcagctgcacaaattgctgggagaaagagaagatatccgtggctagacttcagcgttcattagagcactaaaaaagagtgaaatgggttcatcataattaggtttttttcaataaaaaagataagttattttaacacctttcattttcatagaaataaatttctcatgccatatcaccataaaatgagccacacactgacaaacacttgttttggcagctctattttttaaacatgagatgcttttagaaactagacttgtagttcttgtcaagattctttttagtttgtttattgttcaagttactctgtgtacttccaatactaattactaacacaatgaattttatcaaacaaaactcaaattttaataaattttccttcacttattgtacactttcagtttctactcttgtcacttataacattcgttctcaattctaatcttcttatggtcaattctttacttttttaggaaaaattacataaaatacatttttttgtaaaatttttacagaataaatattattttggactatgtatgggaaatttgattttctatacttagaaaatcaaaaaatttgatt

SEQ ID NO: 15443 - DNA, 13205 bp, Cannabis sativa
ctctctctctctctctctaaaataggctgtatgacacacattgagaaattatactgctttgtctgctaacttttgcttttttcattgtttatttatttacctttgccgtgttaattttgtttcttattcttttgtcttctaggttcgctgtattataaggaatattgttagagattgggcggaagaggttctgtatctgttctcatgttttttagattctgatatttatacacatccaaggcttgttccttatataatatctaatacagggacagaaagaacgagatcagtgctacaagcctgtccttgaagagcttgatatcctattccctaaccgttctaaggaaaggtatgtttgtttctgatgctgtttccgttctcctatgttatttcttccggttatgttgacaattctaccagtggagttgtgttttatccacttactctaaaatatttaatatgttttgacagccctcctgcctgtttagttcctggtgctggacttggacgactagctttagagatctctcgcctaggtatgcatacaccattagcttgtcacaagttctaccataaattgtgatcttactcagtgcctactgtctctataattaaacaggtttcataagccagggaaatgaattttcgtactacatgatgatatgctcgagttttattcttaataagtatgaatctgattatactcaaatctacatgattttcaagctctggtgtatctttctgcatttcattgatgaaaatgttttgcttggtgtatgtagtactgaagatgcaggagagtggaaaatttacccttggattcacagcaattgtaattcactctcagacagcgatcaacttcgtcctgtgtcaataccagatatccacccagctaggtattcttaatcttctgaagtttctccttgatgtttaatatttgatgtctgccttctgtggccttgtttctattaatttttgctttgacaacatctgtgatttattacaatgaagtttctgattatggatacatcttctcactatctatcctaagcaggagagaaggaaaatgttccatctaaagataaaataattaaaccagcttattacatctttggatgattgaatatataattatagaaatatttatatttatgtatattcaaaatctgtttgttccctcttcaataaagactgtagctacgatgagtgttttgtgaacaataacctaatagtgttgatttatttccgtaaacaattgttaaactgactaaagaatgttattccagaaagttattacagctttccaacaacttaccaaagtttgaaccataaaaaataagtttcaaatttactgctgagtcaaggtcaactttctcatatgtttggagtgtgttgtttcaatttacagctagtttctttgtgaaacaactttctcatatttttggcgtatgttgttttatcattttgttttttctaaataataatccatgttctcgtaattgaagtagtgctgggcttactgaaggcttttccatgtgtggtggtgactttgttgaagtatacaatgatccaagtcaagttggtacgtttgtctgatctgtacatgtttgtcaagtatacatgtttgtcagtctttattttgtaatcagatttttataagaggaagtacttcacaccagctaatgatatatttttttggcttgttttgttttatttaagaagtgctaagccatttgtttgtcaaaatgggataatgaatttgaatgtaccatcatgctaaaagtgcatcatatgacaaattctaaagcacggctgaattgttgagatcttcatttagcaaataactataacagtagaacttacaccaaacaaaatgtactggatgattaaaacaatttggtcttccaatcattctttcacataacctctcattggttttgtggaaatcaatacagtaaaataaaacgggcgggctctctggacacgagttctatagtatttgtgggatgaatgtttattataataagatcatgtttgcatggcgattcgatttcgaccatgtcccctttgatcacggagagtaatctatgggccttgcaggtatctgggatgtggttgtgacttgtttttttatcgataccgcgcacaacattgttgaatacattgaaatcatctctaaaatcctgaaagacggcggagtaagtacctgatcataattgttctgatgatattttcttttctttttccaaatatctcactgccttttatttaatcttgattggatggcagatttggataaatttaggccccctactgtatcacttcgcagatatgtatggtcaagaagatgtatgtattccttttgctaagtagatcaggttccacacttcactaaagtagaatgctgtctaaattttcattattgttaggaaatgtccattgaactgagtttggaagatgtgaagaaggttgctttgcattatggattcaattttgaggtaaaaattgtcgtatagattgtctgcctgagtaattttccactagtctgaatctggcattcttttcttctacagaaggaaaaaacgatagagacaacctacacaacaaattccaggtcaatgatgcaagtaagctttactttttcttatctactaaccacagaaaaatttataagaatgtttataatatattacctcacacaccagaacaggttctagatttgtaacttaggattgcaatcttatctagtcgatggcatccgggatgcaacaaatctttgaattgaggatgcagcagtcaatttcagttcaatattttcaaaacataggttatagtgtgtgaagtgcttctctttttcatccattcattcatgtatttacttacacatgtatgaaacaaactttagtgaatcctaaacatgatgagatgacttacgaaaagatagtttacatttttttcttttcattcctctaccaacgttattcctcttatattcattacagagattagtgaacactccctggatactgtatgtaaatgaaagttttaggtttaattatattggcaatgagcatgtggtactaggtatttgataaacgaagtcattggtcctcatggaagtatatgattcttcgttactccaggctatttaatggctgttattttctttgcagaatcggtactttgcagcattttggacagcgagaaagaaatctgcaatggcagaagaacatgcgcctgaataagttattgtcaatcctcacatggctttattccatattattctcaggatcttacataaatatagtgtatgatccacatattgtgatactaaaaaaggttattcatttgtagtatgggtttttaaacgacggaaaagaaagtgacatgccaagtttatttatttatttatttatatgtggatactatgaaagcatttattatttttgttgtttccatcaaatacatttgcagagatacataaagatatttttgacaggttttggcatttcattgaattaaaacctttcttgaatttagccaaatcatttttttatttagggcttcggaacgggaccattgatgattacaccattacaagtgggatgccactaaattttttaccataaatgagatgtagggcgaatgaaacttgatcgaataattcttacttttgaaaaaaaaaaaaaagaaaaaagaaaataaggattcttactactttttccaaatcgtaagcctttgttcactcgtcatgtcatttgcttgtttttctttgtgaatctatattttaaagatttaaacatttccataaaaaattagatataaacatatcttttcaaatactcccaaaaagttattctacggagctttcaaacccatttatatgccaatattattttcttgtaatgagatttttccttgtctgaaatgtaagagtgacgttattggttggtcctaagaagaaaacccaggtccggaatggacgtaaatagctatttttgcacaagttttccatttggaaaaggaaaaaaaaatcactatattattgatttaagtatcttgaatggagctttattaaactagttttagctgtatctagctggagttcaacctcggttacggaattaatccacacagattacttaattttcactcaatgaccaacagcttaaattatttcatttttattttaacaaattagtttattattattaagaagactttggctgcctctgtttgattgtgattgtgaaccaaatagtaaaatatttatttgtttactagttatcatatttatgtataaaatgtggtagcagtacttgagagttgagagaaaaataaaataaaagtacgaagctagctaagtagtgagtgatacaataaaaaatgtgagaaattaaaggtttgaactccaagacttttaaattattattaaaattaatagtgtgtctactatattaattattaattaataaaattttataaatggtcaaaactataatcatgggaaggaacaacttacccaagtaacaaaacaaaatgagagataaaagaaaaatgtaattttatgtaaataaaaaaaatatgtattcattattatttatttatttgggcagttttcctaaaatttgtatataaatgatcaaatttagtaaacaataaaaccagattttagttttaaaatttcatccaaactaagaggagggggatttgggattgggattgggatagagaaagagaaagagcattgattatcaatttctcatacttaactcgtggcttaatgtgattggtgagagagaagaatcagatccatgttacgcctgggaatatccaagtccagttggaactaacgtatagaattccgccacgtcccggtttcttcatacacaaaattacaagctacaaataaaaaaataaaataaaaaaggttgagagggtatttgtgctgagagagagagaaagcacgtgacataatgcaaaaaactaaaaagtcttcttcttcgttcaattgtaaatgacctaacccaaatacaggcttcatagccctctctcttaccggagagagaggtgtgtgtaacattactcaccttcttcttcttcttcttttccacccaactcaccctttgaatttaccctttttgccattttctccatatagcttctctctctgtctctctcactttttttttttcttttaacaaagcggtgggaaataagtgagagttgttgaggatttggattgaggattttcttttcttttcttttctttgtgcttcagtggtggaggcgtgttagtatttgagggttttgttgctgttgttgttgttgttgttgttgttttgttccgtttatctgagctgagaattttagggttttggaggtttggtctgtaaatatggagagatctaatagcaaagatctcggtcacttcgttgataattcgtcgagtaagctctctctctcaccttcgagatctctggtttctctctccctctcgctctctttgtttcagatttgttgttattattatttaattagctgaaagagttttttttttttttgggattttgaggtagagagctaaaaattcttttttttaagtatttttgtggaatttgaagcattacgcagcatgagatttgggtttttatacacataatttttcagtgaacaaacgatgtggggattttcttttatgggttatgatttctggccaattctttcaattgtatatccttgctgtttattttattaggattttccttaccgtccttcacttttttcattcgaatattctttagttttacttggtgcctgctttcgtttgtagttttagattttgctaagttctggatttccgtcgacaaaaccttttataaaatagcaatttttgttttctgaatttgtactaggaagttacggaagtaatttaggaatctagaatttgaaattgaaatgcgtttgattcataatatccctgcccgtcgttgggggtgtgcaattgcgtaaagtacattttttattgtgttcattgtctacttgcaatttttgtaatatatttgtagccgagctagtgtgtcatcaactgctatggttaaaatgtatagaaaatttgttcatgtttattgcagctgaaactttttcttattgtcgtacagataacgcactctttgatgcatcacaatatgaattttttggtcataatgttgttaacgaagttgagctgggtggtttggaggtagaaaaggatgacagcacatttttcaaatctgctaacaatgagtaccatttgttcgagagagaagaggtatataaatttccatcaagtcagtcttgcagctattttaaaattcattgtgttgctgttatgtgcattatatgatctgatttattgagttgttctttacgaaacttgaaggtgaaattagttaattaccactctgcggatttatttggcctgacaaaatttctctcaagttaactaaggaaaaatggtgtacgttgtagttgcagatttatcctgatttgcaataaactacaccatcaatattgaggtttatggttcaactaccccaccctatggtttttttttttttttttttaaaaaaaaatggtgaattctaaagcataataagaatattaagttattggacattacacagcagggattcaaaaggtcttttagtaatttttaggtttgatttcattgcttacaacttttcattatatttgtgcaaatgtctttactttgcaagaagaaaagatctctagttcggtgattctcacgctaagttgttcttaaacagtgacatgccacttacataagttgatttctaatttgtatatcaactttcgggttttatattgcatcaatcaaatgcctattcgtttgttgtagtggtactaaatttgctaatgctatttttacctttagtagagcattgacaaggtctagcatctcatttttatgacagaaagtcttgagagagatcaactagtatttataaatccaaacaaaacaatgttcataactaaatatgatttgagaactatggtgttgctctgtatatgattagtttttctttgtacattttgttgttcctttatattaactcgtgttactgttttactgtgcttagagtccaggtttgggatcattatctgatatggatgatctcacaagtacttttgcaaaggtcagcttccttgacttaagattaattaggtcactgttgatttacgtttcaacagtattactaatgacttctgagagttaaatgatattgcatggtcttctcttatgtttcttaaatttaattgtcctaaccttaagtggacaaataccagttaatgtagttttttaagcttttaaattgttatttttcccactgtaacacagttgaacaaaaatgtaacgggaccaagacacccaggagttattggtgacagaggctctggatctttttcacgcgaaagtaagtagtttatttgatccttttgttcatccttgtttttcccatgtattttcttctctgcaaacttattaaagattttctttgtttttttatctggtttgtcccagtgtatgtatacctatgattgcctttataatttgctaccccctataatgattatttaaaccaaactgtttcattcattctgtcatttctatcaagtaatgtttgcatagcaatactagatgccattgaatttttgaagtttgcaattgaatttgtatttgttatgagaaaactttttcagtattgtcaatgtggaacttttttcttggagaacattcacatgattgagtatctctttgggtgggcgaatgaaaattgttttgacactattttaagtccattttgactagatgaagtttgagtgaatgaagagtatatacattacatggattatgttataccttaccttataactggggcaaacattatttgttagcatggtaatgattaatgttgtgtggttaattggttttctgcacggtaatgattaatgatgtgtggttaattggttatagttttggtgtattatttaaaagggtaattggtggcatagatacccaatgtttgcatttttctgtagctctatacttttttttggtcacttgaatacctaatgttagtaaaacaatgatttcgttgttgttgctccattagctctcttaaatgttgacccagtggagcacttgttgactctttaatggttcagccaatcaatctaggccaataactggaccaataaggagttggcaggtgtcagatgagtgcatttaactgaacaacagtaacaaattcgctgttttacaaaacctttgagtaatgccgaaaacaataacaaataaataataagttactacaacaaattgcaaacattgagtatttacgctgccaatttccctatttaaaataaattcagcaagctcaggttttcttttaagttgtgtgttggggcagagtgttttggggatggaagtatgtatgccctctgttgtgtatttttgtgccaaaaagtacgtaattaaccatatcattattggaaatgttcattgttcagacggaaagaaaaaaaaagaaccatgctattattgggatttcatgttatctttgctcagctttgaacttatttcaaattttataaattccaggatgtatttataaaagatgatatggaataatatgtattacatcctataatgcctgtatgaaatactgcatgctcgacatatgatactagattaacatacataaccaaggcctattacagccactgctgccaatcacatagtacatagaaaaagataattcttcaaattccttttccttgaagatccaaacagtctcacaatgtctcatcttattctcacatcctcttctatatcattgaattgaatattctactatttctttccaaccaaagctttcattgaacagtaagaacaacaacgttctaaattttcttcttatatatacccttgaattatgacacccctagttttaggagacatttatatagtaaaaagagtaagtatgatttgtaaaactagttcatacctatcttttaggcatatgatttctcaatgttatttggttacagctacttaacactgactctctgttttcccttactcttcaaatgtattgtctacaagtattttctttacttggtggtgcttgcatgtgttgatatccttcttggcttttttaatgaatgtttgatgttggtgaccaattacacaagataccacctatctcccttcctttgcggctcttatgttggcattcatcattgaagagaagtgattactttgactggtcctacaacatgacattatttttgtctttttacatatgaatgtgtgcagcgtaattgactgcatatggtgctcctcttctggttactccttgaggattccaaaaattaaaagtagctaaattattactaaggcacttatataagttgtattgggttggattctgtaggatagcagaaagccagatataattgcttaccgtactgtctgtattgtaattttggtccatcaagtctcatgtatttgtgatttacttcaggttcatctgctactgattggatgcaagatggagatttcagtaactggctcgatcagcagatgtttgatacagaaagtgtggaagaagagaagagatggtcgtcacagccccaatcttctcttcgtttcggagaatcaaaacctttgtacagaacatcttcatacccccagcaacccttgcagcatcaattctccaacgaaccaattatagtacctaaatcagtgtatacctctttccctccacccggtagcaagtctcagcaggcttcaccacaccaaccaaatcattcatcacttcctggtgcatcccaaatgcccttctctacaccaaacctgtctcacatgtctaatcctaatctgcatttggctggtttgcctcatgggctacattatggagggaacatgtctcaatttaccagtcctggcctttctttcaatagtaggcctcaaaatcattgggtcagccatgctggaatattgcacggggatgactccagtcttttaaacaatatattgcaacaacagctgtctcatcaaaatggactcttgcccccacaactgctgtccccacagcaactgcaacagcagagactgcatcattcagttcaaccatcattggcccattttgcagcactgcaatcccaaatttacagtactcatccatctccctcgcacagagctatgcttggattacctgacataagagagcaaaggcccaaacacagaagcaacaaaaacttgcgtttctctcaacaggcttctgatactagtagccagaaaagtgacagtggaaggctgcaattcagatcgaagcacatgacgtctgaggaaatagagagcattcttaagatgcaacatgctgccacacatagcaatgatccatatatagatgattactatcaccaggctagtcttgcaaaaaaggcctctggttcaaggtcgaaacaacctttctgcccatctcacctaagggaactcccttctcgagctcgtggtagttcagatcaacattctcatctttctgctgatgctcttggaagacttcctctctcttctatacgcaggcctcgtccccttcttgaagttgatcctccattgactggttctggtgatggcagttccgagcaagtttctgagaggcctttggaacaggaaccaatgcttgctgctagaataaccattgaagatggcctctgtcttcttcttgatattgatgatattgatcgtctcctgcagtctggccagtcacaagatggaggtgtacaacttaggcgaaggcggcagatcctgctagaagggatggcagcatcaattcagcttgttgatccactcggcaaaaacagccatgcagtggggttagctccaaaggatgatcttgtgttcctgcggttagtctctcttccaaagggcagaaagctcctttccaggtttcttcaactacttttccctggtagtgagcttgcccgtattgtatgtatggctatattccgtcatttgaggtttttgtttggcggccttccttctgatcaaggagcagcagacactacaactaatcttgcaaagacagtgtccacatgtgtgaatggcatggacctacgtgcactaagtgcttgtcttgttgcagttgtttgttccacagagcagccaccactccgccccctcggaagccctgctggggatggagctgcagtcattttgaagtctgtcctggaaagggcaactgaacttctgactgatccacatgctgttggaggttgtagtatgcccaatcgtgctctctggcaggcttcctttgatgagttctttggccttcttactaagtattgcttgagcaaatacgaaactattgtacaatcaatatattcacagactcagccaagtacagaggttattagtgcagaggcatcaaaagcaatacaccgtgaaatgcctgtggagcttctgcgggccagtcttcctcacacagatgagcatcagcgaaaacttctgtcagattttgcacagcgatcgatgcccatttctggatttagcacccatgggagtagtggtggtcagctaaactctgaatcagttaggggttaattttatcagaaaactacggaaatgtgacaggtctcaatacaagcatggagggccatcaacaccgactcttccaattgctttcacaatgtcaatctgctaagagtggaatgaagcagcattggagtgcaacgggtatgctcctatgtcggagtcattttaacacttcgaccttttacctttagatattttatttgcgtaagagcaaaaaaaaaaaaaaaaaactgtaactgtctttttaatgaattttatagtgatatgcataaatgtgtattatgatggaaacaagtgatgggagtttgagactggaagatgggttcttctggggagctttattttggtgctctgtgttgaactccagccaaaactggaagcataggggatagtacatgtacagggtagttttttttaatagaaccttcaaaactcctttgttcctgctcattttcgaagacgtttattatttgtctgggaagatgttacaatcatgtctctctcactctctctctcttataactagtttccttgtacggtgaacaataatgcttccacagattcaccatacaacattacaatcaaggtaaggtattaggtatcttatttatcattcatcttgcaaatgcctaatcttttaatctaataagctgttgtactgctttggcgttgagattagtttgttgtatttagatttgtgttaacatatatatatgtcctgtagtcaaattaatcaaattgcctctaaatatcctcttatatcatcttaaagtagtagctcttcctccctctcatcatcgtgatttataatagcataaaatattaatatagtcttgatgtagaattaaaataactcaagtttcttctactggtgtattttccagccaaaaaaaggtttcttctactgagtaccgaccaaattatcatattttaggttgaatattatcatatttatattgtgaagttaaatttgtgttattactaatgcttgcattgcatagtgccgaaagttaagttgagtggcaaactagatttagacacaaacaatgcaataagctattcatcttttttttttctttttctttttggtcagaaataagctttctttgcgataatatactttctaaaacgtggttttttatgcattaatctttttgtaaaataatctcgacaaatgtcaaatttagagatcagaattcgattatttgtattttcaaccacaattctacagtatttcgtccatattttgactttgtgcgaactaataaccctatgctaaatttataataattaacttcgttttttttttttaaaaaaaaaaatacatgtataaggtaactatcctctatgaacatttttaaacaaggcaattcccattatttgatctctttcatctcatccacctgtcatatctttctgtggatattttttattatattttaaatttagaaagtataaataataattatagcaataagtgaattggtcagaaggaaaggtaagagtgcgaaagaggagacaggaagagagtatatgcaatgaa

SEQ ID NO: 15444 - DNA, 3692 bp, Cannabis sativa
  modified_base (1358)..(1367): a, c, t, g, unknown or other
  modified_base (1483)..(1487): a, c, t, g, unknown or other
cagcactgccggtagtcttcaagccgagaaactcaggggagcgcgtggtttgcacgtaccgtacctgttcgggaataacggcaaggacatggggaagtgattcaagcttagaagcctcggaaggtgaaagctttgcagagaagccatgaaagacgttctcgtaagtgtgtatgacagcattgtcaaaagtcgaggtcttttcactagaagaagaggcaagagtggccagagaagactcgtaccagttcttgtgggttgggaaaatagaaggcttggcctgtctttggacttgaactatgaaggttttcctatcagtagtagtagaagaagaagctaagactagtgagctaatgagacagagagaacaaaggaaagaaagagaagaagaagccattgttgaagaagaagaagaagtgtgagagagctagatttgctctgctactgaagagtgaggcaataacaccctttaaaaagaaatggaaaagaaaaaaagaaagaggaaatttatgaaaatcagtaatggaggtatagaagtagagaactgtagagaagaagaagaggagggaaaggattttaatgtatgtattacatttcggagactgtaacgtggggaaggctagaagttatttatgagtggtataatgggggttggttattagcactagcagaaagagggtttttatatgaccacaggattagatttcaaaaaaaaaaaggtaaagaaaaaacagaatcattctttcgtttgcacttttgccaaaattttcaaaaactttgaaatgggcagagttgtgagttgtgactctgagttttgtttgtaatgtcattcttatataagtcttatatatattaattattatttttcttctctatatcttatgccctggtgtttttctttttattattagtaggataggatggaatgtttgtgctttcactttcttttaattttctcaaaagctgaatccattttcttttcaaattaaattaatattaataatcatcccttgatttcaaacttgttaagtattattaatatagtattgtatttatttgtgggtttagcgtaaaattactataccctactaaatggaaagtcatgtcttattagtaggaataggataaagaaaattaacacccatacttgcttttggtttggccgaaagagtgagatgtgggaagaccaattgggcaatccattttcaaaagaagaaaaagaacaattgggtaagcaactaagcaactgaaattttaattataataataatagaaataattatataagatactattttttttatatatatttttacagattttcataaaaaaacaccaaaaaaactatataaaagtaacannnnnnnnnnatctaaataatatcaaaacaacaacaaacaataacatatagataacaaaaaattaataacaaattaaaaagactataacataaaaatagcgtttttttctgtaaataaaattaaannnnncgtaaaaatatttaaaattccattaaatcatatttttgtaatttcttttttattatttttatgtatttatgaaataatctcataataatatcacaaggattattatatactatgaagatacacaacacaacactgatgtgagcttataattattttaccgtttttcatattgttaattaaaattaaaaagtgcgaatccctattaaaagacactaaaatatgataccccttgtgcttttgacacttcaatatcagcatatataggttgtttataagtgttgttattgaaaaataattataatcaagtcctataatatgaaatgtgccttttaataaaaaacaacaacaacaaataactactacttacgtgtatatataagatattgaaaataatttggttttgctctctcgttctctctctttagtttttattattaattaatagtggcaggtagcaacttcccttccttgcaggtaatagtgcacttgcccaaatgcaacatatatggaaatcaactaatgcatatatagcattatcatgtaaacatagcaacagtactgatagcactacatacttccaaatgaatatatatttaattaatatttcaaatattcgagtgaaaatcaaagtagtatatgctaaaagtagaattgttttggaatcaaacctctctaccttaccccagctcacttttgaatttcatattatatcctataatatatgatagaaaaactctttttttttttttttttgttgagaaaaacagcacctcctaaagagcaaataactctaaaagaggagaccatatattgatcaacatggctctgttaaaacaatgttctgaataaatctgaattgactgcaggccaccacacttgctagaagcaaagccaacttagagaaactctttgttgctgcttcactaatttgttaagattttatataaatggtatcatgacagatacatcagtttttgatatattttaaataatttacaatattaaaattaagggtaaaagaaattaattatatacatacaagatttaggagcaaattaataaaaaacaaccaccctaattatttaaaatctaattttgtgaaataattttgatcacaacacgatagatttcgtgagttggacacaataaaaatttatgcagattgtgtttctgtctacattttattaatttttatcaatcttctaaaataaatttaagaactcgatcatgtaatcaacatgaatggcatgataacaaaaagtaatttagcttataatacaccaacataacccaaaattttgcaggttagatcgatatgacatgaaacttatgcaagacgtatttgtgcatgtcagtgtttaataatttttttgtatcacgaatcgtattgatattagtaggtaagtaaatcttgaagtctcaacacgagaggtataaacaccaactgacacccctaatataagttataactagaacatatttgaatttgaatgattatatttttacatgccaaaacatattgctactcatacgtaccccaaagaaactatatctatgtttatacgcttatgtttactaaatcgctatatataaatatagttctattcttactttccttttgtaaaaacaattttctttttcattcatcacttctatttatctatatatttggtccgtgacaccaaaatggacggtggaataaaactatatattatttttgttggattttgggattatattttttttataaaaataataaaatttcttattaataaaatatataaagatcatatttcgatgtcttttgggtttgtgtcggggagttgtcattatttaggctgaatttcttacttatactttgccaatgtatttcacaggctttatatatagactagctgactcatctctctgttacattattatacattcacatatgtacaagttttatatatatgttatttgtggttaagataaagaaaccatataaaaaacagtgaaaaataacataaggatttttcttgtgcagtgggggagcttgagaagtaaaaaaaatcaaataaatgtagccaataaaaagatctcaccaaatactatacctgtaatatatttgagcgggaatagtttgagattagcaagagagtaatttttttttttttttaataaaatcacacaatacagctttttttctaattaccaaaaatcaat

SEQ ID NO: 15445 - DNA, 10475 bp, Cannabis sativa
  modified_base (5297)..(5304): a, c, t, g, unknown or other
  modified_base (10447)..(10448): a, c, t, g, unknown or other
agtatcaatgacaagttcttcttgatcgacccgtgcagcaactaagccaacctcatcctcttcctccaattccaatgatgcccattgatcttccaaaccttgtaaatccattgttcaatcggccagaacagcaatactatatcgacttccacacagagcactcaattgagagacttttcgaacataccattaggcagactatttataaaataaatgagcaattaaaaatattttaatgtgtttttggatacaaaaattgagtaaaaaaattgtaataggaggttgacacgttaagagataagagtagggagagctcctcatattacttctctttaatataaaacctataaaacctacatagcaggtctgtctgggttgggttagtgttccattctcctcgccttactttgaaaatagaaagaaaaggaacccagcccaggattccacggtttcatctgttctatgcatcccttatcatctacctaaaccctaatttgacaagcagaattctcattcggagtcggaccacatggccggacctcccagagaccaagctctttctctactagctgccgccaacaaccatggcgatttggcagtcaagctttcttctcttagacaggccaaggatattcttttgtccctcgatccttcttttgcggccgagcttttaccttatttggttgagcttcagtcctcccctgaggttcttgtccgaaaatcgctcctcaagtaagctcctaaaccctaaacacttatctatctgttttttattattattaaaggaggtgggggtgtgttcagtaggggtttagtttggaattcggggtagggggcggctggggagttcaatagtttacagttatctgtgaaatacatgtatgggtattgttttgatgcatgtctacacacacttgtttttatagctaagctaaataattgacaagtttataggatgtgagatagggttttatgctgctggccggtaaatggaccttaatgagactcattactttttgacggttggcaggttggtggaagaaattgggttgaaggcaatggagcattgctctgtgctgatgcccgttttcttgacacttttaagagatgaccaccatgacgcggccaaacaatcaattattagtggctcgaatttcttttctagtgttttacaagagatgtcattgcaggtctctctctctttctctcccattttttgagaaacatttctctcttttaacgttatgcataaattgtggatgataatattaaacttaagcaaatttttgttcactctcatttaactaaatgatgttagcgtttcaagttgtttgcatcgtattgagtgatgcaggagtaatttaagttaatttacttggagaaatatagccccacattattgtaattttttcttctctattttctagtgaagcgcaaatgaatgtgcattaaagaaaaatggactattttttttgtacaaacttgtttctaatatagctgaaattttccatcttttgagaaataggtttgctcattagtccacaactcatcagaacataattcatatattcattttcattcatgctttttgtggaattttaatgaatttgtgcccatgttcttttctgaaatttgttatgacttggttgaatacttattgtacgattataatagtttcaacggtgtggtaaagtggagaggtggcttgaagaactttggtcgtggatggccaagtttaaagatggcgtatttgctatagcattggaggtaggtagacattataggtgccattaaattgagttctgcaaagttgtttgtactttatttatttattttttggcaataaagaaaaattttattatagccttccatgtaataaattttctcatttcttcttttcttgttaatttgtatttttgcgtctcacatatattatttgtattgttaagatcagatatggctttgtcattgtaatttctttcattctttcagtcactttaagaatagtaactttcaacagctaaagtttttctttgatgtgtttttgtagcctggctgtgttgcgacaaagttgctagcactgaaattcttggaaacatatgttttgctatttacatcggactcaagtgaaactgaagctcctgttgcagaaggtactcagacctacttgaacgtcctgtggttttactgagaagatgggaataggttttaggcagttagcttacctttttgtctagtttccatgcgaacatttgtccaaatttgagttttcatctctcagaatgtgatcgtttggatattaattttaagctagttgtaacaggaagtaggcggccttttaatatttcgcagctggtttgtggtcacccggttcttgactcatacacgctcatgtcagaggcaaataggactcttggcattctattgaatttgctgcagtcagctagcagtttacctggtcctttggcaatctccgttgtgaattggtgagtattgtactattaagggttttgcttgttttttatcttagcaaatcactttctgactatggcgttgtccatatctcggaattccgtgatgatgtgaaattggtgaagatgacatgggaaataatttaagtaaactttttggcatgtgggtattattatcaagcatagtcttaggaagctatgtttttagtttcgtgttgaaccatcttttagtattcatatcttattgccattattgtggaaacaaaaggcatttagtctattctttgttctttcaagttctctgcattactttagtactttattatttaagctagctagaattcccatctgtaaagtatatctcaatctccaaacatgcttataaaagtgtcacaatatatttcacatttaggttggatattatctcaattttcacttcataccttttatcttttgaagattttagaggtttttgaccgtttgcctatattttttagtttattttaatacaattgtttgggtttttatgtcttaatgttcatgtatggtatgatggctatagcatccattatctatagggacgactttcatatattttatcatctctttaatcaactttggtgttttggatgtttctctcttttctactcatttagatgttagaatatggtattatgtttgctgacacacaactaaagttgcatccagaatgtacattgttactgataaccctccagtggaatgtgacttgaaactttgtattcctgaaatctattgcaaggttatatattttccctaatttaaatgtgatggtagcatgtctcattactgttactgatatatcttcagaataaagaaggcattaaaaaattcaaaggtacaaacaggaaactggattttttcctctgtttttaaccatcttgaaatttatgaggggatcacagaagcttgggcacaggttgtagaaacaagttcaactgcttgttgtgatattattgcagtatgctgatgagctctcttaattggagttaatggatactgctgcattggcggttcagataatgagattcagggatatgctatgtaaactgcacgttgtttgggtactttggagccccttgctgatgacaacgttgcataaatgatggataatatggtggtcttgtgtgctgaggaaaatatgatagtcaagccatgcagtttatgtttgtaaactgttagatagaccatttactttttaccattttctaagttctgttctgtatgtgcatacagctaataatgtcgaagttattcgaaagtgtattgattattataacagttgacatacatttgacacacttaataattaaattttttttttacctagatatgccgagtagcattttgcttcactgctctcattttgttttatttatgactcttttgtgcattatactgaattcactctttttaattttttatcatttcttattatcatttaattatcagtttgtgtgatcaatattatgcatctttgtgactattcaccattgctggctttgaaacccaatctctgttgttgatgatggtacaaacctctttttcaaattagattataaatctactatcagactgttgtaatttgtccgccatatctatgatctgttatctgcagaattaaaatggtcaaggaacatcatcttttaaaatccatttaatgctaatctgcaaattcattttccttaggatatgcattcaaacaattttgataaatattattgccaaagtaattggttatttgatttgtgtattatcactgcttatcagccacaatccactaattcctgcaatattcattggtggcataactgttggtacttaatatgaattttctgctacattggaaaatataatttgttgaagttattttattaaattttgattgtattttcatattatttgcggatacaatttagaatcatggtaatggtcattgccattttccagtaccacaatcatgttatctgtagtcaaattgataactttaaagattgaatattttactatattttgtatgatctttacttcacagtaattattagttttccttagcaatttggtattgattgagtttgcaatctgttttgtttagagcctatattgctgaagcagttaaatacaagtttaaaggctggtatatatataatctttaataaaaaagtggttaagaggcaaaagaacagagatgctgtagaacctgtcttaggaagtgtgtcctgtattgtaacatcaaacagtatcaacaatttttatttgatccttgtgaatattcttaatatatttggtgatcatctgctgctacgtgaatgcttctcctgttgtaattatgagcatgccttctgtttattgctttagttcgtatcaattatattcttggcaaggtgatctgaaactgttcgtatcaacaattatatgcatagattgtggcaagattgtggaactgtttggtttgctggcatttgcagggatctgaaacctcttaacagctatgtattaggatatttaatgaaacctaataactaatgaaggactatgagaagatacatagttgattttccttagtacgaagctattgaaaatttagaggatgtgattcatatcaaagttcacttttttttttcggatgctatgttttaatgagaaatgcatttgaaatgggtgtgagtatgtcaattgtctagtttatactagttgtatgcatctacttgaagtcattaccctaccaacaaacaatcaatttttaatttctataagcggctcatgtgtgtgtgtgtatatatatannnnnnnntatatatatatatttgtttttgttcaaatatggtttaattgttgttacaagcttgttctcactatcagaatagtcaaaagatgtcatgtttggtaggcttttgaattggtatttgcttgtggagtatagtgacccatgattttttaatgctagatgagctaagactatagatctatcatggaatagctgttggtagcaggttaagcttcaagtgatttataagtgaaatgtattgatgatattcatctatttagtttgaagatccttttagctagatctcaattatgttgaacttggattatttgagagaatgttgaagctgtaaaatacgttttttactgtacgactttaattctacaggtcacgtgcagggaactttcctaaaacacagcaaagtaaactctgtttgcgtggaaatttatttccttaaaagaattaaaattcattagacttttcctaacaccttgaaggaggtatatcattgagaatgaatgaaaactgctagttttcagacaggattggggttggtaagcttcagtactgctggcattcttgtgtaacttgctagttaaatgttaatttgagcaagttttgctgtgtgggtgtctgtgctaacaacattctcgtagagagatcaagtgcttgagttaatcatgatatgaagtccaccctaagagaggcttaggaatattttttaccaattacataagtttgtcgtttccttgtcatgactattgaattattattattattattattattattatttattttgcaaaccgtttttataatggtgttttgggcaacttcaagatgttgattgagatgatgtatgaaaggcttattctaagattatgttttggagtttagtggagcaattcttgttcaacatttactaaatttgctggagaaaaagcctttttttgtgtatgaagcagcaggttcatggagatcatattatcattttagtaaatagagactaataatttagtagtagtctgttctattttcaaggtttgagaggagtattttggtgtgcaatgattagaagtgtggtggaattggaatggaattacttttaaactaagtttaggtggtgttatgttatacagaagtagttgcgagctgagtttgttctctatttttatttcattgaattttatgctttatcaatttatggaaaaatgaaaaatcctttagttttgtcacccctaaatctgtttagtcactcatcaacgttcacgatatagatctgtcaaagtttcatgtattgcattgctcaatcgtgtgttctttcttttcttttcttttcttttgtttttgtttttgtttttgttttgtttttctgcattttgcttgttgtttttctgcattttgttttactctctcttactctgtttaaattggttttcctccccaaaagtgggggttttaatctatatcagagggtggtcagtctaagacaacagcctctcctcttttttttttttttaaaaaaaaattgtgttctaccctagtcagttgtctggtttagaacagttatgttcttcaatgttttggcagtcttaaaattccgctggttgtacttttcaaccatgaatgtttcataatattcttgccagattcctgctgattgtgctcctggaaggtttggtcaatttgatttattatttctttgacttctggagttctcttttccaaatcgtacttacttgtatgcatttactatccttgtaatattactctgtcaagattttctatagttttataccgagtataaatcacagatgtctagtagtggccttaaccatgttgacagaggatgtaacttttgttgtgcatgcacactattatttccccaatgaatgtgttttgtttacattgatagattgaactcgtcatcttgtttgctttttgtaagatataattagatgtcttaagatgatactgcgggagttctatgtaataaataaaataactaatgatctcttattatgagcatataagcttaaaggaataaagccctgtgtgggctaagttagtaatttaacttaattacacaggtcgacaaagttaaattgttttggggatgcatacttgagcaaaaattgtcaatgttgcctaactttttgactgtaaagttttctgaaacaagtaggataagatatattgaaattcggcaattagaatttagttaaggctccttttgaagatctagttttctcatctgttcatttgttttaagaatatttaatattctgtttttgagaaaatgtagtgtctgaaatgtggttgctgtttgtagagtatgtatttgatatattattttactataactgtgcttgatgaaacaatgctgtaaagccatatgagggttcctgatattttttcatatcatgtatattaagtttcaacttttggctgttttgtgagttatattaattggtgtctatgatgtcgcatgtttgtctgaataatctctttatttataggaagatctgcgttaaagttgatttccatctttccaaagtaaaaattagttatcttttgtttgttgtattggtttctgcctttttatctttggattcttgcttcttaatcgtgttctgcttaaaatgttgatttcattttattttgtactacaaatcttgctgttttaactatttactagtaatctcatactgcatttatttttttgatagtcttgcagctatagcaagaaagaggcctcttcactacagtacagttctcactgcgctgcttgattttaatccgaactttgagttgatgaaaggatgtcatgcttccagtatcctgtattccataagaaccgcgctgttgggatttcttaggtctactaccccagctattatggaggtaaagatgtttttcttgtacaatgcttattaatatgagtgttatgaatattatagttaatgataggacctgtcactgttgccaatcctttattattataattgtagcatgagtacacttttttgcatttttgtcatctcttttcaatatgaaattttgattttaggttgctgaactgttgtgaacgttaataaagtgaaaactaagtgtacaagttgtggatcactttttcgattttcctctcttttgtatcagtcaagagatagcttagttcgtgctctacgaaccatgaatgctggagatgcagcagatcaagctatccggcaagttgacaaaatggttaaaaatgctgaacgtgctttacgtgatgctcggctggggaaggtaattgttggtagcagcatccttaagctgttcttctctcactccttttagtatgctctaatcaaatggttttcgcctctcttgtctttctatctcaggatgatcaattgtcaagcccgctacttgtttcaggggatctgctaaaaaagagatctgtgcctttggacaatgaagactcagctaataaccatgagttaccttctaagaaaatgcgtcatgatttagagacctatttgagtgtgccggttcaaagtactgatttttggcaggatggcagttctgttaatggtctgtcccatgatattcccttgttggatggtgaattaactcctgtagaaaagatgattgcaatgattggtgctttgcttgctgaaggagaaagaggcgctgaatcacttgaaatccttatttcaaaaattcatcctgatttgttggctgatattgtcataactaacatgaggcacttgcctatgacaccccctcccttaacagtggttgggaatttccctgtacctcgccagataagttctttaaataatccaggacaagctagttctggatctcctcgagcaaattctgtgcaatccccaactctccctgtgcagatgcctttctcttctgctactagttctttgatttctgacttgcctatggcgaataattttcctaccgattcaaaacgagatccacggagggtagactttactcctttttttttttttcactctcttatatgtttattttactttttcctttatacattttgaatttttagtgattttgaaataacttcttgtgctatgtttttaggatccccgtcggctagatccacgtcgcatagctaccactggacttgcattaattcctactgtagaggaggcttcttccttgcaatctgaatgtgatggttctttttctttgaataagcctatttcacattcttttgggacaagagttgagagttattcagagcctgttgtctccatggaggaggaaatggaaggtccattgatttctgtggtgggtcaatcagttctcaaggagcttcttgaagaatcagaggaaattgcccctgcaaaacaggtcaagtcttcagatcccacagattctgctgtttacactagtgatgactttgttccagaagggtttccagatgttgcagtgaaagatgaagttgatacgtcatattttccagaatttgatcagcattcaccagacctttcaaatgcatcttcatctgaagatacctgtgaagatctacctcagcttccagtatatatggagctaagcgaagaacaacaacaaagtgttagaaaatttgcagttaaacggattattcactcttacaagcatttatgtgtgacagattgtagtcagatgcgcctagcattacttgctaggttggttgcacaggtaattattatgtaattttttagtttcatttaagtctttttttctttcttatttttagtctgtcaagcaaattaatttgaacacaaaaggaacagttctaaattattgctctatgtgggtctctccatgtgagattgagtagctaagtgacaataataaaacatctggatttatatgctttcaaaattatcttcattttatgggacataatgcatgcgttttttgcgaatgtggcacacttcaatatattttgtttttcatgttttatttaaggtgaaaaagaaacagatgttaagtgttaaaggtacattgtctgctagagaaattaagttgctattccacatgtattgccatgcatatatgtcaaagcaataactgttgcattgttccttttacgaagttttgatccaaacagtgttaggtccaggatgctagtgattcattcatatatgtcaaaaaaaaaaaaaannaaaaaaaaaaaggaaaaaaaggaaaaa

SEQ ID NO: 15446 - DNA, 2312 bp, Cannabis sativa
ttttaaaatctatattaataatgaaaaatttttctcaaaaaaaaaaaaaaagttttgtaatttttttaattttttataaatataaaagctgaacatttaaaatataaaaaatataaagtatttgatgtaacaaaaaaataaatttgatagttaatagtaataagtaattttttttttttttgagaatattaaaataaggacacataaatatgatattttttacttttaccattctaagtagcaaaaataggagtgttcgaaagatgaggataatgagtaaccgcaagccacaggcatgtgtagcggcactaccttcaaatctttcgaggagcaaaccacaggagaatggtcaaacacgcgagggcatcgacgtttctttatggatcacttgggggaaactagtcggataaaaaaccccaccttacatacacatatcagaaccaatatgctagggtttagggttatatgatcacgtggaccactctccacccacagcactcccaaaattgtactaaacaaaacttgggctttcaatttgtatatgcttaggcggtagtctagtttcgatgtgggactttttggtaagaagtaagtagatgctacttctgtaattaattaagttgactgctctccaaacccgagagaatcggaccgaccaaaatggctccaaaatccgatacccattcttctgttaccgccgccggcgactcatcctccacctctgtcgatcccctctttcacgcactccgtctgatcccgtacagctttctccggacgccgcgtctacgcctcaagcttcctaccttcaccttaccttctcccatgactgtctacgccctagtccttctgacgtactttatggtggtctccggcattgtctacgacgtcattgtcgagcccccagggattggctccacccaggacagggccacaggggcggtccgacccgtggtgttcctccctgggcgagttaacggccagtacataatcgagggtttgtcttcgggtttcatgtttgtgcttggtggagtggggattgttctcatggatctcgctctcgatcgcaatcgagcgaagagcgtgaaggtctcctatgcctccgccgggatctcctccgtcgtcattgcttatatcatgagtatgctcttcattcgcatcaaaattccggcttatcttagttaagatttgctatgttttcatatagtttttgtttttattgttctggaaattatgaaactgtgattagaatcgctaatatagagttcttgatttgaaggttatataaaccttaataacttatgcctgaactcatgtgctattgccaggacttaaaatatatgctgagctttttgtatgagtttcatctattgatacttaaagtttctacagctcatggggttttttctaaattggattcctgaactaaatttcttataatgctgcctgtttcagtgttgggttttcttactgaatagattatacattgacattgaacatagtttcctccttgtgttatggtacaatgataccaattaccaaatgaaatcatatatttttttttttgtaaaatttagttcggttttggtgctttttacgttgctgttgaaagctttttgctctcagttcatataaaaagcaatgacaaggcagttaaaattgtatagattttagtgagtgcataggcaatgacataatataaaaacctatttgtgtatgtctgaatatatattatgaaaaagcacagaaaattgattcatttctgttcctgttaaagatacaccaaacctaataatagttacaactcaaagagagggggaaaataacccaaaagaaatggccaacatgtcttacaaaattttattgttctgctaattgaaaaattaaatgaaatttagtttcttactttattcaaaaacattttttttttcgtctgaactatcttttaaatgattttgatgattttatcagctccaattttgaatagaaagtgactcatgtttctatttatcaattctttctactagcggatgatcatcggattacattcatttggccttttgaatcttcacattgaaggggttttctccagatttataatttaatgtctttaatttctaatgaattttattaacacgtttttttgttttcattctttatttaatttcacaaggtgggacagagatgctgtttagttctataagtttgttttgcatattgttgtgattctcaacttatgcatgttatggtcattcttgtttcatgaaattgcaaccacgcgttcatctttttatattttgattagatggaagaaa

SEQ ID NO: 15447 - DNA, 5544 bp, Cannabis sativa
aagatataaccgtacatttattaaggtatgactactgttaaaatttaaataactttagctaaattaacgagcgaaaaatactaattatgatttttgccttttgaagtttgaattgtgacatatattaaatcatgtttcttaatttttaaggtcgttaaaaatattttctaaactattgaaatggttagatttaaggacttttgtataaactatgcttttaagattttgatatctaccaaataatgtctcttcaatgtaattgtttatatgttaaatcatgctccttaaattttgatatctaccaaattatgcccttcgaattttgacatgtactaaatcatgactcctagacttttattcatgttagatttttttactaaaattgaaaaaaatctttaaatctaacaatctcaataatttagatagagaatataatttagtacatgttaaagtttaatggacaaaaatactaattagtctaattaggaacgtcaaataaagtagtgtgtataaagtttcattgtttggttttgtttcttcttttgataaattacagccgaccaattgtatgtagcagaaaaataaaataaagcgaagtaagaaaaaatgtccaaacttctaaactatagaaaccttaataattgcagtttctataattaatttgattgcacagttttacacttgaagatctaatgtcttttgaaattgcgatttatctgtttgaacatttgtatatatatttggttacaataaatatacaaatgaatgctgcttctagttttagactagggaaaattaataaaaaaaacacaaatacaactgggagaaacaaaagctacaaaaccatattttcaattgaataattttccggttcatgtatacgtctccaaacatctttacaagaccattttgtgatatatcttctgaagtatttcgttagtgtacagttttgtttttactatgtttcagaatattttctcctctgttccaaacaatgtcagagtttagaattagtaaaaactactacatacaaagtacacccacatgtaaaaaaacaaaaatcaaacatacacgagattgagaggagaaacaagctaactgaaattggtcactagaggctcaacaaattaaccctgcagattaagtcaaaatcaccattagtcaaaataaaatgacaaatcatcaaacactggagaaaactaaatcttaaagacgaacctgttggctcataagaatttccactgccacattcaggtctccttctgcagcttccagggcaacttctacctgtgtctgaaatcatttgaaggtgttttgtagtcaaaactcaattttctaacagggactatattatatacagaagatgatgcaacagaaagataagaacagtaggttagacttataccttttcaaatcccatagctacaagtttctggatttcttcttcagatgcgactgaaccttgtattgggatcccgggagttgttgctgcatgttgtactactcgcctaaaaaggattgacaatagaaaccactttcagtcatagctacagaaactgcttcgatattgaatggtcattgatcacgaaaagtaaaatgtcatagtgataaggaaacaattgacaagcatatttagaaatccattttagcaaagcaagtgcataagtttattattgtaacaccttccatcagataatggctgtcctgtgccagttgctgctgtgtctgatggtggactactatcatccaaaagtctaacctgaaggtttgaatctgaattatcagcagggcccgtctgagttcttgtagatccaagtgtccttcctgccccaggaaatctactgtctacagttgactgtatcatttaggcacaaattttattagattcaacacaaatcaaatcagccagatgctttgagaatatgagattaaggaaggaaacagagcataggccgaagcactagcagtagtagtttacttttcaataccaaaagttaaaagacttttgagtattatacttcaactgcatgtgatatgatcccaactgctgctgctaggttagtaacacatatagcagtataaaataatacttataggaatataagagtgaagggaaatctgatattgatattaagtaaataagctgccacaattaccacaggtttcgagagcctggggtctctccaattgatgctaaaatcaataatcagatcaagcaccccccactaaaccactcaacacaaatatacatagcactcacacactcaaaaagccaaaccaaaagccaacaataaacacacaataaatatactagagaaactgaccaacaaattaattctagtgaaaccttttacttctcctagcataagtgaagcgatcgaagggtctaacaacatgcctttcgaacattatctccaagatttttatctctgttttttcccccattataacccaaaacctacactgaaaatccattcatattcactaaatccataattccacagcttggttgtcatctttctttcattttttccacaaaacaactcagataattttctattttttttttttttaaaaaagcagtaggtatggcaacatatatttatcattgtcaaaccaggaaattcggtgatataattcaataaagttggaccaaaccaatttcatagtgatagacagaaatataaatcttgatagacactctagtagatttgacttctcatgaaaaccaagttgatagttgaccctaaacatcaatgattaagcacatcgatatgcgtggtttaaaagttcagtttcctctgtcgaggctagtcaaagtgcaaatggaaaagcaaaattatacaaagaaaaagtccttgaaacctaatacctcagtagatgttcctctctgtggcatccaagaagacaagttcctccacgcatttccagaaaacaatccactgcaagagaaaacgtatcaagttatgtaactcatagaggatcaatattaactctaaaggagaactcacctggatgttgtattttgggttgaatgtgttgggatgtagctagtaggattcccaccagtgcacaaaataaatttgggtcgcctaacacaacatgcctgaacatataaatttataaataattatcatttaaacgtctttattaaggtattgcacatgtatttatacacttaccaagaaatgattcattaaacaaaagctcaattacttaaatctctttttttcgtttcctttgaagacgttttaaggttgacacattaagtggctttttaaggttcacaaaagaataaattggtacaataaaaacttgctattcaatactgaataaagagcctgaacaagatttagcaatgttaataatatctcacttagtttcttgtctggactgtagacaagaagacataatgtcaaaagcgggaaatttttgccttctaaagccacaatatgaatataataaaaaatcaatgtcttgaattgatacttgcaataaaccattaggcatacgtacaagccaagatgaggcctcaatagcagaatagaatgctgctccaggcattaggaagttgaagaagccataagtatctgcatcataattgccaagacagcatgtaagacatcatttgtattctcaaattatatggcagcacaagaggagaatagtgttcagaagacgaagaaactgacatgcaaagccagataatatgccacttaggtgtcctagtaatgagacgtttgtcataagaagctgaaacacaatcaacaagatccatgcatacctgaaacatgaaattcgatagttacataacaacattttatagaaatatcagcatataaattgactagtcatcatcaatgcatgtttataaacttaccacttagcaggcacattaaatagtccaaacacactgcaaaatggaccaaactttaattagtaaaccatatgcagttgcacaaactaactaattctttaagaagagagttatatgtagggcagagattcccttgagcatacacagttgtcctagtccacatgtctgcagtgatggagccagaaattgttttgtggagggctaatagcatttttaatattttaggggagcttcatcgacatattttcttcaaaattttaggctatgttttttctatcataatatattgaaaacaataaaaggaaaaaaagaaaaaaaaaatcaggagcttccactctcttatcagttctgtttctctctcttaaggactggcttcactatgtctatttataagtgcataaatttgcatgtgtcctgtttccagtagtgtcatccaaactcagagatgatacagtctttacccaaaaagaatacccatctatctatttgtatctatatatgtataaaaacgtttctctataaattagagtgactaatgaaaatagtatcataaatatatttcatataaatgatacgaaagaccaccttctagattggactccactgagacttgtttctataacaatcatagagaacaatattcctgaaaagcctattgcacactcattcatcagataaccatccgagtggattgggttatacatgaccaaaagtgcaattagaagatgaaaaagagcattgctgatggccaacaaaataatcaagtacaacaagcggacagatcccatgattctctcaagctcagaacccaaaggaacgaatgccatcatgttgaagagcacgtgaagtattgagccgtgaaacagaaccgaggtaaaaatcctgtagactgcgagagagaattaaaaacaaatttgaagcgcatgttaaatataatcccacaattcagaatactaaaatacattaatgaaatcgtgctctttaatttatccagctcttcattcttgaaggatcgatctctttcccttattacaaacatggaatgagagataagaaaaccaagtagtaacaaaacagtttttcatcttcagcattttagaatgttcattactttgtaagaaagtaattatgcaaaaaatacagtaagaaataaaaaaaaatggatttttctcatcctaatttttgtcaattaagtgagaatcaccaaaagtcatgtaagaaaacctatgaaccattagcagaggataaacactttccccatttcgtttctcattacggattagcaagcataaccaagggttgagctaattttcaaacaaataaaacaaatttacatgaacaagagaaaaaaaaatacagtaaataattaagtctctttatttaacttcttttacattaaaaacttagagatattattaccttggaaatgtgatgcaactgcagaaggcaagaagcatacttcaacaaaagagtcatatcctaccaagagacacaccaagtaaataatcccacaaacggccacaatcccagaagtaaggaccggaatgctttcccaccattgccccaaccttgtctgcaaccctgcctaaagattaccattccatagcataataagaaaacaaaatcaaattttaaacaaaacccaataatccatcaagacaactgaa

SEQ ID NO: 15448 - DNA, 4477 bp, Cannabis sativa
tatatatatatatataataaaatacaggtgaatttactcaactgataccttcatctcattggctgccagagacgggtacattatcttctggcactgtgtccgttgggggcgacttctttgtaagagccttcggcaagtccacaagctcttgagcgcagcgctgttgagggtgtgccagcagtgtgcacatgtacttgaagaggacacgctgcagcccttggccgctctcgaaaatgtatccttcgtattcactaacatgatccaaggcgtccacgagtgagtcgtacacctcttgtgggcagttgtcgggtccaggcttgtcatgaaggtagataacatccaaagtgaaggacttctggtttacaggccattggtgttgcggtcgcacagatgatctgcagtagatgagaatctaagagcaaaaattgcaatttggtaaggagggtaaaatgtcaagtgtgatcaaattggttaaagaataataagtgaaggcatagtaagctacttaccaccctaagaattcgattactagcacgggatttcttcgcttcatatgctgctacacggagcagattggtgagatcagcttgacctgttgcttgagtagctgtgagtcctcgaagtgcttcgttcgcagactcaacatcgttgctaaactctttgcgaagcttcaatttcaaaacatatgagaaattaatctttgtctcaatcatagtaacaaattgagttgttcaagcaaaaatgctgcatttgtttttagtaacctagaactctgctttgtgtttcaaataagcagtgttttgttatgaaaaagaacaaaagcatctactaataatagcataatgagtataataagattagttcaagtttttctatgccactagcataaaatatgttgaatttcattctcatttctcatgcagaatatagaatctaatttctacaacagcaagaagacatattcacacgattatgtgtcaggcacccaataaagggtaacatagtaacaaatttgtgtatataatttatgtggtcacctttgtatattagtgtagagcaccacaatttctgggtaagttcttctttaatgtgatctatgtgtgtgaatttagttgggtcttaattttcagatacttaaaataaaatgcaaaacacttctaatggtcactactatgtgatccatccaactaaatttccaccaagaaagcaaaattaagcttttgatcagattcaggtctccaaacaaacatcacttgaaatttgtaaaaaacccaattactaaatggttatctataatgaaactaatcacacatgcaaatcgaattgaatgaactaaataataaacaagaagcataaatcataaatctttgttctcaaatcgaataaactaaaattgatcattgctgtaagcattttcccaattcataacaaatataatggaacaattgaattaaaagagatggaattagggtagtgagtacagagtactgacccaagaaggggattttgcgagagtggcgaaggcgaatcgatgatcaggattgatagtgagcttggcattgatgaagagaagaatggcttgcttgatggaatccaaacgagtaatgggtctgccatttgggccagagaccttcatctcgaggagggattcagggtcaacatctatgcagaacagaatatcttcgttcattatccttgaaggtcgcaagctgtagtagttactccctccatctcctcctcctcctcctccacctgaactgcctccctccattccttccatctctgccggagtcgcttccaaacggtgtcgtttctgaaatctaactctgttactcttgtcgagtgatgatgaagaagaaaggctctcttaacggcgtcgtttcacaagccagattgaatattttgttgtggtgtaaatacgacatgtcgttttggatgccagagtcgctcccaaacggtgtcgtttctgaaatcgactgtctttcttgttaactgagagtgatgatgaagaaagaaagactctcctaacggcgtcgtttcacaagcgagattgttataaatatatttattcatggtgtaagtacgacatgtcgttttgaagacatttgggttatattatatgtaattgcaagggctcattcgtctctgtctctctcgtcctttctggtttggtttgttcgttcattcattgataattgttaaagaattctgaagaaattagtaagcaagaatggcttgcttacacgatcacagctgcgaagatcacgattgttcatctgattggtctctctacaagcacatcgatctctctaaggtaacctctaccttttacctattcttttcatttcatttcaaaatttacttcgaattgaacaaaccggttttcagtttatattataataattataatttaggtatctgctctgaacgaggctactccaggaagtgttaaatctgttttcaaaccttgggagcaccgattgagttcttcaggggtaagtaaattcaaatcaaatttaagctttcaatttgaactgaagtgaactacttaactgtattgttttaattcagttgaataccatattcctagcgtgttaccttaagttgcagaatctacaactttatgcttttatgtagtgtgtcattacatattgagtatctatctttttcttcagctttatgtagtccagttgttgttggaaggaacctttacttccacattattggtttttcaaaataagattacatactactctcaaacttctttattcttgaatgagttttgtaattgtagtatagtctaagagaatatgaatatttgttactgcatcaggaacacttggaaagcaatgagggtgaccctgagttactcgtgtttattccgtaagtcgctgctcagctcttgtctcttaattaggagcctatttttcacctctgcaactttcattctattctaacacacacccttaaactaaatcaaccatagaaagagagagtaaaatgcataaacatcaaaacatttaaacttttaatttgaatataagattaattgcatgtgacacactctaaatttaaaatcagttccttcctgcgtggcagattttaagtctcggaatttgtattttactccagtctcattgggtcttaggtcgtagtctttactagctcatttcagaaaataaccaatatatttagctttgcttttgagtagagattagttatcctttactgtgcctgataaagttttttccaggctttcttagttacctatcttttcctgccattttctcgtttattgataggtttacatcagatgtaaagatcaagagcatatctgttgttggtggtgctgatggaacaagtccttcaaagatgagagcgtaagttaaacctttgagctttcccatgccaataccatgacttacttatattgctcaagttttcatcatgtgaaagcaggattcttgctcgtgtggtcgtgtgagaggaacagaataacattgacactgctttttctataaaaaatgttgtcacccttcctattgttattatatctaaaactgagctcttacattgtgttatctaaaccaggttcctaaaccgagagggcattgatttttcggatgctcaaagtatgcaagctgttcaggtacttcttaaccttatataatgtgtgaattgattgaaaatgttcaacatttccacttatttagactatgtgctcgtgtttaaggaatgggaattggctgaaaattcacagggagtcttagagtaccaaacaaggtaactactaccttctcaagtgctacttaataaatatacattgagctttataatcactttcaattaaagcattgtaggaagctattcctttctcttaactgatacatgaataaatgtccttagtagtaccatcagtgttacaaggcactatatgatatagttggcatatgttgaatggtttgtattgcaattgaaaatatttgaacaagtaaatgtaattactcataagatatggtgttgggaacatatgattctatatagcaatgctcttagtagtatgttgttctacattcagaaatatagattatagatagatacatgctacatttgagtacttttggtattatgttttgtctcattctaatacacatttatccataataatgtttaggtattcaaaattccaaagtgtgggaaatatcacattacatttccctgagaatttcggtggggatgcctctcagattcactacattggcttcaaaggtgaagctactcaggtaaattcattttccaagagaactctattataacatttattggtgaatgaatgttaatacttatcaagttcatcattaactttgtgttttctgggtgatcagttgaagagggatgttgttgcaacgattgtgtatgaaattacaccaaatccttctgatcacaagtaagtattcttgattatcaaaatttgaat

SEQ ID NO: 15449 - DNA, 3039 bp, Cannabis sativa
  modified_base (66)..(66): a, c, t, g, unknown or other
ttgtttattctaatggggtgaacatctatttatacaaatataagagtgagatattaagaaactaanaaaaagggaaactaagaaaaagaagaatgttcgttacaattcatggtaagggaacttttatattttatatgatatattagtaattaattgtattataatgtatccacatgtaaattttactaaatattattattattattattattattgtttttgaaaaaccacaacccattttatttaccaaaaggatattatccgaaatatttcttttaagttataaaaaaaaaaaaaaatcctcaaacaatacttcgtacgactcatgccctctgctttccccaaatcaacactcttgcaacaaatcgctcttccctctgcgttcaccaaatcgatgtcctccgcctgagccaagacttcgcaccagataaccggtccaccactcctgctctctgctttgccaacccttcgaagaaccgccgctggtggacgactgcgattgaggtcaagtcaagtttcagtcttcttcgtgtggctgatgtcgatgaatgactcagaacaacatcggtacatttcccaccatctcatacttcttttcttctttaattctgctcatctttgcattaatagaaatattcagatctggttttttgtttaaatattaattctaatgacatgttattttattggataattaattttgggagttgttggaattcattgtagtatgtgtgaattttgatattaaaaataagattttcttactgaaatttaagattttcttacaatatcaatgtgaaggtgtacaaaagttacggtaagttgctgtgaaggctttggagaatatgttgggtttgtgtattggtaattttattttttgaaagaatgtgtattaattattactcagagacaaaagggtgcaatgaatctgagaatcatgaagggtttagcagctgcctagcttcttctccttaattaatgatcaagatttgaggttttcttatattataaacaaagaagaaaaaaagaaaagaagagatagatttgcaattgtaataaggaatataaaattactatagtagtgatagtaggttatatttgtaatcattgtataacttttgattacatacaacaatatgtaaatatgtttcccagttttgtgtattaaagtatagttctatgtattcagcaaaaaaaaaaaaaatagatatagttctatggagaaaaatatatttacaaaatggagacatagatttcactaaaaatgcttgttggtgtttgagaggctcgcctacagctacatgtatggtagcatttgtaagtaatgttttccattgaagggtcttgatccaatctttggacttgctctgtggccaaacatcctaaattactagatgacaaagagtagtttcatgcctaaatgttttggtacttgtccggtataacccccttctatgttccatgtggatataaactaggccatcataagtagaaaatattgagaattttttttttggttgggggtgggcgatttcagacttttcttctctggtatatttgatctgtggactgcagtagtgctaattttttaagtgattaaatttatttacaagtgctaattttgggtattttgtcactctgattttataggagcaccagagaaagcacaccatctaatttgataagggagtcggacatcttaagaaatctgggttcaaccatgaggtggccaagttctattgcaactaacaaaagggtgagaaatgaaatacgaaggaatatcccaacagcgcaggagatcgaagagttctttgctttcgccgagcagcagcaacagagaatctttattgagaagtatactatcttatctcactccattattttgagtgtgaattttgatacatgttttgactgctagtggtgcacaatttgggaccacagcacacaaatgcaaataactgatgaaccttttatttttttaggtacgattttgacattaccaatgaatcgccactcccgtaaggtacgaatgggtgcaagtcgttccttagatgaggaacattgaattggaagttgaacttgagactgcaagttctgagtctataattagtgctaagagaagttggattacaatcaataacattgtgaacttgactgaaccttttggtatttgctcaagtacaaaattaggtttgctgaagtagcctctgcaatatcacaatattatgttagaatatgtacaccttgttttggtatgcgaatcttgtatgagcgaataactaatagttgtatttaccgaagaagaatatgtggtgtgaatttatgagttagatctaatggtcattataaacgatgttgcttaggatagaagaagacaggtcaactaagccagatttacttctgacaaacgctcactttgccacattatgagttgcaaacttacaagttctcaaaacaaaagaaaaattacaactaatcaaaaggttagagagtattttacaatgatgcgcatagttatcaataccctaagtagagcaagctccctttagcgtcttgataactgtttttgaaatgctctctaatagtcgtttccaaagctaatagacatgttacatcttctccaatgaggggattagagaaattgagcatgtttgacgccacccacaaaattgtcccaaagtgatcttgagctagggccccacatacattgaatcttcaccaattttaatatcatagttgactttgatctaatcttccggtggtggagaccaactaggggacacaagatcctttgtcgatgcatacaaacaaaattcatagtctccgtaccaagtagaaatagaatcaatataatgtgtaatgttacacagagaattattgtgtaccttgtcattatgagttcgccagatcgtatcaaccacaattgaggcgtaaaggaataatctctcaacatctactcctttagacttcagatttcacataaaattgacccagtcccgaactcgacctcctgactcttgaacagggataattcccacg

SEQ ID NO: 15450 - DNA, 5295 bp, Cannabis sativa
aaaacaaggccaaacaagtcaaattgtttttaaaaacaattttctgtttttaaaaataaaaaacagttttttagttatgatgccaaacatgcactaagaatctgaaaactagtcctactcacccgagttctttatttgcgttcgtccaaaataacacaatgggtaaataagtaaaaaacaatggcaatctcagcaattaacgacctttttgaacgagtactctgtgaccaattaagaatgatgtaaacacctttagtttcttttttttttcaactatgtttggtgttttccgtacaacacatttattaacattaaaataaaaaacttatgattgtgataattaaaattcctgtcgaatgtaacacatctattcagccccaaaaaaattaattgtgcaccacaatacatctccttttatcaattaattatttgtgcctactattttattaaaaccaagtattcataccctttagccttaccaaccgttgtttgagtatgaacttgataaagcaataaaacatatgttccataatgaagcgctttccaataattagaaatttcaatactaatgacaaatgaaatcgaaactttgtcctggtttaacaaaacatccaattctgagcaggacctaaactaaaaaaaagaacaaacataatattgttccactgcattactttccataattctcttcaaaattcgaagctacaaataatttccttcaatacttaccccacatttgtagctctccatttggcattacgtctactgatcagattaaacctgaaaaattttcgagggaaatttaagtaaccatgtaagagaaaaccattcctgatcaaaacccaccactacaatccctgaaccaaattcgaaccacctctaattatttcaaatgacaagtttataaatttcccctaataataataacttttggcatctccattcccccacaccatccttataactaccatgaacttggtcgagtaggatatgccattgtattgggacaaaatgagtgatatgtacagcaccatttgacttaattttacctggagagcaaggcaacttacctaaagttattccacgataccaaatcaaaatcgagtgtatgttttctcataatcttctcgtctctggtgttggaactcaccgaaatttccatgagcccttgaagggtagttttctgtttggtttgggtatctgttcattggctccaccggtacattgttcccaacatagcgagaatttgcattagaaccatcgtagttggaaaatcccccctgctgtttgtaaccagaataacctgaaggagagacttgctggcgtgattgcggttgttgctgttgttgtcgtgattgtgggtgttgttgttgtcgtgattgcggtggttgttgttgttgttgtcgtgattgtggttgctgtggttgttgttgttgttgttgttgtccccgcctctgtgcatcaagttgaagaaaatcctcccactgctttgcatgaattctcctcaaattacccagcttcttcatgtagttttctctcatctccgtaatagccttatatcataccgaagagccatagtcagatataattaatacagaacacagaagggtgtttcatatcacatgtttcctaaaactcacaccggtaaaataagcttaatgatagacttgagtacaatattaaatagcctgaatgctagttagaaatagaatcaaattaataaaccttcaaaaaaaattcaagatgtccagaaacaaaagtctacaatttttttggacatgtatctttccctaaactaagaaagccacaagttcccacaagaaatacagtttagtcacaagacaagcggtaatcagaaaagattttaaaataatgtgtgccacacaagcacgtgagagagatgaacgatttaatgacaaacactaagacaatttaaatttcacacattatatatccaagcctaaaggacaagtaaataataagactgaagttcatatcataataatgaaaaagaacttcagaagttgaatttttttagttcattatgtctggctacaccacaagttagctcatacctcgcgatgcttcttattttcgtcatcttcttccttgtctcgaatcttcacaagttccattgcctcctttttaaactccatctctaactcctctaatgtagggaaagctgggtgatcatactgaggaccagattgcatgtcaggtccttttctctcagaatgccatccatcagttctataagcacccatagtttgattacggccatcgtatgaaccatatgtgttgttgctcatgtaaggggattgtctaggagattttgaatggcttgaacggcccctagctccatcattaccataagcttcacgaaatgaagagtatgtttagcacttgattcaagatgctaactcagtttgtagcttaattcaacatactattttattcatagtgaaaccatccgatgcaaaaagtcgagaaatgctttcagtaattttcggagacaatccattcaattcaaacccactcacgaaagttacttcagaactgtacacataaagcttgaacataagaacttacctcttgctgcaaacaaacaataagcaagggcagcaacacgtttatgcactcaagaaggagaaaaatacacatatgaacacagaaaaatctgcaggaacctagtaagctatgagcatggaattaccagctttctatgcacgccgaaaacatatcctatcctgtccctaccttgtggagaattccttgggtacttctgcagattatcacgtatgtggtcttccagaagtttctcttgcctgtgaaacctctgttgaaactgaggcgcacttcgagtaacagagtgggatctttgagagtcagaccgctgtaaccgtgaccccacaggacttcgatcaggtgacctcgatctcgagacctgagaactagatgaagctctgcggtctccctcctctatcactttgcgcacagcatccacacctttcgctaagattaatctatccttgccactaacaataataaacttttcatccatcttaattttgcagccaatatccctttctattttgtttatcaccttctcactgaaaagtgccttgacatgtttttctcttgcaggtaccctttcaaagaaatcttgagacttccgatttgctccgagcgtagaaggacacccctttaaatgtatagcaataaaacaaaagcaatattaattatcttttaatatcagcatattatgttgagtatgtatgaaaaatatgagaacaacatttaatgatgttatcacttcccaatcaaaatataaaatgcaagttcatgtataatcttatgaaaaatgcaattcatacaatttaaaacttactaacaaatcaaacagataagataacatacaactacgtgaataaattagcaattagttttgagtgaatccaacatattgtaataccagccaggtatgaaatcattcagcagttacctgagtaaagtgaccagattctccacaaattttacagatcatttcttcttccttccttttcttccaattcctctcggtagctttagactttgcttcccaaaccttagcttctcggctagtaaaatcagttggaacagcattggggtcacgagcttcctcttcctcatcagaacctgcatgagaccttttgtttgtctttgccctttcttgtgaattggtgacatttgatcctaaaggtcccgtgtactccttgtaaatgtcactaaaatcatcatcaatatcttggtcggatcttgttgccatctagcataaactcaaatccttcacaaacaaatacatacatgaactataaactgtgcttacttggtcaaaatttcaaatctagatacaattcttttgaacaaagttccaacaaatcatcttactgtttccataccctccctttatacttttaagctatatgcaaaaaagtacaacaaagtttgcaagaacaatactaccaaccagctttttagaaccttctacagttctacttacaccccaattttcaacgagtaaggtttactttacaagttagattaacacctctggagggaccgaccattgatcatatttctttgggtcggtacagcttggtagtaatgtaatagtttcattatcaaaaatgaagagcatttcccaccaaaatatcaatccattagcgcgactctagctagagagattgtaaatcccatgtgaatgtattactttatcatcatcgtaaattagtatttgattataaattcaatgaccaatagaattcaacagactaagcaatcaaaacaaaatgaaattatggaagttaactaatagtctaatactatgacaaaatggaatcattttagcgtacgagtttgaaagaaacagaagatattgcaggtgcacagctctcgcactaggagactagcaaagaactggttaccttcgtcggcaatcgcagctgggatgggcgaacgaacaagatttcgcggagagcagaactttgtcgacagtcgcggctgagtagggctatgctgggcggacgagacctcgcagattgcggaaactcgtcggcaaaagggagtggttcagcggcggacggtagaacttggtcgggcacccgctgaggtttgtttgtaagagcgaatgggattattggtagccctagcttttaatggatgaacacgcaatgcatgtatagcctctattattattattattaatgacaaataattatatcaaatttttttatcaattaatattgaataatatccaaattttatttgcaagttaactgctaattacttaattattaaccgtattttttagtatcaaatttagttttaatagatcaataaaaagtaatttgcggcaaaattacttaaatttaattctcagttgtaaataaatacttaaatgtaatttttgatgctggaacttttataggcagggacggacccattaagattgattatagccccactaacaaaaatattgaattttaaaaatttaaatgtaaattttataattttataattataggtcaaaatagtagaaaagccctcacaaaattagataaatttggtaagagttattataatgtagctataaatatttttttatgataaataagcctccacaaagtaaaaatcctgtgtccgtcaatgtttataggtactaacggttaagtattaagtaagttgtcatgtggcaattcttgattagtccaagtcattaaattttttatttttttaaaaaaaaaataatttaaatat

SEQ ID NO: 15451 - DNA, 2883 bp, Cannabis sativa
ctgctgctacatcctcggctgataatccggtgcagccgggtgcatcgacgggtcagcaacaccggcggttgtgggtgaaagacaggtcgaaggattggtgggaccagcacaatcaccctgattttcccgatgaggagtttcggcgggattttcggatgagtaaagccaccttcgaaatgatttgcgaagagctcgattcttcagtgatgaagaagaacacgatgcttcgtgacgcgattcctgttcgccagagggtggcggtttgcatatggagattagccactggtgagccacttcggctcgtatcgaagcggtttggattggggatttctacttgccataagcttgttcttgaggtttgctcggcaattaagacggttctaatgcccaagttccttcaatggccaggtgacgagaagttgaggatgataaaggacgagtttgaatccatgtctggtattcaaaacgtttctggatcaatgtacactacccatgttccaatcatagctcctaagatcagtgtagctgcttacttcaacaaaagacacactgaaaggaatcagaagacttcatactccattacagtacaaggtgttgttgatcccaaaggggttttcacagacgtgtgcattggttggcctggttcaatgcctgacgatcaaatattggaaaaatctgctctttaccaaagggccaatcgtggtcttttgaaagatgtttggatagtgggaaactcaggtcaccctcttatggattggcttttggtaccttacacacgccagaacctgacttggactcaacatgctttcaatgaaaaagtgggagaggttcaaaacgtggctaaagaggcctttgctaggcttaaaggaagatggtcttgtttgcagaagagaacagaggttaaactccaggacttgcctgtggttcttggggcttgctgtgttttacataacatatgtgagatgagaaatgaagtgattgatacacctaccaagtttgagatttttgatgatgaaatgatagctgagaatagtataagatcagctaacgcagctcagaacagagataagattgctcataacttgttacaccatagccttgctggcactggctctttgtagtagtgatttattttagttcagattttctttgttgtaaaattagcttctccttaaattcttttttttggctatgatttcattagtcatcttcatagaataaccgagtttgtatacgtttttatttatttatttatttttcttacaggattgtattaaatagttgaaatataatctaattattttttgacaaatttccgagttataagattttgctacaattatccactcgagggtgttaagtgaagtacaatggccccccccaaagtacaagattttgacaaaagagctagagaatttcaacgaccccaattttcaacgtcagatgctcttttgaggcagccattttttttcttcaaaaaaacaaaataaactgtgatggcaacgcgtttggtgcttgacaacattgttgtcgttatgttctgtttctcaatgtttcgggctcttaaacatgtcgctcgtggtaaaactgtcatattgactttttgaagctaaaacaatacaacaacccctttctcggctttgatggaggaaaggagaggagactgattaatattcttttatatttgttgctttgtatcaagtgtcttgtgtgtgtgatccttgttgagtgttcatagccgcgaattgacgagttcagaccccacatgtttagtttagatatatgtcatcaaacatcacaagaaggattctttaacaaacctacaattttatactattggagaattatttggttttttcaccacattcttatttatttcagcattttgaagagtttatttagggccgtttgtaagtttgaaaataaaattctaatagatttgtttactgtgcataagaaaaataagtcatttgcaacaaaatttttaatatttatttatgatactataaactatttgaaattttttaaaatttacaaatgattttagataacgtcaacgaacatgttcattaaaaataattaaactaaaaaaaattcaaaaactaaaataaataagaatctatcgaaacacttatttaaatgagtgtactatagacttactttaacctaaaaatgaataacattgattttcattttgggtaagtctacattatacgcttatttatagttatttttttattattattattatggaattgattatgagctaaactctctatttaagaatttgatggatattaactgagattattctatggattaatgttatttgattgttctttctttctctattattgcgatttattcatatttgtacttattacatgtgtttgattggccaccttatgcatgatctatgatctcagtacaaaatttaaaaagtgagtattgagaatactctaaatgaatagacatagattttgatgtgaaacgagagtatacacatagcttatgtgacttttagattattgcttaatgcgaattgtatgttgttctatctcaaagacgcagtagttggcatgcaatttaggacctttatgatttgaaaagagtttgggttaatttaaaatttgtcatcacataggagaggaagaagaatggttaattagtgttatcaattgggtaatcaaagcaattaaaatcatatcctttaatttcacatccattgttaaatcttttatttattggttttatttaattttgcttagtttatttacttcaaaatttatttattcgattggcaaatagaaacaggattttaattgattggtacttaactacagtcctcatgggaacgatctcacttacctgagtattacttgt

SEQ ID NO: 15452 - DNA, 3374 bp, Cannabis sativa
atacatttaatttattttcttatatatatgtataatgaattgttaaaaggtggtcattatcgttattagtgtaattaaataacatgtttaatataattttaaaaaaataacttttaataaatattactaaccaatcataaaatgtcacttataaaagtactgaacatactgtgttcaactacggtgctctgtatataatgtaactccaattaagcccccacaccatctaggacgcatgcgcatgcttacctggctctagtggccacaactggctggccatggcactgtctatgtgccactatggtccttttagtacaatattccaaatcatcaaaagctgcaaaagaggtaaattttttttttttaaaaaaaacgaaaagaatccttatatttgatgaaaaattggaaacttgagaaaagtgagaaagtacccattattagggccccccttatttcgataagtatttgccaaattctgtgttgggtaatatttaggatcaaagcagttgatgtgtatttatggcacacaacgacttgttttaagacaatctaccttgagttttcaattagggataatttggtttcgaattaggctaacagtctgttaattatgcaataataacacgtgttatttggctaatcatgagaattaatgttagagattaataagcaaccgaagaataagataagagcaatgatagagatatttatgacaccaacaaatttgggacccaaatccttcgttttagagttatctgtctattttccagtccaacaactaaaatttaatcacatcattacaaaaaaaatatatttttttttcaaaaaagaaaacccaaataatgtttatgaaaagtgacacgaggtttggaatagtcacttaaatttactgtttgttttatggattcttaaatatattaagtgttgtgagttgtgaggtaagaaaaaacagtgacagaaaacttaaaatcaaagatctttgctttacgttatgcataatcgaaaggaaaattacagtgacgagagctatattgctttcagttaaagaaaaaaagaaacacaagaatattgcattaatagtcattttagttacatctatatcttagaatacggtaattataaatattacaacattagtggttcagtctcttccccaaagttggatgaaaaactgcttaaaatagtgtccagtaattatttcccgacactttttccagtactctgaagcttgttcatgtgtttgaattggttattagaaaatggcataatgtaataactaaccagaatttttgtccccaccaaaaccagattcaagaaaacctgtttgatcaagatgagagacatcaccccggacctgtaaggtccatttgtccccatcagacaagtgaaacacattgacagaagtgttgagtaccttcggtccagtcttctcgtttgggcaagcccttttgtacagcgatctgattacgcctccatgagtaaccacaactactcgctctcctgaaatagatacaaaactttacttatttgctacctgtaattctctacccaaaagtattagacttaatttcttttagggagattgaagggaatatgtacaaacgtaggagttcagctccaaggaacatgatgctatggattaccacttatgaatcatttttaaatcagttgcaaattcacttaactctgaaatccatatatggagaattggatagttatacatgataattcctagctagttaaaaaacagtagaaataattaccactagtcatgcttagtattgttcttaggattatgagtatatattgaccaaaataaagagctgtgtgtactgtagtgtagctgagtaattataggaatcaataaatgaaagagtataggctcctttccactttataatcatttagaacaaggttgaacctaagttacaatgcacaacggtaaagtcgcaaaaaggaaaaaaatggaggacataacacacctttatgcttattaccgattctctgtaacgcagaagtacagcgtacaaagagttgatctcgactttcacccccacccttcatgtatgtacaaaaaaagacatttcaaaacaccaattaattccagtgggttttataagcttatattggaattgaaatcaagaatagttattctgtgctaaactcacaccatatgtcatgcaaagtcagtaactcttaaattctatgtcccccatagtaagctggaaggggacggtatctcattaagacttgggtcacaaatgtaaacactgatagacaagtcatgtgggccacgaattccatctttgttttctatggagttagtggcaggtaggtaggcagttacaaaatcttaagtaatgacagacatgcccttattagagagttagtagcaggtaggtagacagttacaaaatcttaagtattgacagacatgcccttattagactcattgtattagattgcttgtcatggctttaaaaatgatatggcgtaaatacttggtttcaccactcaaaacaaagcttttgaggagcagagcactaggtgaagcaggtggattttgtagtaatgccataattttcggttaggattactgttgtacctcagatgaagtaacactcactttaactatagttcggtaaacagaacaagcactggagttcatcctcaggcaggcctgaggtaatactcgaacaagctggacctgctgcttctatagcctcagagaaagaaaccttataggggactacagttgaactgagtttactttccccatattcgagcattagaatgagatcaattactgatttattaatgattcttatgataccaataaagtgccattcaaccatctagacatatcataagtctacagattatcttcaacatggtaattgataagacctaacgtaggtccatgtagcatgcttattggataagattgatacaccctgcctggatgagattttacgattgtcccccaacgttctccagtactgccctttatcactcaaaaaaacttaaatgctctacaaattcatatcaacttcactctgtatcaaatgaattccagttatggatggagtacttacaggaatttcttgatctttacttggagatgtaaaggctttgtacgcctcaggacaggctttgacagcatcactatatactttaccttgaagatcccctaaatgcctttctcgtaaatcagtatctttaataacctaaattcatgtccagcaaaataagtcataaaaaaaagcaaagaaatattttaatacatacataatctggctaatcatcctaagcatagatgagcgttagctttgaatgattttcaaccaattccagattattggttaaatatattt

SEQ ID NO: 15453 - DNA, 6772 bp, Cannabis sativa
  modified_base (27)..(47): a, c, t, g, unknown or other
gcacttagtgcggattggatgttgttnnnnnnnnnnnnnnnnnnnnngatcggatgaacacccctaatgggtaattcgtgcgtgttgtgttgtgttggcgcagtttgtatttatttatgttttttaaaaaatggattgtctcatatcataccattgaaaaatataagtcgtgtgtgtcgtgcttatattcttaaatagtaggcccagcaaagtccggcccgatattttcgtgtggtactcgcattcttgtcgtactttgcttgtgctaacctgtatttttttaataggccagcctattttcatattcgggcttaaattcacgttttactttttcatatttttttaaataattactgaataatatgtatgtgtcaaagctttagttacatttaaataacttttgaacaatattttacagataatcatgtaaaaaatttattagaatttgaattcgaatatttacttataaatactcaatatgattataattttttttttataatcatataaaaaaattattaacatatttaaatatttactaataaatactcaaattcttatatcacactctataaataaattaatatataatcttagtttttcatattttcataattttaattatagaattataatattcagtattatatttaaattttagtactattttaacttatttataattgataaattcatatcttattattaatattaattaattaaaagatttttttaatatgtcatgtcgtgctttttgggtttgtcgtgtgtcgtgcttttcgggctaatctatttgtgcttacgtgtcgtgcctttcgtgcttctcgtgcttaaggacatatttttcgtgtcgtgtcgtacccaagcctgtatttttttcgtgtctaatcatactcgtgccaatttcatattgtgtcaaaaagtcgagtccatatttacagcactatccctatctatccaagccaaaacttgtaataaaatatttattcacttcaaacattgtaattatgcaacaatggtactgagtacaaccacgaggtagcatcttgcatataattaataatatttataatggatattaaactaaaaaacgtttataatggatattaaactaaaaaacgtggaattcaattcttaattttatattaatagagatatgatattttgtggtagtgttagataccgatgtctgcccttttaacattttttcactaagtaataatagacttttacttgtttaaatcatgctctagggaaatagattcttcaattttttataggtaaatagtgtgtaagtatctaaagtttaaattttgtaaacaacctacactcaatgattttttttagcggtagaacgatcatccttctttttctctcggctatggggtcgcaccgctagtctcgggtgtgtgtttcggctcatgaccgaggggaggcctttgttaaggtctcggcttcacaacggcaagaggcttctctagtggtggtttgtaataatcttgaactagtgctcatctttagttcatcaattagatgaattttacttctagtggctggttctttgcattgggtcatgtgagtgtttcgaacactcctaccctttctttaaaagaatattttgtgtcattttagcttgttataaaatcgtccaagttcatgctcagagaaatttgctaaaagcaagttttcaatccataccttagtagaaatcccagttgaatttcttaaatgagctttcgaatttctaacaacttagttctatcctttgaagattagtagctaaaatctagtataatgtaggttgtcatcaccatactccaatctatgatttcaagtaatatcttggtaaatattattgcagcatagacattagacagattattaagaatggaattttgaacataaagaagacaatctcaagtaatagaattatgaattcagacattaactaatataatcaaaaacatcccaaaaatttcataattaaaactccaaactgtctgtcaatggcatttcaccaccactctaatagaacttaacctgcagttaataaaatttttaatccaaaaataaaattattgaatttgatgggggagagttgtaaaccttccctccaagtaattattgactgaaaatttcgccgaaacaagtttatcagaactcgaaaaagatttcatcaccatctacccttcacctcctcaaaccgaatgggagtgtaactaaaattagccgccgccagatccgtacttctttccgaacacaaccagctgcaatttgtcgtaaccagagagcacaccagcaccagcgatagcacgaaggatgttagcaccagcacccttgaacagagacttggcaccctcgtttttcaagatttgggtgaatgcatcgaacgagctcttgtacttgacagcttcaccagatgtcatcatcattcttctacggacagtgtcaattgggtatgaagcaagaccggcaccgttggtgatgagccaaccaagggcaaagctagcaaagaaactatcctgtaaaacatcaaaagcacaaaacatcatgtcaattgttatgaaactcaaagctcaatcaaatgaaaacactatcaaacataaatattatctgaaactttattcaaacatacctgcatgtctccggtaaggaggactggcttcagagagtcgtacaatccaaagtaaagaccacggtacacaatgataccgacacaagaaatgttgaatccacggtagagaccagcaagaccatcagtcttcaaagtcttcttgtagacatcaactagaccattgaattgtctttcgcctcccttcttggcagccttggcatcattagcaagacgagtacgagcatagtccagggagtagacgaaaagaagggaagaagcaccagcggctcctccagatcccaagtttccagcaaaccacttccaataaccatccctgtctttcttgaaattgaaaagcctcttgaagtaatccttaaaggcaaagttcagggcctggtaaaagataagagcataatgtttagcatgaatttatgaatatatacacatttagataggaaaaggaaattagtagaaacacaaacctgagtagggaagtaacgaataacgttagctgtgttccctctccacaatgaaccaaatccctcttccttgatggttcggctaaagcactcaccaatacccttgtagggttgcgagagacggccagatttaatcatctcgtcctggttctgaatcagaagtttaacacgctcaattggggcagcagctgtcttggacacagcagcagaaactccacccataagaaaatcaatcataaaatgtcccttctctgccggggcttgaacaaagataggggaagcagctgatggaaccatggacagatcagtagtagctttgcactggtactgcaatgcagcattacgataatttccatatgcagccggcctttgatacacggcagggcgttggaaaccaacatcatagctcttagcatcccgcgaaatgctagaattgctaaggaattggccagctaccttttgcatgactgtaggatgttgatgcctattatccatggtgtttttccctaaaacaatatccaaacaaacaacggcattgatgagattcataacaaagaccgaaaacatccagatactggttacaactttaaactacatctatcaaatgaagtaacacatacaagattacatctaaaaccaagcataaggatcaaattataaacaaataacaggcacagctttagaaaatcatactaaatccatctgagtacatactctaactcagaacaaccaatatacaagattatatatcagtatatagtgacacaaaaattagggagttcttcttcctatatcaataggagagatctatcctagattacaattacaaaaagtttgcccagaaaagtgcacatcacacccacacacacatgaaaataacaacagtttataaactaaacctaatccaaacataatagttaacacattcacacagcagatctgacaaaactgaatttactaaacaaatttcgcaaccgatctaccaagtcaaatctcaacacatcgaagccatcacaacccgtaaaactaaaagaaaagcaaaacccaaatccagatctcgaataaaataactaaaaatccaacctttaaaagtaaaacacaaaaattgacagaaaaatcatataaactcggacaataaaaacagatccaaagtgagaattctcaacgattgtgacagaaatagtccagattaaacataaagattagagatttatgatgattacctcagattctccgagggttttggggtctccaacggagaagagaagaaggttagagagagagaatttgggatattttgagaggcggaggcgagcttcgaaagaagcaaaactcgctttttatttgctgactttgctgacactattagggtctgacgtggcactttttcattttattttattttattttattttttgtagagatttgtagcgtttttttttttttagggggcttttttattggttgctagtaaaataatgagcattcttatttgtagggattttgtttttgttatgttgttatttgtttgagtttttatagaatacctaaaaatatataaaaaaataaaaattgaacataaaaatataaaaaatttacaaaaattagtatttatgtaattatcctattttttttgttactagccacccttatgtttagcatcacctagaggtggatcgtggattcgatattttattgtaccaataataatatgacattaaggagtacagctataaatatgtatgtagtgttagtccaacctatatttttttgtgctttttaaaatacaagtcatgtcgtgctgggccaaaaaaaataagagtagtgtcgtgccgtgccaaaaaaatataagtcgtgtcgtgtcgtgctattgaaaaataggaatattgacggtgaaaccacctgaactttacatgttttaacacttaaccacaaaactgaaattttaacgataaaacctactgaactcacattccgttttgctcttcagtattccatccaaaaatctcctagacagccacgtggacacaaatgtacacgtgacaaatttttagtattccacataatattaattattaaaatattgtaagaaataatttaaaattataaaaataaataaattataaataaatattttattttctttttttttttctctttttctcactcaaacactttcatcttccacataccacacctaccaaaatcctagcttaaaacaaccccatacggaaacggcaactgtccttgcttagtcgtgactcgaggtagtctgtgatgctaaaattgagccttcatcgagaccttggaccttcatcgacgggcaaaggagaccaccagacagcatgggttgtgtatctcaaaattatcacggtgttattgtagtagcattcaagaaggggaaaattggatgtgttcaacccgaaattgctgagataataggcattaaagaagcattgagttggattgcaactcatttgtgggatagagtcatgttggaaacagatagcttggtgtgtgtccaagcgattcagaacggtattttatgccttcacaatttgtgttttgtaaaacggtatgcaaatatgttggcttattgcttgacaagagactcttatttctctacaggtcgtgtgcttcagttggagtctgttactctgaaatgtgttctattgttttgaacgaatttgttaattaatgtattttatgattttattaaaaaaaaaaaaaaaaaaatctaaacgaggtgtacctaaacacatattttaaaagatgtaacttaccctataacctaatcattaacacgtgattttaaaaataactaatcaaaactaataacaaaaaaagtatataaaatcattttatgttaaagtgaatatttttaagaataagtaggcaattagtacattgtatttgtcgccactataaacaactaaaagtttttcttacctagaaaatgaaaaaaataaattgtgaagctattatttacactatatgttgaaatttttaatttttttttcgatattattgtaaataagttggttgaaggtacatttataattagtttagatttgtagtatatcattattgggcctaaggagtattaagtatgggcccaatttattaataggtatctaagagccatttggaattatgcatgataatttaaatagcccacggactccaaaataaccaccatcaaacttcaaattgttgggctatttaaattacaaattaattacgggggttttacaccaaactttccaacttttttgctatgggatggaatttttttttcaaaaatattgtgtatttttcaaaaatactatattaagttttatattgtatactgtattaaattttcactgttgttctagggttgttcttaagttgtttcactgttgttttagttttctgtattgttgttttgcggttgttttataaaaagacagtacttttgtaaaaaatctcacgtgacagtaaaattgtaaatttttgtccaaaatctaatatttttgttggttgtaatctaggcctggcccatcaatgaatttagaaatttgggctcatttcagtattagcccatacttttaagcagtaagttgaaaaataccacttttattaatcaattaattaaatttacctctaattttatatttaattgaaacatacctctttt

SEQ ID NO: 15454 - DNA, 10152 bp, Cannabis sativa
tgttagttagggtgttacaatgccataacatttttaaagaatcaaaatctgcaggtctatccgacaataacttgcccactaagcaccatcttccatcgaaatcatcaaccaagacctcctcttgatcaaacagtaagccccctccttcttcgtcttcaacttgtaggtcggcccactgcactcccaactcattgacagcatgactactagacgccattgcaccagaaacaaggatcttatcaaccagacaaaacgataacacacaaacgcagactcacaaactcactaacatgtcatacgacaaaactccattagtgttttcttattacattttagttactcaattatgataaaaaaaaaacatatattttctccttgactcattagtaattaactcaaaatgattgagacatgaggtgattgacataatagttttcttctatagtagttaattcattgtttgatttattttatgtggagagcaaacttaattacaatgatagtgacaactatgagtgagatatgatgatgacattaattttgaatgtagtggtgagaacaacgatttttaaatcatatgatgagttatatataaatttatcaattatactttagatctctattttatacaaggattcttcaattatatataaattgtataatgaatttttctacaatattaatgtatttttcaaagtaaaaaaagtttttcttattattaaaagaaattatatcaaaaatattaaaatttgaaatttgatatactgttaagacttaatgattactaaacaaaatacaaccgcacgcgaagcgcaatttgtttcctaattaataataaaacaaataatttaaaaataaatattagaatttgtataatgtgggagtctctctcaacattaggaataatagaaaattaataaataatttttattgataagaaaattatataaaacatgcgacaaaaaagaaaactttagtttataagtttagagcctactgattaagagttcttttcacaatttgtaaaattttgaagaatgttgcagccacaagttagtataaacaatttaaaaatgactataaaattttatttttggctacaacttagtgaaaaaactagaagaataaatagtgaacatttcaatgaatgaatttacatatattggtgactacaagtgaatatggtgataataacgatttttaatgtaatggcaactgcagtaaaatacggtgacgacattgactttaaatgtattcacgactacacaacggtgatgacaaacgactttgaatatagtcatgattaaaagtgagatacgatgatcttaatttaggtattttaaaatttatgttttcattttattattttaaatttctacaataagtaattaattaataataaatcaacaaatataaaataaaattaaggctaattagaatttttgctcgctgaactttgatatgtaccaaatcatgccccttgaacttttctagcaattaaaaattctccctgagctattgagattgttggatttaaggacttttgtccaatttcattcaatttaactaattcgatgattgtccatgaactaaatcatgctcctcggactttgatatttacaaaattatgccattcgaactttgacatgtgccaaatcatagccctaaactttcatccatgttagacttttcttactaaaattagaccaaagtctttaaattcaacaaatttttaacggtctttaaagttcaagagacatgatttggtacatgtcaaagttcggagacaaaaatcttaattaatctaaaattaataaataattaaaataaattaaaatgtaacaccgaaaaacaaatgttacctagtttgtcaagaaaaaagaaaaaaaaaaacatgaggaaagtaaatgaacaaaacccagggctgaaaaccttaaaccctaaaagcaccaatgaagcggtctctgctcagaaatgtctctcacttggccggaaatcattttctttcgtcttccactcccattccaggacccaacccttcactcctcctactccccgcttcgactcgctccagactccgcttcaggctcttttcttctgagattaactcctccaatgaaacccctaatgccgaatatacgaccgaggtctcccaatccgtgaacaaagatatctctattaatgtccaggatgttggtaacaaaggtaaaccatttctttttttttttttttttttttcagttagtgtcaagcgaaacaattgtttggttactgaaaaagtaagatgaaaatttatgtttttagttagtgggtcttttggcctgaaaaatttgattgtttattaggggtaagtatgaacgttttcaatgttaattatgtttgtggcatttgcctgaaattgattcgttgtttgtaattgtacagattcaatattgtaattttatacatattatgttaaggcggttaaaaatttgcgtcctgaggtgtaaatggatgatgttaagggtacttatccctttttggatgggtacagttcaattatttgtaatatgatttgtcaattttattttgtgctgtagaactgaaaaccaggatagagaaatacttcaagggtgacaatgaagctctgccagagattcttgaagcaattctgcagaggaagttagcaggaaagcatgaggagacagatgacgagttgatggaagagctccagttgcaacccttgaatgatgttaatgacaaggaatttgaatcagattttgaagaaatatatgtgactgatgaagagattgataacctgtatgatgcaagaagtattgtaacaaagaaactgatgaaggatgagtatttcaatatggatgaaaagaagtgggatgatattgtagaggatgctgttaagcatgggtttgtcaaggacaccagagaatgtgaggagattctcgaggacatgcttagctgggataaacttcttccaggtattaccctgttttcttgactttgattcacatgaattaatgtggatgatttgatgctacattatatttattgcttagtaaactacttgttgtggtcgtatttctgaaatttacagcataatatatatgtgtattatcttctttatgcttttcttttcttcagctcacaaagtcaatcaattgaaacaatacagacttgttattttttagtttcttgtatatgtagtacgttctgctatggaccagtgtgccagtattagcaatatgtactgattgaacacacaaacatagacaagtagtagtataatatagtatgtactaaacactttgaacttagagacagttttttgtaaattataattgctactaggagtaggaggtatacatttgtgaattttagtttctactgtttatgcttgaagtgatggatctaagataataagctatagctgcatctggagcattatgatggatgtgaatccatgtgtagtgacttgcattctgtctgatcttattgaacccttctttttcaatatcaccatcccgtgataagatgcgagactatgcgtgtttgatattaattagaatcgcagaccttgtagaaaggctgactatcatggctctatattgaacactattgatcttgaaaaaagatgtatgatacaaactattctaggaatctgtgaaacttttgttgcttgtcttactttcttttatttgattacagaggatgttaaaaaaaatgttgaagcaaagttcaatgaacttggggatatgtgtgaaagaggggagcttgaaccggaagatgcctacaaactgttcaaggagttcgaggataagattgtggcagaatctatggaaaagatggatgcagaggaatccccaaagtttgatgaaactgatttggtggacaacaagaaagatttagatgatccaccaggtgagggaccgattcttaggtggcaaacacgagctgtgtttgctcctggtggtgatgcttggcatccaaagaatagaaaggtgaagttatctgttacagtgaaagaacttgggctttcaaagtaccaattccgtcgactcaaagagctggttggaaagcgttaccatccggggaaagatgagcttacaattactagtgagaggtatgaaccaacaatgatgtcctgtcttattgtttacatttagtgacttgtaaccactttgaatgttgcatgcttttatggttgagttttgaattttggccctaggtgataggtgattttcgtggtgctttggttgggtgttatttgccatagattctgttgaatatttctaattctaccaatataaaaaatgcatcaaatccttgaaattctgttttcttttgatactaatgtaatttgtcattgatgatgttttccaatcctttcttattctctatatgtttgattggaagtgctatgattgaattaagaatttttgccctatgtgataggtgattttcatggtgctttggttgggagtaatttgacatcgattctgctaaatatttctaattttaccaatataaaaaatgcatcaaatccttgaaattctgttttcttttgaaacgaaggtaatttgtcgttgatgttttccaatcttttcttattctctatatgtttgattggaagtgtttggaaatagtaaatcatttgcatgatacattttattgcgaggtgggttgaaactataaagtttacacactgtagcaagcatatagttatatagccaaaaataaaaggagcatagagtagaaaaacaacacgaatagaattagataactaccatcttaggctcttagcagaatagcattaggaaatcgacataattgttggtgcaaagcttacactggaaaagcatttagcataaatttttcgattaattaacataaaagttttgaaaattacattcagatctgagccattgcagggctacctatagacattggaaaataaattaatcttgttcattctttctctgaaggtttgagcaccgagaggaaaacagaaaggattgccttaggactctcctttctcttattgaggaagcagggaaggctaacaagctggtagatgatgctcgggctgcatatgtgaaggagggattgaaggccaaccctgcatttatgacaaggttgcgtatgaagacctcagaattgcaaggatctagtactgtgcctgcttaaatttggtctttgatggttagtggttgtgtaaaaacatatttcaattgaaataccaatcattgaagtgtagccattccagtaggcggaagccactccaagatgactattttgcatttcagtttgttctcacaattcatatcacatcacatgcatgcatgcatgcacattgctagttgctgatttagcagcctgcatttttgttcctggaatctttacatggatgatataatttcttgggaatatagatgttcgtttttattattgtaccaagaagttttcaacttccagcaataagtatcttgagaatataacgtatgccatttactttctgagcttgtgttctaccagtacttggtcaattctcagtggaacatctccactttctttttgtatttattgacccatttcgtcggttatattttaagtttcggatacaatctgtctgatattgacttaactattgcatattacgtggtctttttaaactatgaatgacttgttttctggtcgttgcttctttgaattctcatctttggtgtgattgtaagcatagaccaaagataacctattccattatggcgcccatggctaacaattatcgtgcggtacccaatcctttgtaaaacaagagtaagtttcttcttaaattatgactgggaacatcgaccatggaaacattcttttttttttgctataaattgcttggaaactcccttgcgaaaaaaaagaaaaagaaaatactgcatggcatttgtctaaaactattgttactccacaaatatccataaattgcttttttagcagataaaatatagaatacactcgctagtctgcaaggaaagctaacttgtttgatgttgcttttgtttgatttggtagaagtgaaattgtagttaacctgttgtggtgattaatactcctaacaaacaagaacacatataacagaagcaactcagtcagcacagttttgattggagtcaactgaggtttgacttggagtaaaaggtctatattaaccttgaagacttgatttattatttctgttagatatagggttaaaggcgtaatttcctaaaaatacttcaagctggccacacagaatttaaatcgcaactcgcaagcaaaccgtccaagtttaagattttgaactatatatacacgtgttaccctacgaatacttcaatatctttgctatattaaagtatttttcagacatacaactaggcaagtgtaatactttcaaatcattgatagccttacctttttcctctgccttcgtttactgtcagatggagaaaatgtattggagggaggagcagaaacaatcattaaattctccattgattcaagtttgtgaagaaactgaggttgagaatggtgttagaagaaaagaaattgttgaagaagtaaagaagcagctatggctagctgggcctcttatttctgtgagtctattacaattttgcttacagatgatatctgtaatgttcgttggtcatcttggtgagttaactctctccggtgcttccatggcaacgtcctttgcttcagtcactggtttcagcttactggtgagttgggtcttcactgcaactaactaatatgttgatctttgaaaaactagtttattttaattttctgttctaggtgttaaatacttatgacaaaaacaatttaaaaaaagagctctttgctatgatttttttttttaatcaaatgacgcaatacagatttaattactttcaagctgatcaaagattcaaagcagtggtagttgctgtttgatttatactttttgcatcaaaaatgtttcctgccttttaaatagatgggaatggcaagtgcattggacaccttatctgggcagtcatatggggcaaaacaatatcacatgatgggtatacttatgcagagagccattcttgtacttgtagttgttagtatacctcttgctgttatttgggcaaacacagaacctattctagtaaccttaggccaagatcctgctatagctgctgaagctgggaaatatgctaagttcatgatcccaagtatctttgcctatggccttcttcagtgtctggttagattcttgcagacccaaaacattgttttcccaatgatggtttcctcaggaatgactactttgatccatatccttgtgtgttgggtactggtattcaaatctggacttggaagcagaggagctgccatggcgaattccatttcttattggatcaatgtgttattgttagcactttatgtgatgtattctccttcgtgtgcaaaaacatggaccggcttttccaaagaggctttaagaaacgttgcgacatttgtaagacttgccattccttcagctgtgatggtgtggtaagttatctttctgtttatgacgcggtgtcttcataacaaagttttcgctcatcaaatattgtgttgctatggatttctcttaacagcttggaaatgtggtctttcgaaatgatggtccttttatcaggccttctacccaatccaactttagaaacctcagttctttctgtcaggtttgttatgacaaagtttcacttggtttgtttgtttgtataatcaattttggtaaagagctcaacttttttctaagttaagccatatttattgtcagtctaaacacagcttcaactgtatggatgatccctttcggactcagtggtgctgtaaggtgagctagtatacatattatttattcctttagctgttactagaatataatgtcctaataagaatctgataattttttgctcaagtatattactgtaacattacccatagctaatcataattgtaaactatacttattgtactttcaaaattctaaagattctgtgttttatttgatcttcttgtttctgtgattaatagtactcgggtttcaaatgaactgggagcggggcgtccagacgcagctcgtttagcagtgtgtgttgtgttagttatggccattactgagggtttgttgattggtttagtattcatacttgtccgcaatgtctggggctatgcttatagcaatcaagtagaagtagtcaaatatgtagcagcaatgatgccaatactagcgatctccaatttcctagatgggctgcagtgtgttctctcaggtttagtcaaatttacatttgcttacgaacttcttattctcttaaatatgttctttcaataatcagaaaggacatataagataaaactccttattaaacttacaacgtatgcaatttttatttgttcataaacaaaataagagaaacaattcctgccttggtcccatcaactattgtaactaatagttcttctaagctcaatagaaagtatttctaaacctttggaatctaaaacacaaagtgattaaggttagatttggttggtgtttacccaaaacctttggaatctaaaacaccaagtgattaaggttacattttgttggtgtttacccaaaaattttgcttgatgacgtagacaatatttttgacacgtggcacgaaagaaacaacattgggggctccgcatcctaggatagggtagtgttacctgcacactggggcacccaggtaagtaccaagatccaccgaagtcgtttctgagtgttatctttcaacaaataggtcgccatgatcctaaaacgatgaaccatgaagctaaggatgtcacgtggacatcctagggctgaacttgggaccaacatcagtactggccgcccaagttgacatcctgtgtggtgtctcgcatcagctttggttcctatcaacttcttacgggaaatcttcttagccattgtcattagatacatgagagacatgtcgcagctaagttttagactttggagataagtctacgagaaacagcactcgggctccaggaagccctagtgggcacccaagttgacatatagtcgatttaggcgcaccgcgactagggttgaggtttctagggacatctttggaccccgattcctcaaatacatcaaggaacaatgtcaggatgtgatatttcatgaatgacatcttgaaggagcccattcttaactatgggcgctcaggttgacatttcaacatgggcagcagtttcgtttcaacgggtgatgcccgtgcaaatttgacgaaactgaaatccgtggagtacttttcaccaaaaagaaaattgaacatcaacaagaccaatttcgaagatgaagccccccacctggacatccagtgccccaaggccactatggacaccgaggttcacgtatctcaacctagggcacttcgagactccattctagagaagttttttggacatttcctttattttcatctacgaggaggatacatgttttctcgggaagcgaacaagccatctaatccccaaataaaaagttgggcgcccatggtgacaacacctgagtcactgggcgcccaagttgacgtcgatccaatttcgattttgtctcatgcattcttcttgtttttctccaaaaacaagataggggacttagaatcaagagaaaatatcatccgagtggtgagttagctcctagtcatcaccggacgctagtgtgcaagctcattgggcgcccaggttgacattagcttggggctcaatgttctttcattcaaataacagttttgctctaggcattcggccttattttgcctgccaaataagatttggatgcttctgcaagtcaatatcttatatacatgtgtcacgcgcaagtccaccgacaaccatatgcactagtgatcacccgggtatcatctagtcatcaatagtgattcaacgggcatcacccgtgcatatcaagtaaaatttctaagagaacttccccatggtcaaagagtgaactaatgatagctatcacatcattcaagcatcttaaaatagggaaacttacaaaaatactgaaatttgggttaacttttacaaaaatactatcacacgaattttttt

SEQ ID NO: 15455 - DNA, 3335 bp, Cannabis sativa
gaaaaagaaaaaaacaatgacactaacaaaatcctttactactatactcgatactaatcaaggttacaggcacattcagtagaatagctacccgaaaacgataccattttacaaattacaaagaaagaaagcactcagttactaagtatttgaacctacagtggggtaaaagaattgaagtgtttttagggccgagttcgagtctacaagccatttttctatacatgattccactatttccaattagacagcagttttagaaaaaggaaaaaaaagaaagatatgcaaacaaatacgagtgaggttttaagagtgccgtacctgagacaactatctgaacagcacgacacctgcctgtcattaaatgctgtactatgtgcataaataagacttattgaatgttccaacattcacgttagtaattgcaaatctggatggccgggttgaggcgtaggaggtttaatcaatggcctcaaagagtccatgatactggcaaatgaaggtcgtttccatggctcactgcaacatcaacatttgtttatcaaacaattaaaagaagaaaatcttttagtaagtcaatatgtatgatagtcagctacactcacttggcccagcatgcttcaattaaagaagcaatttgaggtttcaaatcacgaggaatctcaagccttttgcctctaaaaccaacagccgccacaacctacaaaataggcacaagtaatacgtgaactctcgtaaaaaagtaataccaaaaaaatatataatatccaatacaagcatgggcacatagaatatggagcaataaaatagtaaatatacataactaaaaatcaggatgaagatcaaactgaaataacaactcaaatgagattccagtcaatgtatccattttaaaatgacagtccattgtgcaaccttgggaatcctgtcgatctcagttgcttaattaagataaatttttacaaattaaattgaaactctaaagttagaacctgcctaaaaccaaaagttccatcattgacagttttaaacgaataattttgctcccttcgaaatctgttggggcaaataaattccgaacagtctattttatcaatgcaattgttcctgcattataaagtacatatttgtaaaataatacagaaactcgtcagctccagaaaacagacctgtgctgcatttaaattagtccatggttgttgcaaagtggcaagttcccacaatattataccaaagctgtaaacatccgacttctcatttgatggctcatcacggagaacttctggtgccatccactcaggctaaaataagataataaattttcaacagtgcttaatattaaaattaaagacaaaccctaaaacaccttaaattggtgtctcaaaagctcgtatccagtataatagaacttacagtcccagcagctgattttgatgaaagaaatgtatttgcctttagacgtgaaagaccaaaatcacaaacctgaaagaaaaacagattgagaggagacaaagcgaaaagcgaacaaatgtgatgcaaaacaatcaagtaataaaatgactaagattgtctgcaatgtattaaatttaatattattgtaaatacattatcttggcttctaagatttttaagaataaatcatcccattaacccaacaaaatccatcctactcaaccccgacattaaaccccgtgcaaatacaaatccccatcacacctaccttcacagtatatttcttgtcaaccagaagatttggagattttaaatctcgatgaacaattggtggattacgcctatgaagataattcattccctttgcctgtacaaaaaattgacaaatcatttggctcaatataatgaagtccaaaaaaaataagcatccaaaactaataaaaaatgtatattatcaaagatgcataccacatcataagccatactcaaccgacgcctctcatccaatacctctcttgcaccagatttatgcaaaagcctatataagctacctctgcaagaaaccacaacttcacatgttagggaacttataaacaaccaaacaataatatgcaatgatatatctggcacaatggacaaaaccttgataaatattctgtgactatggacaagttcggtggctgtgtcactgctcccataaagagaacaatatttggatgtcgcagatgtttcattattgcaacctaacagaagtacaaggcataagtacacataaacaggccttaaaaattcaaactgacaaattcttaattgtagtattagtttcaaggaagtagttagtgccagcctatacctccctcaaaaattcattgaagcgttccggatgaaagtcttgctccataagaattttaacagcaacatcctataatttgacaatttttatctagagtttagaacaaagagattgacaaaactaaaagaacagcacctccaaatctggatataaaagttaaaaaaaattggcaggtagagaaatggctaatgcaaatagaacagataacaaaaagtgcataaacatgtggattaatttcaataaaataatgattttgcaaaagaaagtaagtataaaacattgttttgtcttgctaacattacattctgtatagataaattagttagagtataacttaaaatagatgcttactgagccatgccaatcagcacgatgaacagtgccaaaagaacctgcaaatacacaaattcaaattcaaatatgaatacatctcactattttagtagttatgaactgtttagatcgaagcatggaccatttttttaatctaatgtacaacaataggttttgcctccaatttttgttgaaaagaagattacctgctccgatcttttcttttattaccagctcactccatggaatgtccaaatcttctatatcaaggttatatttgttactaggcttattgggaataagttgaccacccttactgggaatcagttgaccacccttactgggaatcagttgacctccttctccatgcccaacagatggatctttgattcttgactttataatattttgggcaggactatcttgaacaccaggttgaccaactttgctaggccgaactgtttcatcaatgtgaccaggaataggtaaaaagctcttaacatctggactattcctatcataaggtttgagatacatgggaaatcgattgttttcttcatcagttgtaggtcctggggtgaaaggtaaaaataaaaatataaaagatccaacatctaatactatataatgcatgatggatgatgcaaaagagtaagtagaaactcaagaatacttggttatcaacatcacatgttct

SEQ ID NO: 15456 - DNA, 4328 bp, Cannabis sativa
aaaagtaatgtttgatgacactaccttgcatttaaacttttaaaagtatacaaaattagcaaagagtttacataaatatctgtctctcgaatatattctgttcatcttacatatcgtcagatatattaagagtaattatgtaactattaactatttcaaacttaaatagtttgaaaccgaatacataatacattcaatcttaatatagatacaaaaggaagcttggatggatgtgagttttttctttaaagaatatatgtattgttatcacttcatatttgattttgaggtgctcaaaatattatttggaaactatattagatatagttcttaaattagtatttaaaaactcaatagttcttaaagatatttctagtcaacatttgttgatttgttgttgatatttagaatattatgcaaattttacaaaataaataaataaattatttaaagtatcgaaatcagaattcaaactgtttttttgcaacactcatacaacaaaatgtttgaaatctttactaaatttgcaaaatgctttaaataactacaatgcacacttaaaaaaagaaaaaaagatagtttttccaccagctaatttaccaatatatttgtgttaatgagttataattaattatagagtctcatatgtagcaaagtagaaatttaaacaattaactagtactagtatgttcactgttaaattttcaaacactagcaaccttttctttcttgtcaatgcaatatcattttagactcatattttgcaaaaattatgaattaaactttatattttttttaaaatattacaaaataataccctaaacttaattttcgacaattttttttaatataattaacttaaagataacttttaacacaaatagatacaaaaaaaaaatatagtcaattttatcataacaactctaaattaagttattcttaacttttattttgaaaaaaaaaaatcaatttaaaatacaaaaaatacaagatccaatttgtcatttaacaaaacagaaagtccaatcagtaacttttacaaaatacaaaatccaaaatagtatttaccctacaataaaccatcaggctaaggtgtttaccactatgattaagcttaaacaaagcaaaagatttgcaacctaattaataacattataaaaataatgaaattttcataatcaaattacttcaatatgacacctaatcattcatctatggttgcaaaagaaattgtcaaatttatacaattcaagatcaaattaaagcatcatattttttttcagagaaataaaatagaaatagatcattacattaaacaagccaaccatttttttttaaaatattaggaaggcaatgatgtattacaatacacataataaataaactttggaataaagaagaaaaaagactaagagattcattaaggggaaaaaatgaagccattaccacacttatcaaaatagtaagatcagaaagtgatcatactatccttatattcacagcaatggtggttttgtggtttttttttttttaaatataataataacatttgctaagtggtgcaaatgaaatatcttttttctctaacaataagcaaaagcaattccaaactttgcatctgacctggatgttagaaactgatggatatcgccccgaaaacctagcttggctcgaaaaatatttgcattcgacatttgccttacgaaacgagtaaatcgaacccaattttgatattcgaacatgttcttgtccatcctcacaaagttgaatgagaaggagggtttctctagaccgtcggagtaaaactttgacatcttcaccacctgttggaacgatccatcatccaaatttgatgcagcgttttctccctcgagtggtacatcacacatcctagccgccaatagcaactgcttgagatatccctctgggctgctcacagggtttatctgtttctcgtctttgtcttgcatttcgaagcatgagcagcacaaagtgaaaccatacttgccgaacatacgaacaataggtaggtatccatccctagttaaagtattgtagtagccagcagtcaattctgatggatgagactgtgtgctgtaatgccagtggattccagccacttttgctgatgtattaacttctgtgccccgaaaaacagtctcagcttctttacaaatcctctctccatgcagaagcaacattccagagtaccattcaagaaaaaattgtccataaggtgtattccaagatccggtatcacttttgaaaaactccgtttgttcaggattctgcatcaaattgccagtgccgatagggcccccatctccccactcacgcatcccaatctcccttgcacaagcattgagagacgcaagcatatactagcaacaatatttggaaaaaaattaaaattaaaaccaaaatcagcattggtgctaagtatctttatcagactataagtttccccttaccttatcgtagcattgaaactctccaagttcgcgagaacgccaagcccatgttagcttttggctagggcatgaaggataccttagctcaccagcaggacccatcccaacctgaattccctacaaaccaaaagcacctaatttaaagatcaaggcatagtcatcaatggttaagccctcagtctgaaaaattatgatgacattgtcttactgtaataatagcacccagaaaaggtctaaaagcatctctgaaattcgtcataaaatctgtgtatgcttggattggtgaacggccagacagaacagggaggacatcacatccaagggaaatgtattccatattctttcgaccaaatctatcagaatatactaaatctggatttttatctatttcttcaagtacccagaggggaagaggaatccttacatacacaaaagaaccagattcagattcagtgtcccataaataaaaaaccatgaagaaaacactatcaagatcaagttgataccccgagtaaatatacaacaaattaaatatactatatatgctctatacctcaagtttcaagagagaaaaagatatcaggagatattatccactttgaagaatgatgatagagctctcacattgtcaaataaaataaaaacagtattcttttctgtatgacagacaaatacgaaaatacataatttgtctctaattagacggacataactgaaacacaataacaacattcaccaaccaagtatacatttatttggataccaaggaaaaatgcaactgttgactaaaagaatcaggatattacaaaacacataccttttggagcaacttaagaatgagcttagcttattagaaactactatcacacagattgtgggcactgaataaagccacaaaccacaaaaagaaaccaagtgatacacaaaattttcatcatgtacagatcaatgataaaaataaaatgtctaaaaggcagcaaggagaacttaatgttagaactgaaaaagtcaagtagtaagcctatcctaaaacaaacatattggaagcgtggatctcccagaaaatcagttaaacaactccagatagatcgtgacagacagatcgagatggcaagaaatgtatgatatatcatcgaattgtatattcaaaacaagtccatgaaaataaaatgaaaggacaaaggagacccaaataaagacactagaatttatatatcttcaataagaaagtcaacagcccaaccatctacttgtctgagttttgttggtcataaatcttgtcatttttgttaatattctttagaatgaagaagattgtctgtacacagggcagcctagccctttagcagtagtccaaaatagcaacctaatcaacttaaaacaacaccgatgagcaacaaaatatgactttgtcagtaaaaagaacttgcaaaaacaaatgtttactaatccctaatgggaaagaaaaatgggggccaaaatcataagaatgaactatatgatgttttatctattagggtttaccaagatttgttcataattatgtaaaacatgaaaacatataaaaggcaacaatttgactaatacccttttctcacacttccaattttcgcatttagaatgcaacattattcaaataactaacaccaagagcaaacatttcaacacactaatcaacttaaaacaacactgatgagcaccaaaacgaactcacaaaaacaaagtttactaatccctgatgggaaagaaaaaatgggggcaaaaatcataagaatgaataatatgaaaagatattatctattagggctcgccaaaatttgttcataattgtataaataaacacatgaaaataacaaa

SEQ ID NO: 15457 - DNA, 6479 bp, Cannabis sativa
  modified_base (193)..(198): a, c, t, g, unknown or other
aaatataatacattttaaaaaagatggtataaattaaaagtattacatgaggcactattttttgtaaaaaaaaatacattttttacgtttacagaatttttttatatatatatttttacgattttccatagaaataacacgaaaacaacatacaaataacaagaaaataacatctaaataacaacaaaaaatnnnnnncagataacaaaaaatcaacaaaaaattaacaagagtacaacataaaaagacgtattttctgtaaataaatcaaaaaaatcgtaaaaatattaaatttcgtaaaatcgtatctttataaatttttggttgtttttgtgtatttgtgaaataattcctttcttttatttatgggccgaacaaatgcacaaattattgggcttttgtaaagtatttacaggcataaaatccagtttcctattggacggagcctatagaattgttggtcaatcctttaacatgagcatgagaagtaaaacaaaaaagaccataaaatgtttaaaataagaaagaacatatacgtatatatattggatgggatatctttttccttattggcaaaaggtaagtctcataagttgaagggcatagaagtaggacttaagaattgttatggacccattacacacttgcattgagacaaacaccacaactaaactaatttgtcatacgtgaaaaattaagtgggaaaccctatttatctatcaataaccctacaactattatataaatgccacactttttctacccacatcattttaagcaaaaaggattattttttttaattattatattattgttgttgtgactcttaatctttgtgcaaagaatgagaatattttcgtggtgaaatggatttggacatatacccttgtttttatgtttatttagttattttaacaattacacatatatatttttatacgtatgtcacatatataaaaagtccaagttgttggggtgtacttattctttgaataaacaaaagagagactacctgcaacagtcatacaaattgctcagttttcaatcatcatttttctttctcatttcatgatattccaccaattctaaccctattattaattatttaaataccaattagcgtttgacagatgtgaaaattaatttgaataaattattaataatattattaatttgaataattaaaatatgatatgtgtggaataaaaaatgaccatatgataaactcatctcatgataataaaaataacaatgatatgttcaaatatgcttgacgagatatcaattcatcacaactttgaatcattaattgtctattaggaagaggtcattattagtactgtttaatttcttagtatttttattacttcttaaaagttgtgtgtaattataattatgcattactaattaacaaaatagatgtgaggtgatgatacataataaataaagtgatgatcgaactatatatatatatgttatctttttgttgtcaataaaaaaagaaaacaaataaggtttggtctagtccttatacacttcttcatgaatattgcttggaaactaaggagcaaaattttaaaatatagtaacctatatgatttggaagctcccactttaccaaacccactatttaaacataattagctctcttcaaaatcaaaactaatatattttatatataatatatatatagagagagagctagagagagagagagagtgagaaagagattattaattaaactacccatcttggggttttataatatatctactcctatatatttatatgcacaaaaaacacaagagatataacttattaaaatttgaagtgcttatatatataactaattatttattttatttaatatcaattataattttcattatataggtggattaataggaggcagcaggcatgatagtatcaaataataataataagggaagcccaaaaaaacaagaagtgagtagagagaataaagatcagaagatcataatgagtagtagtagtggtagtaggccgacaagcccgaggttgaagctgtcaaaacacttgaagagaatctacccaattgggcttcagaaaagctcatcttctctttccctctcctcatccttgtccttgtctctatcggaagacaactccaacgacagctcttctcttaatgatttcggttctcccattgatcacaagatttctttggctctccggctcctcgctcctccttatggccggagaagagaattagttccatctcccaaaaatgttcatgaacataatcatgctgatatggacccatccgagtggaagaggtgcaactggattactaagaacagcggtatatataattactatatatatttctagttactaattttatgatgatgatgatgatgatatatgtgcatgttttacatgaataaactgccacatacatatcatggttaattatgtgccccttattctttttttcatatttaacttattgataaattactctttaatttttgtgtcgtggatatgcatattaatgagttctttttgtctaagtaaaaacaaaatagtaagtcattattataaattaggaaaaatgttattaaatatataaattacatatatatatatgtttagcaacatgtttatcttttaagtaatgctagccacagtacactttttacattgttttttttttgtctaaataaaaaggcacccattgtatattcctatataaacagctcataattaactaactaattaacaaaactcatatatttaggttgcctacctagttcattttaatttatatatattttgataattatggttataattaaatatttaactatgatagttatatttatttttagtcattgtattattattaaaggttgatattaatttaaaaattaattaaaaataattaataaattatttgtaatataatactatttaatctaattttattttattttttataattagtaaaaaaaaaagtttgtaatattaatttctataaaggttttattaaatatttaaataaaaaataatttatttaaatgtatatataattaatttaaatctaaaaataaaatttttatcggttaataatctgttacaataggctataaaaaatataagtatgacagtgacattaaaatatatatatatatatagtaaattagtaattgtaattgtgatggattgtaaatttttttgcggtcctatatgatgataatgatttgtttatatatatgtggttgtttaatatataattaatgagtagattagatgagcatataattatttagtgaagttgatttatctcatgcttatatataatcaattcttgttgaaatttagaacgttaatatgaaaatagatcatttgcgttggactttgatgcaaataatgcagctaaaatttcaatataatggaagatctaaagtccatgtctgcttacaaataaagaaaaggaccctataaaaagacatggtcatattacaacctaaagaaaactactaattacatattgttaattttaattactataagtatattaatatatatatatatatatatctacatatatttacagaattttgctctctgcagcctctatactattgacggtggttaagagagttcgatcacataaaataatttctagaaagcttataatattatagtgttatatatattatgtgataaggtatttatatcgacctctgatgaatatatataatatactaacacagtagacaaatcaaaatagggataataatatataattaagtcaatatatattatatactcacacttggagagctgaagtactggattatatagaggttgttgaaatttaaaataaataattaattattatatatatgcaggcgtattttaataatttaaaaagcagtgtacttttaaacacctactatatgaagtatgaacatcttcaattgtacattattaatcataaactaaaagacacatttgacttaaattcataaatatatatatacatatatatatcatgtacgtataataatggttgttatatacatagattatatatgcatgtatatatatatatcttgtactgacaaaaaggtttgacccagataaagtttacgtagcatttcacgacgagtgttggggggttcctgtctacgatgacaagtaagttttcacaaatattaattttatttacttaattaatttatgtatatttatatatgttacaataattaatataaaaaaattaattcaaataacagtcagttatttgagctgcttgcattgtctggcatgttgatggactacaattggactgaaattctcaaaagaagggagtcactcaggtaggcagattaataatatatctacttataatatttctccatatatattattatgtgagactaaagagattccccagttattttaattataacataacgaactagtactgtatataataagtacatatacttctattaaatgttataggattttatatatatataaaaatgatgctagcttattataaattcattggacattattacttagagatcagctatgtatatattgatgtttgtaataaagtttattaatttaattgatggtgtggcatgtataaatatatgatgaattttcagggaagctttttgtgggtttgatgtaagcagcgttggaaaaatgggtgaaaaggaaattgaagagatgtcatcaaataaagcaatcatgttggctgaaagcagagtgagatgcattgtagacaatgccaaatgcatattaaaggcatggaattaattaattaaagagaaattaacaatttataaaactgtactataataataactatttattagttagtttatgtaaataattaaaatcataaaatgtatgtgtgtaggttgttggagaatttggaagtttcagcaactacatatggagttatgtgaatcataaaccaatgataaacagatacaagtacccaagaaatgttcctctaaggtcaccaaaagcagaggccataagcaaggactttgaagtataaagcctaaaaggaacagagcctaaaacaaacagtgttctttttttttttttttaacttttccatgaaatctatttgaatatgttaacccactcaaactccatatgacttgctcatattgcaattcaaaacagaacttacaaagagtcccttcttagaagaaagctatcctatttataaacaaacattatttgcatttttcttcatttacttccctccaccaagcatgtgaaaccttatcatatccctgacattctaactcacaagcatgccactaaatagtacaccaaaacattcatatctaactaactttgaagaatataaagtttgagggcataagcaaagttatttaagctaaatatgttagtgaggtagagcacatgttcataaaatgggcacagaaaaaagacataccaagaaaaattacacaagatttccaaaaacatagaatacgtgctcaatcatcgaaggcaacaattttcattgaagagaacaagaagctgagaaagacaaccacccttcttcacaaagagaaacttgctttgttctctgaattgcagaagtttcctaataataataataataacaatcttgatcactagttccactacgatattccaccagtaatcaattatttcttcctcttctttcttctcttcaaccattaatcaaatattgatataaaggaagaaataaagtcattcatttctgttgatatggatgtatgcatgcaataggtttatctacttatataaatatatatttatataattacttggttgcatatttttcttgttatatatagttcttgttaagctttaattatgaaatgaaacctctgttttcacctgcggtggatagtttcttgtttggactttcccaacaatgttattgatgatataaaaacataacatgtgtatgaaacatatagtgctcatgtatatgcatgtgcctctttaatgtaaaagaaattgtcagtgactttccataacttgtatttagctttttcttattgattgttatatgaagtgacaatgactctattatatatataaatacatatatatatgtatatcaatcaaagtagcacaaacatgaccaaggaaagaacacagatggagcttttcattataattaagccaatgggggataatattttaatggtactcgtatgcttatccaaccaaagaagcttcagatgaatgctcttgcttcagaaaaagaaaatacactgctaaatgaatttgaaaggctccgaaagtacagctatacatataactatccactatgaagaaaaaaaaaacctatgacctggtttatggtattgacttaaaaatgaataattaaccaaatttgagtaatgaactacttcgatttgagcaaaataacagtacccaaaaattaaaaaaaaaaa

SEQ ID NO: 15458 - DNA, 4132 bp, Cannabis sativa
  modified_base (3145)..(3148): a, c, t, g, unknown or other
acacaagtcataaaattatataatgaaaattacataattaattggttaagttgactgaacacataagaaagactaaaattataaatgtcaactgtccaattaaaaatatttcccttgaaacctggcctttatcaggctcgtgggaacttagccaaaaaaacactgataccataccagacaaagaaaaacacataaaccactagctagccaaatcattacaataaagataagagttattaaagctgtcaaattgtgatacaaagtcattatctcaatcctaaacttcaaattttttgatattcattggccaattccgacaatatttggtggaagaccaccttatggttcatgtactctctctttcttactttcctagcacaaacctctatcttctaacacttctcctcaaatgaaaaagacacattttgcataagctcacgccacaaaaagtaataaaaaaataacttttttgttttgcttaaaattgcatcatctttcttttggagtggtgtaacgcatgagatgagaactaaattaagagttagacaagtctatgcaagcttcattgcatataaggaaatacatcaaaagtaatacaaataaagaaaacacttacctatcctagcacttcattcattcatatcaacttgtcaataactttaatctactttgggtaatcatatgaaattggagaaaaatcaaacaattattgtacacccaattagcccatctatttataatataataaatattttatttatttataagtcaaaaaaaaattagaacactgaaaatgaaatttaactgaaattcagcagcaaaatccgctcaatatacgtatatatggagaagtcaaattttagaacagtttaacagtgacacatcttccggcccaaatgaaagctaccggcgcgtgttacagacacactctgctctgattgaagagagagtgagagcgtgtgaagagtattaacacataagttaaaacttaaaactgacaaagatcactattattacaaatgtaaagagaattcattttcatttcaataaaattccctttacatccgtaataatcaccaatataaaagttaggctgaaaagggccacatggtccctgagactgcaaagctccgcacgtttggacttttgagaactcgcacgtgtacggagccttcagtgacaaagccaggtcctttcgaaaacgaaaacacttaatttttcctaattaccaattttgcccccttcacgtcactcccttcaaaaataattttgagacagtaccttttttgttttcaactttattattttttttcgtcttctttacttttgggacaatttaattaatgtatatttatattctttttttttttttgcctaatagaggagaataaataatcaataattaagaaaacaatcatagtcaaattaaaaagatgagcctttttaaacaccaataatttgttgcttttttcaaaatttatattgcttcaatacttcaaaaaatatatatataaaaataaaatactcaaaaaattgcaaaaaaaaaacttctaaaaaagaattttagtaccaagaagaaagaaaatcttgtaactttattgaaaaataaatgaaaagaaaaattctttggaccatattattcaaatgaaagatacctaaaagatatgtatataattatgtgttattttatatatatatgtgaagggcagtttgataataaaagattgaagttgagggtagaatagtcattataaatcacttgtgcgaacctggtgaagttggggcggcggaggcggtggcgctgcccggaccgactggttttgcaaatgcccaaaggctggaaacaaactcgccatgtgcaccgaatctcgctcctgccaaaactccaaatgaccaaattatcctctatattccctcacaatttacaaaaataccctttaccaacccgggtttttaattctaacccctgaacggggaagagagtgaaaaataaagaataaaccaaaatttaaagtttatgagattccaaattcgtcataaataaatgagagaaaaagaggaattttggggtttcgaattcctacttaaaaaaataaagaaacgaaaaagctgacgataagagaattttcccaagcactttccggcaaaggaaacagaaattttcagggaaaattgttcccactccacttcttccccacatatggcaagcaaatctcacaacatctctatcaaaaccacaaacttttttttacacttaaaactaactaactagaaccctttgtactttggaaaaacgacatcaccaaatgaaaacgaacaaaaaaaaaacagtgacttacattaatggcagaagtagcgttcactggagaagaaagattattagtgttgttattattattattaacttcaacctcatctctaaacctgtcatgccttaagaaaccttgctctaaattcaaacccagaggcatacccatccccattccaactcctctatacccacctccgggaccagacccaccggatacgtttccggcgccggaacccaactgtaaaaccatgggcatggaccccatatcgccaccgccaccagtgtatgactgctgtcctgccaagatctgttctaagaaatcatcgccgagattctcaggcgggttacccgccataacgtagggttagaaagaaaagtttcgctgttgtcgttgttgttgtggtacactagtactagagctattataaagttgtatataataaaaattggatttttaagttgaggaaaggtgagaagaagagagtttaagcattggtttcttttgggttcccaagagaatttgagaactggggtttgtctatatatagttatataaaatttattgtatattatatatatacgtgtgtttgttcgaggatggaaagaaagggctgttgttgaaatgggtggcagacccggaacccgagaacccgaaaatggagatgtggattcctagagagagagagagagagagagagaatttggttttgtttggttaaagaaagaggagtatgtatgtatatgtaagagtatgggcaagggaataggaggaagagctttttcagctgaaattgctttttaaagctctgacttgtgtgtgtgtgtgtgtgtgtnnnngagagagagagagagagagtgtagtatctgtcttgggtcatggtttgtttaaaaagacaagggagaatgggaacttctctgcattcttattcttcttattattaaattaactttttctggaaaatagcataattaactctgattttgttattttcttttgtaataaacaagtagaaattctttgttcagatattaaaaaaaaaaacaagtagaatttctaataaattatatgctaaagcctaaaattttggcattatttttttatgtagtcctagtttgcatcaattcagatttcagagcatacataatgttagtatgctagagagtagtaaccagttaaaacataaatatatgttaaactccacacacaacacacacctttcacatcattactacaaactttcactactttgaactttcaaacttcttcggccaaattgcaagaggactcgtttttaattctttcgatggatttttggttttattatattcatttgtacatttataagtgttatattttttatttataccataaaataatatttaatacaaatatatgatactttaaaagttaatgcaaaaatacgtattcttctccacttctaacaaaaccaaaatcataatcagaccatattttttctttccttctcatttttttctaatcaaaataaaatttgtctcgtggacaaacacccacaatcgcctcactttgaaatattctattattcatcttgacaatcttaaatcacaattaaagtaattgcatctcaagttgcaacccaaaaaacataaatatatttgcaacaaattacaatcctaattgcaacttatgctgcaatacaaatcacaacccaactcaatttacaataacttaagttgcaaccaaagacgcagtccaataatcgtaacctaagccgcaatctaaatttgaagccaagtgcaacttcagaaactcaaatgcaactcaagctgcaatataagttg

SEQ ID NO: 15459 - DNA, 7040 bp, Cannabis sativa
  modified_base (5064)..(5078): a, c, t, g, unknown or other
atctacggatgtatctgcaaacttctccttctattctaatatcttttaatttctttacttcttttttcttttttttttttaaaaaaatataaataaatactggaccgttttctctcttaatataattttatattaatcatttattcattgatttttgtctgagggctgtgctctctgttcttatgactaattcatataatatctgctccaggttcttctgacttcttcagatgcagtcttgtctgcattgccttctccattacttgctgaagcacaaatgttaagggatcgagcaatgagtcattaccaagctcgtagtagcctttttggaagcagccatagaatgaataatagaagaaatggattgggttttgaccgacagagtgtaatggataggggggttggagtgtctattggccgaagagcagtgtctagtgtggtcgatagcttgaaggggaaggagattgaaggcgagccgcttctagatgccaatgcattgaaggccttgatcaggcttttaagattagcacaggtatttatggttaattagataaatataataactttattagaggcacaaggactgtttgctgatatggttattgtgtaatgttttctatggccagcctcttggtaaaggccttttgcagagactcctgttgaacctttgtgctcatagtgttacaagagcaattcttctccactttttgctcgacatgatcaagccagagtctgagggctcagtcggtgaattagcaacagtgaattcccagaggctttatggttgtcattcaaatgttgtttatggtcgatctcagttattggatggtaatacctaaatttgatcgactcaaagtccctttaattctcttttggggctcaattgttgattgattaattacaaatggcttttttttttttcctataacaggtcttcctcctctggtgttgcaacgaattcttgagattttgaattatttggcctcgaaccattcacctgttgcgaatatgttattttactttgaccgtcaaaatgtctcagaagcattaagtacatcaaatgtggagaacaagaaggacaaagggaaggagaaagttgaagaaggagagttatcggtgaagtctactcaaaccatccaggatggtgatattcctttgatattgttcttgaagctcttgaaccaacctcttttcttgcagagcagtactcatcttgaacaggtagaatgaagttctgttttttgtttttaggaatttttttcctgaaccatgtacatttatcagcattgaaatatttacagttatgctatgctacgtaatcacacatcatatggaggtgtaagaaatctatttgttatgttgttgtgcaggttatgaagctgctgcaagagattgttcatatagcagcaacaaaattggagtttcaatctaaattagagagggaaactaaaaaagctgcaagtttggcaacaactaatgagccttctgaagatgctgagaaagctcctactgtatcagagccagagtccaaaccagaagataaacctgttggtactgaatcatcttcatcatctggaagtaagagaatggagacttataacatcttcttgcagttaccgcaatctgatctacgcaatctttgcagccttcttggtcatgaggggtatgttattatctttttctctgttatttgttgtttaattgacatcaattgttttgttctcgctctttctttggtcttgatctagtgtatagacggaaacctttgtgtgacctgtgtttttactttgcttaggctctcggatgatgtttacaagattgctggtaatgtgctgaaagagttagcatcagttgctgtgccgcataggaagttctttacaacagagctttcaaacctagccaatggtttgagcagttcagcagttagtgagcttgttacacttcgtaatacacagatgcttgggttgagtgcttgttccatggctggagctgcaattttacgtgtattacaggcacttagctcgctcactatacctgttgaaaatgagagttcaggacaggaaggtgaagatggggagcagcaggaggagcatgcgatgatgtggaagttaaatgttgcacttgaaccgttgtggcaagaattgagtgaatgcattagtgcaaccgagatgcagctgggtcagaactccctttgtccaccgatgtcaaatataaatgctggggagcatgtacaggggccctcttcctcttctcctctcccacctggaactcagagacttcttccttttatcgaggcattcttcgtcttgtgtgaaaaacttcaagcaaatcaagctactaccttgcaagatcaggatgtgactgcaagagaagtcaaagagtcagctggaacctcagattcatcgactgtcatttgtagtggggatcttcagaggaagcaagatggtactgtcacatttacgaagtttgcagagaagcatcgacgtcttcttaatgcctttattagacagaacccaagtttagtggagaaatcactttcaatgatgttaaaggcaccaaggcttatcgattttgataataaaagagcatatttccgctctaggattaggcaacagcacgagcatcacctctctggtccactaaggataagtgttcggagggcttatgttttggaagactcctataatcagttgcgtatgcgacccaatcaggacctgaaaggccgacttaatgtgcaatttcaaggcgaagagggtatcgatgctggtggtctgaccagagaatggtatcagttgctgtctcgggttatatttgacaaaggagctttgcttttcaccacagtaggaaacaatgcaactttccagccaaaccctaattctgtcttccagactgaacatctttcttacttcaagtttgtgggccgtgtggtaattctctttactttcgggtgttgaaattcttattatactttacttcttttttagtctaatcatatatattgggcttgtggtctggttttatgcaggttgcaaaggcactgtttgacgggcaactgctggatgtctatttcactcgatctttctacaaacacatactcggtgtgaaggtgacttaccatgatatcgaagccgttgatcccgattactacaagaatttgaagtggatgttagaggttagtagctttttaaatgacatacagtcaaatatgctgtgatgtttgatattatgatgttatgagtatatgaattaacacacttgcccactttgtctgttctatagaatgatgtcaatgacattctcgacctgacgtttagcatggacgctgatgaagaaaaacacattctctatgagaaaaaccaggtacattccttgtaatgtttgatttgtagcttaagaacttccattaagtagccttgtttgaagttctaacatttccaagttccgagaatttgactaattccaaactttgtttttctctttaaaataggtcactgattatgaactcaaacctggaggtagaaacataagggtcacagaagaaactaaacacgagtacgtggatctcgttgctgatcacatattgaccaatgctattcgtcctcaaattaatgcctttttagaaggtttcaatgaattggtcccaagagatcttatctctattttcaatgataaagaattggagctacttatcagtggtcttcccgaaatcgactgtgagtgtttcttatagctatattatttttcccaacttactgaatctgttcttcgggtttctaaactgtcttgttctcctcgcagtggaagatttgaaagccaacaccgagtacaccggttacacagcagcatcaagtgttgttcaatggttttgggaggtagtgaaaggtttcaacaaggaagacatggctagacttctacaatttgtaactggaacatcaaaggtaataattatttatttaatttttccattaagcaatctctaatcataatctttttacggttaggttgattctaaaaaacctctttatcttctttcgactcgttttcaggttcctttagaaggtttcagggctttgcaaggtatttcgggtcctcagaggtttcaaatccacaaagcatacggtgctcctgaccgactgccctctgctcatacatggttagtctaaatcataattcagattccgatttcatttcttgattaatgttctactaatgcatacatctttttcattcagctttaatcaattagacctcccagagtacaccacaaaggatcaacttcacgaacgattgctacttgccattcacgaaggtagcgaagggttcggtttcggttaaagtgttatttcggcagagacattattgttagcccagcaaacttgcaatctactattctaagttcccatgtacatgtaagtgagacaaaccaccatttcattttcctttcgatcttcatttttcatcgccattgttgattcgaagttcgaaccattgtttacccttttcgtacttgtgtgttgcagacagatagaacaaatggtctcggagcggagcagggtatttttttcagatgttctccgtcatcaaaaatttgatttcgaaaatggattcttgggatgctgggtgaacaatgcttctttttttgtagagacatcgtcgtcgtttaatttttcggtttagggatcgctcgatcgatcgcgaaaaatggcttttgggaggattacttaattattcttttttcttctttttttttcctagctatattcaaatgatttatgagggccatacacaaatttacaattggtatctctatgctttttttcttttttactgttcatattattagattttctattagtttttatctattattctctcctatcttttggccaaacagcctcattttactcagtttatctttttattatgttattattattttcatgtgaatctccaaaagcttagtcttgtatatgcaattcaaggtaattctacatacaattctatcttctacctcaattattttatcaattttactataagaagattctctctctctctctctcnnnnnnnnnnnnnnnctctctctctctctctctatattaatataatattgggatttttcactaatggaagacaagttggtctattcttgtcacatcttttttaagatcaaaagtttctcaaaattgagcaccaatgaaatctttttgctacttcaaaagggttctaaatattttaaggaaagaaagaaaatgcacttagatttcaagagaaggatcaactttgtctcttcattatgtttttttgtcattcttatgttgattaatattaaatttagagataaagctgttcattgttaaatcaaaatttttatgatgatgattaaagaaagtaactttatcaagatttttccgtcatctaattttgctgcttataatatggttaagtttgcgtttgttttcttatctataaagtgtttttttttttttgaaaaaagaggattgtgtaaagcgtgtagtgaaagatttggaaagattaatggatatatattaagggttgatgaaatgaatggtagtaatgtaaactattttttatattatttaattaatttgtttattactttagatttgcaaatttagtttgattgtgattaacttttgatcattatacacataaaattagtgtggcagacagaatctagcaagtttaaaattttatgataaacttgttagttattattgactttcttatatttatttatattctcctccatcattgttgcttttttatgttttaaactcttattttttttctacttttttctttaaaatatttgtatgtgaattttcaggtaattataattgaaccccttctaaacaaaataagtgttattttccctgcaaacaaagaaaataaaataaaaaaaaaaattcaaaaacaccacaaaatgggacaattctaaaaaaagacaacaaataaaatatattaaaatagaaatgcccaaaaaattaaaatcaccgactttgtaaaaaggtgaagctgccaaaaaccaatggccaaaaagaatatatggatagtgacacaaaaacaattaaataaattaataaataatttatttatattttttattatatttatacttgttagactaagacactcttatagtaatttatttttcactaattcccaacaattttttaatacacatatatgctttttctaataaaccacaattttaaatcactttcataaactttactcatagattttgcttctattaaattaataatacaatttttttttgtctagttaaataaacataaatttcactccaataagtgtctcacaattatacccacccaaatttgatttatacccttttgtttttatacacataattattttttatttaaatcaaaacaatatttaattttgaagattcatatcaaacaaaagtaatatatatgtataaatatatttatatatatatatatcatgcgtgtatctacaaacttgatttattttattttggggttgcaaggggatacgaatcgtgttaatttttaataaaaattttaaaaataagaacatatttattaattaattaataaaattatattctattagagacataaaaattaaaatattaattaattaaaaaaatataatgccagctagtcaaatggtactctcatgcgagtgtgaagtaacaacaacgacaacaaacgccgtttgccagctcatcactccgttccgtttatctccttttataactcaaaaccaacattaaataacgacgccgtttaatgactcttcttctgcaaaccaacagtaaaacgacgccgttgacttaactcttctaattccactttagcgaaaaaccaacatgaaaacgacgccgtttagtaactcttgcaaaccaacactaaaacgacgccgtttaatgactcttcttattcactctaacgcaaaccaacaataaaacgacgccgttttatgactcttcttgttcactgtactgcaaaccaacattaaaacga

SEQ ID NO: 15460 - DNA, 16704 bp, Cannabis sativa
  modified_base (2899)..(2903): a, c, t, g, unknown or other
  modified_base (5519)..(5523): a, c, t, g, unknown or other
atttagggtgttaatcaacaaacttgtgagtagatttaagatcctggtaaaataattttcaacagttgaacctctaaaggattacttagaatgattcttagaggccaccacacaaatgaagacacttagcaaagacaccagggtcatgaaaatgatagtttgactaacaataatgagtccattctataaagacttgaagctcaaattaggatacaccattcaagagcttctagacaaagctaacggtttcatcaagtttgaagaaactgtcaagaaggctagaggagttactcagctaggagcaaccaattacactgcttatctatttcatgtctcgaacagacattgaccaggaaggtaaataaggatcaaaaactaatacctccactgaaatagactcctcatctatttcctaagatgaactcgagcaaggatagagtgacgacgagtcccctgctatttctcaagaagatctcgagaaagaaagcagtgatgaagaatctcccatactttcaagattactcaggagagaggggcagcgacgaagattttccttctatttccaacaattataaagatcatgggattagcagtgaagatgtgtcttatgagtcttccaaagatagtgaccaagaaagtgacactgaagactcccaatgagagagggagggaccttacatcatcatagaagtttgaacccaggacaaacaggttggagtttgctatgactgccacttgaatctagtgtcagtaccaaggtactggaacagggagcatttgagacgataataaagcaactcttccctaaacaatttgcatcacattgagatttttcgggattttatgctctaaataagacctattttaatataatcagatttactaattaataaaagattaaactcggtctagttttctttgtatgaaatccgtgatattgataaatccctaactttaggtattttttaaattgattccatttttatttattattattttttttgaaataaaataaataaattacgacgtgtgtatctagggaattgtcgcttcagaaatcatttttatgttacatagttcatatgattactttcatgattatatgtttaatgtataaattatattaaatctagaacataaagttattcatgattatagtgttgtcaacacagtgaaatataatcaagattatatgtttcaaagtttaagtcccataatttgtcagtacactagattgacactgacatgataatcagcgataaagtttatatgcatataggaagcccatttattttgtgatatataaatggactaggttgctcaaaataaaatatcactttgataattttatttaggcccacttagtattgggcttattcaattaataataattatttaatgaaaggctaaattcctctctttggggttttgtgtgagaataagggccctaatactagtgggtacgacatattatactcagtcatctctcacatgaaccacccaactctgaaggcttatttgccttatttaaattattgaattaggataattatattaatttaatctaattaaaaattgattagcaacataattagtattaaaataaatgaaattaatttttcattagattattttaaaattaatttagaaaaacacatttagttgaaagaaaagattctagatactaatttcaagtaactaatttatattttttaatatttaattaagtaaaaaaaatatttaagttgaaaattaattttacaccaacttaaattagattagtttcttaaaacttaaattataattaataattaagttaattttcttcaagatacttaattatttatttctatttcaagaaattcaatagaaaatatattttagttgaaaattaattttagacaaacttaaagtagaatatattttttgatattaaattagatttaaaaattaagtttattttattaaaaatacttaattatttgtttttgtttttaataaatttaattaaatagaaagttatatttatgatgaaattttttaatttcagatcaacttaaattagaataatgataagagtatattttattttattttaataatcattttttgacgtaaattttgaattacatttaattttaaatgtagatatttcaaaattttcaattttgaaagttcgatcaaagttgaaaattaatgaattaattttgaatcaacttaatcaaacaatctttcattaatgatttattaaaataaatagacgaaaatatattatattttaaattagaaaatcaataattagtttacgaaatatctagattgttattttctaagtagactttggtatttttttttttgtatatatttaatttgatttgctcaagatactttaacattagaagtttttcatgaaatttaattaaataagaaaattatattcaagttgaaaattaatttcttaattaattttaaaccaacataaattagaataattctttcagatttattttattttattttaatgtaaatttgaaaatgtattttaaatacattagattttcatgtgtcaaaaaaaaaaaaaaatacattagattttgagttatgattatatagttatgcatttatagaaaattagatttgagttgaaaattaactttaattaattttggactaacttaaatcaagtaattttcataatgttaattaaaaattaatacaaaggatggaaaataaatttattttatttttttagatctatccaagtatgtatatagttttataaatattaaattaaattttatatttagatttatctaaattagtaattttaattaaataaatatatgaatattaatagattaaaatatatctatcaaatgaaaatacaattctttaaaannnnnagctttagtttaaggatattcgatctccattgttggttctacatagttcttgtttgaatgatagtcatccctaatagatgtccattcattagcaattaaacgtcgtagaatctcgaatgataagtattattgttaatcttttattcttagtaacaatcaccccagtagtgactgctaagagtagtctgctaagagtagtgcttacaaagtatgaaacaatggtagaagctcatgaaagagaatgaccttgactttggcctaaacgggacaacgtttgatcctcattttcattgactaaaaggttgctaaaacggtgtccattttagatgagctaactactctatttaatgaatgatatctttgactctcgcttaaacgggacactaatatcgatttgttgaaaatctcaaaaattatttaagatatgtttattttgtattttcacatgtctttgttacttgctaaatatttaataattttttaattgtgtataaatttatattgaacctgtattttttctcttattaatcatgtagtataaattttgagtcttaattgttggtctaagttggtttgttattttaatgggacaatctcctaaagattgtcatccgttagacaacataatagtgttagatctcgacagattaatatttgtacatgcaacatctaattgactcattcctaaagatgcaacttagacttgtgtttacaatatgaaacaatgaagacgtctataaaataagataactttgactctctcctaaatgagacattattagattcttgttttaatcaaaattattctttagtttcctcttagcttttttcattaaaagatttaataagatagtatatcattggataaagaaggtttataaatcatctacttgtgatgtcactctattttcttctattaaattaagtggagcagatgactacactccatatattctatcccgtaatgatataactcctcaatcttagaaacatctcctacttgtatatgcttactaaaggaaatttaaacttagagttaaaatagtagtgttatacccgaaattcggctaccatttcaatagaggacacgtgtcaagctaaggggaatatggatcgatgaaattacttttaatgggataactcattaattgtgtaagtaacagagtatacttacaactcgctgactataaggttttatgcgaggttaaagatatatgaactgttgcctcgtgtattaacgagaaaccatacgtcattggatgcataaagcgagacatcaacttcgttacccctggggagatgaaagcgatgcatatcgattgtgaatacacttagcacataatatacaaactaagtatatcagttgggtaaactcaaggcctattaagcgaggtgcctatctcgctataggaaggagcactcctgttactttcaccaatcaacttcagacatctttcagtgagacttatagtctagacgagtcagaagctgacagtagaatgatggctactgaagtactctttttgtcataaagaactgtgactgtcaaaaatgaagtgttatgccttcaagcaaagaaacaacgaggcgtacatcgtcaatttccgaaggataggggaaacattccagctcgccatcaaggtcattaatgttgagttcccgtcgagacatcccagaacgatgtgatttaaaatgtgtttaaatacacgatcattttgacccagtaaaagcggataagtcacagctgtgtgatattcaaataataaccgcatttatactacgtgatatgtaatcaaaccccatgatttcaggggataaacgttgtaaagattatagtcaactctgtaattaactgcctactatgtgattataaatagtggcaagttagatcaaaaaaggggacgaaaaaaatcataagagaaaaaggccctgaaaaactaccagaaatttaataagattgactcgtggactatgcagaattttaactacaaaaccacgtaaaaaatcctttgtgtctatactttttcctttgctgttttttatttttttttatgtgagattatcactgtaggctcatagatagttaactaaaatctgcgttaacaagtagtggtggtccaagctagaataattactcaaggaatatttagtataaatttaagtcttttactttaaactttagattccaaatagaaattttaaatttcagtttctagaatacattggacaatacagtcaaactttcacaagttgttaatatccattttctatcaatggatccgaactgtatgttaatttatggattatgagttttctattctatgaccagaatccactttctaagaactctttgttgtaactagacctaagattcatcaaaccacaataatatatctatggcatttgcatcttgttcataatggttttgacaagatcagtctctgcaaagaaaaaatatgccaatatccacttagaagtaggatcatctgtattcgaatatatggatgtacattcaggggtggatatgagttgtcgctaaattcttaagacgatcactctagattataccttaaataaagaaatttgaaatatttaagaaatttcatgaatttctannnnnggtgaaaaccattaaggtacgtggctaaagatcttgtaaactgatagcggtggagaaatatttagttatgcagttcaaatatcataaagttgaacttcgaattgtattcaaacttacctcctaagaacttcagagttgcatattgatgaaagtgacaggtctatgattagttactagcagctgcctgagtccctttagagaaaagctaagcctagaatcgtggatgtcctgatcataaacttaagagaagctagaattgttaacttaagttttcatgtttgatagctattctaaagtgattaggggtgaaccatcttatggtcattaagataagaaagtgtttgtttcaacaaatactgctattctaagaacatgaataaatctgaaaaacaaagtagcaaagtaaatgagacctttttcttatttcatgtttgtattcatattattatttcaattattcaaataataaataaaaaccatggcttccaagctacaaatgtgtgccacactgccacttgtatacattcttcactttctgataacaattaagataatccctaaataattaaataattttaactttgtttaaaattcaaatatttttaggattcattcttcatacctcatatccattttcttgcatatatcaagtgaattattttctagtaacttaataaaaattttctaatatattgttgttatttatcttcatcatccttaatggagaaaatatacataaaataagtgaatcagaagcaaaaaaaaaaaaaaatgagagctagctcctctttttcaagaagcctaaaatgagtgctgcaagccattttttttccacttcaacaatatagttgaataatttgtttaattaataaaatagtgactctcatcaatctcttgtgatttcttttaactaaaacttgaattttatatggaagacatgaaattatattttaaaaaagtagctaaattaatctaactaaatcgaattatttatgttaatctcactttagatttaatctagtttaaccgaataattcacccgatttgaacctgatcactcaaaatgctcttgaagccaaaagcatgcaattatggtggagttaaagaaagaattaatttgtatattttattttatttttcttaatatcaaaacagttaaattagtgtgaggatgtgttaatactcattcaaaattaaccccattctttatttgcctctacataataacttgtaaacccactgaaaaacaattttcgtatcttctcaaataatatcagaccgaggcagtttcaaaaatcaagtttcaagttgaatcaaaacctttatttattttttttaattttttttatcatattataattttcattgattttttattttatttttaaaacccaattttggttaagttgtaattgtgtctatcttgtttctttgtttggtattaaacagattatcaatatatataaagatggtgaggccttcttcttgtgaaaaggccaacttgaaagggggtctttggtctgaagaggaagatgcaagaatgcttgaatatgtatctaaacatggaaaagccaagtggacctctgtgcctaaaggagcaggttgagtactttttcaggtcttatatatgtcatttttatttatataaaaatatacatatatatattttatcaagattcagttaattaattagctttttcaagcaaaatattggtgtataattaaatgagaataaaatcttagttttggaatggatgtttgtgagtgttttttttccaggacttagaagatgtgggaagagttgtagacttagatggaataatcatctgaggcctgatctcaaccatgagagcttcacacctaaagaagaagaactcattgtgaagcttcatgcagccattggaagcaggtaatattttgactttcaacatctaaccaaagccattgctctttctcattttttttaatggtacccatttttcttttttttttttgagataatttggatgaatatctttgagaagcaaataatgtagtatttttactctcatttccaaaccttaatttcccactatctttttgtttttggtttttgcttaactagcttttttcttgctttttttctttggaattaattggaccccccaaaaaattctgtaagaaatgatttaaaggaaaaagaaagagatcattgcattgtacaaaattaagaacaaaggcctcaaaccccacatgagcattgtgtagataaccaccaatgatgcgcataaagtgactcccaactgttttaacagccttctctatatatatacatatatgtatatttataggtggtctatgatagctcaacaacttccaggaagaacagacaatgatgtgaagaactactggaacactaagctgagaaagaagctgtctgagatggggattgacccagtgactcacaagcctttctctcaaatcatagctgactatggaaatgtgggtggcctcccaaagaccggcatgagaatcggttccctcaacaaagacctaaagaatgcaatccttatgaagatggatccaaaaggctcactctcaccactgccaaatacaaccacaaccagacatttcatgctaactcatcaagcaaccacaacaataatgactaccaatattgcacccaaaacagaaccagcactagacagatttttatcaaacgacaacaatatttcatcaaacgacatctcatcagtcgatcttctttcccagctccaagccataaagttggtcagtactgaagcttcaaactacaaacccaataattatgaatcttcattattgccttgtttctacccagaagcaacattttcttcaccctcatcatcatcttcatccagtacccaagagatgccacctctagctggtgtagccagcttcaattggaatgactttcttcttgaagatgcatttttgccaaatgatcaagctcaagaacatgagacatcaatggctgagttgatgaattattcttcttcacagaatgatctaagccaaaatcagagtgaaggatctaaagatatggataatacttcatttgtggaagccttgctagctcgagagaacgagatgttgcttgatgagtttcctgagtttttagctgaatcgttgtactagctagctagtaaaagtttttatttttcatgcagtttttttataaggggaaaaaaacaaaaacaaaaacaaattggtgactacattttaacttgatggattattaaatgctttgcaatctattaagaataataaagaagatgaatgatatatatatatggagtatatatatatatgtttttattgaatattagcgtaatggagtttaaatactaagctactgttgggattagatattgacatcatgcagttaatgctgttattatatggattatgtattaacatcagccgagctttgcaaggtgctgccgcgagaactcattttgtttaataaaataataaaacacatattttttaattaaatttaacacataagatgtcataaataattaaaagtaatttcaaattcaaatttaaattttaagaaaaatcttattttaattgaacataattaaaataattttatttaaagataattattataataaaataataaaaagaaaatttatagtatatgtacaacaacatatatacgtgttaattccaattttcgttaaccaataaatgagtctaaaattaataaatatacttcaaaaagacattaataataataattaaacaaaaaggtatttttatgtgattttgaagttagttattcatagtctacgagttcatcttatgatcgggattttatgagtttataggtatttactgagattttcgaaaatagaatattaatgataagaactaaagaaataaataattaaaatagaaagagtaaaaagagacaagtagttttttacttgtgcgggcgttaattagtctaagtccacgagtcagtattatttagtagttctttacttgaaaaagcatttgagaatataaagaatttatgttgtcaagttgcttgagcaaagtttgcaagagaattcaacccttaatccataagattcgatgggtatttatagtagtttgagaattatattcagtttcccttttccctctattagagagtttatggtaaataatacacttgggccatctcatgaagtccagcccacgaaggagacgatctgctgactaggcggatcggatttggcttgatttggtcaacattgtgtgctttaattatggaaaattaatttatgaattaattgtgtaatgttcactataggaagtttcactatcaatcctgatacgatactttgttgtgatctggcagctggagtttccttatttatggacaagaataaaaaggaaaactagaagggtcttctaggaacttgctctctcgtccctccagtctaatgatatcagacatgcttttgggcacggctcgccgaaggcagaaggttttatgattacggaactgaggtatgttcatggaaggacttatccaaatggacttggcacactttacctttgttgagggacccactaatgggccttggatgctgacctggactccacatgtccactgtcgaaaacgcaaataacatttacctcccaagcttccagaatgttgcgtatgctggatgcttgcatcactccatccatatggacatgtggaggttgagggataaaatcatgaatttctgagtgccactcgatcttggaagatagcttccgcctatgatgatagtacatccacgtgtcgattgcgtgatgatggaagggcgcgaccatcgaggagtcacttttcaaaagttatattttgacggctgtttagtttttggcgtgaaaaaagggcatctcaatcattgatatgtgccttaattccggggaactttaagtgcaaggatatgcgtggattgtggaaccccctggccatcggatgaaagtagtgcttctagaattaggatcatggtccgtccatctcacgtggatcactccttttttatataaatactcttgatgaactccagttaccacttttcattcgtttcccaacttttcaacttttcaactctctcaaagcttctaactttcttaacgctctttgagaactagaaccgagtccagagctaactttccttctttaccttggaatgtgcagttgacacgcattcatctactattgaggattcaagcgcaagaacttccacatctttaacccccagtgatcgtgagctttacgccagaagaagaagatgcgattctggattttgacgtaaaaatagattcgttgatcgccctagcatcccttctttgtgaaaggtgcgatcgatttccccagttgaacccagtgtctatcagtttgacatctcgactttccacatcaggtatcatacttcttttatctctggatcatattttctgggttttgtgtattattttgcatgtttagtctgggatgttgttaacacatttttttagctaaatatatagccttttacgtaataaaaaattatagaatttaataataataaatgaacacaagatattttacgtagttttgtagttaaaatctacatactccacaagtccttcttattcaggatatttatttagatacagagtacaattcttaataaatataaataatagtcttttctcttaagtttttcatctctttttccctagattctgcctctatttataggtgtataggatgacagttatttttattggaatctattcatttacaattgttcatgaaacgtggacattccccacattctatttttatgcacatgggataatatctaataactacccaactactctttatctttatttataaacggttatgctgactaagaaggttgtttctcgctagatgtgagttatccttcctaccatctttataggaaaagatgttaagtataaatttacttttccttactgtattcttcatattgtaatgatactagcagggtggctactttgtcatgtaaagggcaagatggatgaatgtagttatttcttccatgcacaaatatgtgggtcaatgagttgcaagcttttactcccaagtatgtgggttaatgagctacgagctctttgatgtctcatcttgtgcgctcttattatatattatctttatcctgagatggacgcattatctcattaattacatctgttaatagttattattcttatctcgcatatgcttatgtggtcagcaagtttgaatatttctattcagttttaattaattgaaataagttatttaaattgcatttaataatgtaatttaattataatattctttgacctgattcatattccttttgtaatacacgtgtcaacttctggtgaatagctaaatttctattcatattttttttttgaataatgtgaaaaaaggtttttcccggttcctgctcttgcagctgatttagctgatgccatggctaaaacaagatccaagaatcttggaaaacctaaatctgcaacgaaactctcaaagaaagtaggaaggaaggaggttactgaggcggtacaggatggttcgatggaaagaattgctgaaatagaagccctggagctttctcatgaggatgcggcgagagacgatgaccctgctccaatcgatatattccaacctctctcaccaaaatcgtctctggatgcgattaagaggcaggaggatgttcgaaatgactttgcacacttcattcaagcaaacaaccaatgcaacagtgatattgcagctggtaagaaatcgattcctcctattctgaggtctaattctattgttcgaaacctagagaattcttttaagcatgttaatcagaatgtgaacaaagtgagaattacaatggatgacattgaagatgaaattcatttttggaaatcatccatagtatgttatgtgttaggggtgaatcccccactccatgttttggatggatttgtgcacaggatttggcaggggaaagttgatcgagtgaaaatgctgtcttatggcatctttattattcgatttcactctcttgaggacagggatcaggtcttaaatggtgggtacattttttcaatagaagaccggtgattatgaaaccttgggacccaaatgaaaactataaaaaagaagatgttcaaaaggtaccagtttgggtacagctggaggaattggaattgaagtattggggtcagaaatcactcttcaagattgtagctcaagttggaaacccgattatggtggatagtgtaactagggaaagagagagacagaattaccctagaattttagttgaggttcaaatggaccaaaatctgccagatctattggagtttgagaatgagtttggcatgaacacttcggtagggattaaatacgaatggaagcctatctcttatacacattgttcaggtgttgggcatgcggctgcagagtgtaaaaagaatagcaatgggaagcagaagtggattgttaagagttacaaaagacaacaacctcaagtggatgaggaaggttttactaaagtgcaaagcaagaagaatagtgttagtcgagagtctacatggactaaagatgctgatgctggtgtgactattaacactgaagtgggaaatatgttccaggtgcttgaggaagaggaattggttactgatgcaaatgttcatgaacaagctgatgttttgtgcaagagaggagggggggagatccctctctgtctaatggataaattgttagcctggaatgttcggggagccaacagtcaacataagcaacaaatgataaagcaatttatcaattctcagaaagttgattttgtaggtctccttgaaataagagttaaggcttcgaaacttggagccttatacttgaatgtgtttgtaaattggtgtttttcttccaatatagcatggcatgcaggtggtaagaatgtcatcgcttggaatcctgatcgatttactgttgacatccttaaatgcactagtcaactaatgcatttaaggctgacaacaactgaaggatttaatagtctcttgactgtggtttatgcatcaaacaatagaactgaaagaagagtcttatggaaggatttatgtgagctgggcatcgggttaaaactcatccggacacagaattcttgcaatgtgtcaatacttgacaaatggaagatgtcaaagcaagtgggaatttctttacttggtcaaacaagcaacatggggaagatagaattttttttcaaagatcgatagaattatggccaatcaatcatggatcaataagtatgatcttgctgaagcggtattcctcaatgaaggtttattcgaccacacaccagcaattttaactctttatcctaatgtggttagtgggaagaagccttttaaatacttcaaaatgtggaaatcacatctgaagtatgagtctgaactaagggaagtgtggggacagccaggaggaggatcaaaaatgttccaagtagtgtataagatgaaacattttaaaatgaggcttaaagagatcaacaaggagggtttctcagatatacaagcctcggttataatagctaaggcagagttggaagtgctacaaagtcagattcagttgcatcccatggatagtgctttacatatataggagaaaaaagctcgggaaaagctgacccgaatacaaggcgattatacttccttcttgcaacagaaatctaaggctgattggattcagcaaggtgactgtaatacaacccttttccatgcttgcattaagcaaaggcagagacaaaaccgtatcctctccattgaaagattggatggtagcagagttcatgaaccagagctaatcacggaggcattcttggagtactataaagggttgcttgggtcaaaaatggagcagagaaggaaagtagatcctagaataatggccaggggtccagtactatcaaaggagcatataaaaggccttactcaaagatttactactgaggaagtgaagaaggcagccttcagcatacctggaaataaatcacccggaccagatgggttctcaagtagcttcttccaagataattgggagctcattggagaagatatcagtggtgcagtgatagcatttttggaatcaggtaacattcttaaagagataaactctacgatcattactctggttcctaaatgcaaatatcccatctctgttaaagattttaggccaattgcttgttgcaatgttatttataagattgcaacaaagctcttgagctctagaatcagtaacattcttcctgaaataatttcccagtcacaagggggatttattaaaggaagattcataggacataatatcatgatttgccaagatttggtgagacactactgcaggatagccaataagctaagttgtatgattaaacttgacctccaaaaagcctatgacacagttgagtgggatttcctggaggaggttctgattgggctcaacttccccaacacatttatccaactcataatgaattgtgtaaccactccaaagttctctcttacgttaaatgggaccttgcatggtttctttgaatctaggagaggacttatacaaggagacctcatgtctcccatgttgtttgtactgggtatggaatacttttctagattaatggggaagattggagagaaggaagatttccactatcatgacagatgttcgagcctcaagttaaatcatttggcttttgcagatgatgttctatcattcaatcatggtgacttcaagagtgtactctacatgttacaagccttaaagctcttttcagtaacatcaggtttgcaacccaatgccactaaaactgctatatactgttgtaatatgcagcatgaatatgtggacaggatcttacaactttcaggctttcagagacatgagcttcctttcacatatttgggaattccaatttgtgctaagaagatatccaggaaagaaagtgagattctggttgagaaaatgacatcaagaatcagaacctggagttcaaggaacctctcttttgctgggagaacaactctcattaattcagtttggattaccatacaagcgtatgggagtcaaatcataatcatgcctaaaagaattctgaattacattgaggctatctgtagaaatttcttatggaaaggccaagcgatgtttattggtgagaaacttaataggactgacagttagaccaaggtgattctgaagatgactacctttaatcgcaacaaacacttgatgttgccggggaggtaattgtgttcatctaacggactgagagagggagtgagagaaagtaacaagagaagattttggaagattaaggacacctttattcggagtgactacttgagacgaaccttcattggcaaccatggacgaaagctctaagaagatgagaaaatagaggaaagaagaatgaaaagaaagagacaagctctgaaaccatgtaaagattaaagaatgaaactaaagaaatgaattccaatcagtttgataagtaagaagcttagagtatatatacacaagttgaagcagaaagccagctaaaccagagaagctaaaaacaatttcaattctgttacaaagagatgaacataactaattaataacagaatataaaactgttggaaaacaatctaagcttctcttaacatgtttaaccccttttttttgtggtagtaccccttttacttcacttttgttggcaaatttgatgcgtaccagttaatttttactattaagtgataattggaaagactactgtgtaaacctatgtatatgtgacagtaaaattccaaaggcaatgaaaatatgccagtatacacaaatgtacacactgataatttagttgatattaacggtgatatttaaccgacacctcaaatttataaagaaaagtaaaattaagggagttttacacaaaaaaaaattagaggttaagtatataaaattaaaatataaaaaaaatttgctgccaataacatatatttataggtacactatagaaaattttgagtttttatgcttaatttttctatctaattaaaaaaaatctctcatttttatatcatatgggataagattgttctatcggtaaaaaa

SEQ ID NO: 15461 - DNA, 3724 bp, Cannabis sativa
atcacagaaaccatttcagtcacgttctgttctcttccttcatttgtttcttttcatccgatcttttcccacttttattttaaccaattaagaattattactattatttacacccaagaaaagaaaaaattcaaagtcaaaagagaaagaaaccgatttgatgattgatataattttatttcagtgtgtttattttcaaactttctctctttctctcacaagtttctatcacagtcatgagtcttctggttgtaccgactcgtctttatctggtctaaagctttgcatcagtttctcttctttcgcgccattattatatttttttataattaaattcttctcacaactttatttattattaccactttaacttatttttctaaatccccacaaaccgcgttttccaatgactttcctcactcctcactctttatttcctttttcttttatttttctttaccaaaactaaaatcgatcaaaatcagatgtctctcactttttcatttcttccaatctttatataaattttattttaatttctctctattcaaagatcaaaaaacttaaattaagtaaaataaaatggctgaaaatggcgaagaaaaatggttagctgtggcgcggcacatagccaagacgctgggccggaacgacaccatggccgacgatattttgcagatattttccaacttcgacggaaggttttctcgcgagaaattgtctgagaagatcggcgatgacgattccagtgcctgcgccgcactcgaacacgttatcaagtctcttgagcgccagatctctcagtacgtcgctgccgaccatcccatctggctcgactcagccgactcctctgcgtttctcgaagctgtggacgagctcatcgctaccgttaaggattggagtcccatgggtggggacaagaccattgccgcgtgtcttttacgcgctgatgatctggtccagcaggctatgtttaggattgaggatgagtttaggtcgctcatggaacgcggcggtgagtcgctcgagttgagccgtgggtacgggaacggtgagtcagccgggaacttgtcgtgtgattcggaggacgaagaggaagatgatacggacgtgggtgttaatggggttgaagaccagattcctactgccaggccgattggagactatgatatcgttattgacgcgctgccttcgggtataattaacgatctccaggagatggcgaagcggatggtggcggctgggtttgggaaagaatgttcgcatgtgtacagcagttgtcggagagagttcctcgaagagagtctatctaggttagggttaaagaagttgagcattgaagatgttcacaagatgccgtggcaggacctcgaggatgaaattgaacggtggataaaggctgcaaacgtttcgcttcggattctttatccaagcgagcgacgtttgtgtgatcgagtcttcgccggattttcgtctgccgctgacctctcattcatggaggtttgccggggatccacgattcaactactgaacttcgcggacgcagtagcaattggatctcgatcacctgagcgactcttcaaaattctagacgtgttcgagacgttgagagacttactgcctgagttcgagtctgtgttctctgatcagtactgtttgtttctcagaaacgaggcggtcacaatctggaagaggttaggggaagcaattagaggaattttcatggaattggagaatttgataagtcgtgacccagcaaaagttcccgttcccggcggcggccttcaccctattactcgctacgtgatgaattatctccgtgccgcgtgtcgatcgcgccagtctctcgagcaagtgttcgaggagaacgcagcggcgatgccaccgttgtcgaagctggaagaccgagcttcatcatcgtcactttcagtccaaatggcctggattatggagcttctggagagcaatctagaagccaagtcgaagatttacaaggaccctgctttatgctccgtgtttatgatgaacaacggaagatacattgttcagaaggtgagagatagtgaattgggttcacttttaggcgacgattggattcgaaaacacactgctaaagttcggcaattccatacgaattaccagcgaagctcatggaataaggttttggggttgcttaagatggatccttcagtagcgcctaatgtggctgcaaggtccatgaaagaaaagcttaagttatttaaccagaactttgaggagatttgtaagaaccaatatacatggatcattttcgacgagcagttaaaagaggagttgaaaatttcaatcaataaacttctgttaccaccttaccaaagcttcattggaaggtttcagaatgttcctgaacttggtagaaacgcagagaaacatattaagtatgatgtcgaagatatagaaggacgaattaatgaattattcagaggaaatggaggatcaaacggtggtggccggaagtaagaggtaataattttacttctggtagtttgtatgtgtaattaaaggtcaatgtttacaaacttcttcccccttttgtatcttgttagatgagatatagcaaagtatttttcttttttctttttgggagtgaaaatcatagatttggatgatagttcggttgaaaccataggaatcatttttgaagctagtatgttttgagggaatgtttattaacaagaaattttctgtacaattaatgggtactgctctatgtagcaaaaaatattggattggaattagttacgagttctactgtttggtatgccaaatgcatcattagtagcttttctggttgtagtagtagcaaggagtgggactagctgttttctctagtaaatgattatgttagaagatcaagtgagctacaatgaatgaaaaatgtctatagagtaagaaatctcgatggtgagactatgctttagaagagaagcttcttgtacaaagtttactgctgaattaagatttcaaatcctggggtttattcacaaggtttatttttgataacagagaagaagaaaaagagcttttatttctttttgttcccaagtcatttctgttttggagagtaaaattaagatagctcgagtaaaaaaggtgttggactcttgtctcaattgagttaataacatgtgaacctactcttttcttaacaattgaatttcttaatgataatgcttccagagaccctgttccactgtgcatatcctattccacttccaccagaattttttcattattgaatattttgctatagtacaccatatggtgcctaacactacttgcaccgtaatattgaaattaactgagagaaggctgttgtagtgaatcaacaccagaatgaacacaaatgtagcagctgttatgttaacaaatggtttgcacttaaaaaaataatctcacagaaacgattaggaagtaaacgttgtgcaaactaatacgaaataatttcctcaagttaagtaaatcatttttatatgtggtgtatgctatgtagatggtgcccctcgaagattactattcatcttcttaagaaaaagaaaaaagaaaaaagaaaaaaaggagaaaggataaagtgatgactattcctctggtgtctttttaggtttaaagctttgatcttgagagggctgggtcccaatgaaaggttgagagaatcgatgtgttgcatcagtttgactcgactgat

SEQ ID NO: 15462 - DNA, 9954 bp, Cannabis sativa
ttttttgtttttttttttaaaaagtgaaagagggcagaatgagggtgttaaaataagctaaagataaattggtatcaaattatttgatttttttttttttaaatacatgctaaagtcttaagcatatttgatgacactattgataagagcaattatagcgattgtaaaactcctgaattaatgacaattgaatgcttgagtgctatttttgttgcatggtgtgtgttcacatcttttgtgttgatacctcatgttttgcttaatattgtgaggtccctttttttgataccgtgagatctcttttagtgaagtccttcacacgaggaacttagaactttcagttgtgcttattttttcagcattgctatttagatactagtgttacctatcactttctagaggtagcgtctaataattagtaagtaatatttcttaagagttttttatattaaattatatgagacttgatgtttaattgcatcaatagcgacgtgacaacgagaaatgtgctaaatactattaatgtcttttatcattcttttaatattacaattggttgtattccgagttccaaactctacttttaatatcataattgatttaattattgcataacattaattatgtgacaccctcctaaaaaaagtgaagtagtcataggcatattctagtgatttcacattctaaatagagcgcagagcactaacttcggtcgctaatacatttaccatgcttactagctcttactattgttgcctctgctactgcacatgttattcgcaaagaaaaggcaacgagtgattcttcgcttagtagagcggtgtaagattatgagacaatcaaggaaagcgagatcgtacttatttttcgagacctgttgggacatacggttcttgcgaaagaaatagttggtgagttgtgtgataggaaaccttcccgcacaattcgaaaagcactgaattagaatgagagattcaccaccacatcattgcatgcaaggggagcttgctcgattcgcaaattggcttgacttgtaattcacttttgactctattttcgataagtcgaccatagtgttttccttttttgttctcaaacccttggtaatggatccaatatcctaggttaggcatgtaaggaagattctcccattttgttaattggatttcattaggtggttctgactatccttcttgtaccaatttttctaccattcttcattcatccatttaggcccgactaggaacacgtggatccagggaacttggctcgagaacaacttcttacttgtaggggctaatcaagcaaggtaaagagaagagatcccaagtttgaaagggctggcaaaacaggttagacacgataatatgactcgaaactcgcacaagagttagcgagttttgatttgccttaaatgggttcgggttgactcgtttatcccatttaataaatgggtcgtgttcatattaacacgactaacacaaaactcacttattaatgatctatttcaagttattttagtactttaacaggtcataaaatatgttaaatacttcataaatatattattagttgacatatttaaacaaaatatgcttataaacaggttacagaggtcttgtcgcgtcaaccagtttataaacgagtcgtgtttggatttcattttctaacacgattattaaatgaatcatattcgaatcgagcatatacctaatatacctccacacggtatgaatacgaacccgcaaacacgaattctcacccctattcgaatcccctcccccaatataaaaaaaaaaaagtgaaaaaaagtacctcatatgtcgtggttacacctccactatgctccagctccatagtcccataaaaccaacaacacaacagtcttaaatattattattattatttatttatttattaaaaaaaaagacaaaaatacaaaaaaaaaaaaaaagaaaagaaaaaatggcgacctcttctacgtcgtcggctccgttttcttgactctctgtacttttccactctatctctctctctctctctacaaacacaaaaaccagagagcgactgcctctagggcttcagccagcagagaagatgggagtcgctaccagacagctcaaggctatgcttcgcaagaactggcttctcaaaattcgtcacccttatattaccgctgctgaggtttttctttctttttttactttctctttccattttcggccttttgagattataattttcaatttttgatgatgatgatgatgttgttattgatttactgatcgttttgcttgttttgttgtattgagtttggaagttgatggagtttttttttttttttggaattttgagaaatttgacaatgttgaatattcattttttatgtatggcagattttgcttcctacagtggttatgttgttgttaatagcagtaaggactcgagttgatacacgaattcacccagctcaaccgtaagtctccaccattatttgctaattttttttttctgtcttggcttttaatagtttctttgttttgtctttcgtcacttttttttaggtagatgagagaacaatagataaatttgcaataaagaaggaaacaaaagaaagttcttatgctgtttatatcatcaatttgtgttactagtttttttttttttttttttttaattactaataaataattgtagtattattttattttcatttcttttcttgatgggggtaagaactcagtgattcctttcgctgttggttgtgcttggaattactgtatattgatctttatttttaggaaaacttggaagacctcttatttctagataaaagtttgtttggagtagatggcaatacgctacgaaatcctatgggttgtaatggtgtttacaatgtacaataaactagttttgttttgtgttaaaaggaaaaggaaaaaagaagaattattttgcgtaatatagattaaacatggcaaaaaactgaacaaaagtggcttgtgtttgtgttaaatagcattcatcatcttctgctagaaattctgataagcttcacttaactgaactaggtatatacagaaagatatgtttgtggaagtaggcaaaggagcgtctcctaattttgaacaacttctagaactactattgagtaaaggagagtatttggcttttgcacccgatacagagaagacaaagacaatgattaacataatgtcgataaaatttccccttttacaggtaaaattctgtatatttaccgtaatgttgttattattttcttttgttgcaatacttcgtttttcgttgatgtcaacatatctatgcgtaatgcatgcaaacatctcataagtgttctgacaatgtggcttttacaatcttatatttgatttatggttttgtcatattcaaacaagctaaatgagtttgtactatatttttcaaaaattatttttattttttgggcgatagcaaatgtgttctacatgtatttactagaaatgcattttatacttccagctagttagcagagtctacaaagatgaagaggagctggaaacctatattcgttcggataactacgccatctgcagtcaaataaggtaattaatgatttaaatcaaatgtacagaattatgttttggttacaagttaccagagtgttttgtgttgttgtcagttctatatgtgttcttgcttgaccttgtacattaaagaatgtgcgtttgtttttacatgagatttacatgtatagatgcattggatagaatttgtcatatgattatttcttttacaagaaaaactattgattatctccatggtcaagttttatgttctgttttgatttgctcaactgctttaagccagctgtgttacttgtgtaagctatgatctacaagattacaattatattgtatcattcctgatcattttttaggtttactagtatgtatttcctacatgtaaatctgtgacaaagttctgattaattacacgtgcagtatggcgatcctcttactgacactagtctctttctatgagagttgcattatgctatcatgctttgggattcactaactccagtagttttctttgtctaggaattgttcaaaccctaaaatcaaaggagcggtggtattccatgatcaaggtcctcagttgtttgattatagtatacgtctcaatcacacgtgggctttcaagggatttcctgatattagatccattatggacacaaatggtccttatgttaatgacttggaactgggcgttaatcctgtgccgatattgcagtatagcttcagtggtttcttgactgtatgtttcctgtcctcacatttttgtttttggtttacttatgcatgtcttttttttttttcctgcctgtattcaatttcttctttatagtgcttccgccatattattgtgggattatgtatagagtcccctttgcagattatctgcaattaaattgatactggttcagaattcgtaatagcattgcacattgtgttaattagatcagttatagaaatttttgctctttcttatccatctctctagctgaagctttcaagctacaagcataaaattaagtgatgaaaaaattgttgacattgggaaagaactaacatatcctattttaacttattctttacactgtatgcaattctataatgagaaaaaagttgatacatcttctctctggaaagattcaactgttactagagatattgaaagcagcaatgttctgctaaaaatattttaaggtttgcctggtgcactgcagttatacccagtgatctgtactaaatgttacctaattatatcagtgatcctataatcatgtactttggtgaatacctgctttccatgtgccctgttttctgtttatcagtctcacataatacatgtcttactactgcagctccagcagatactggattcctttataatttttgctgcacaacaatctgacattggaaatgttgaaccttcttatatccacccctttggggaatcttcatcccttaaagggccatttatgcaatttagcccttctaacataagaatagctccctttcccacccgggaatacactgatgatgagttccagtcaatcgtcaagaaggtcatgggtgtattgtatgtatcttgttgagctcaatatgcataaactgtccgttcttaaatactatttttgtagtcttcataggtatgtttttacaagcacaagctatacttgattattctgtatcctgaatgtgcaggtatcttctgggatttctatacccaatctctcgtctaatcagctatacggtatttgagaaggtttgttagtgattaaaatcagcttaagtgtactaaacaatggtttttttttttggtgtattaaacaatgtttactatagccatcaatcataaaaagtaaaagaaaaaaaatccactatgtgcacttcattttctttcctgaagttattgaacttgttatatttcaggagcagaagataaaagaaggtctctacatgatgggactaaaagatgaaatattctacctttcttggtttattgtgtattctttgcaggtagatctgtcatattgattgattactgttttattttggtattctctctcttgctatatatatatgtgtgtgtgtgtgtgtgtgtataggaaacaaagattaatactattcaaaatgaataacacaaaaagggaacggagtgtccccctcactttctttctctttatccagatgtttttctatgatttgatagtttgatttcctctgcagtttgcagtttcgtctgcaattattgtggtttgcacaatgggcagccttttcaaatatagcgacaaaacagttgttttcacatacttctttctgtttggactaagtgcaataacactatcatttttgatctctacatttttttcacgagccaaaaccgccgttgccgttggaaccctttcttttttaggtggcttttttccatattattctgttgatgaccaagctgtttcaatgtaagtactctgctctgagctagtttgcgattcactattcttttcccctttcgagttgcagtttatagggtgcaatggggctctaacatttgtttctcaggatattaaaggttgtatcttctctgctttcacctacggcctttgctcttggttcggttaacattgctgattatgagcgtgctcatgtgggacttcgttggagcaacatgtggcgagtatgttccaaaactaaaatgttttctattataattaattaattattgttgcacctaattttttgttggtgtctgtagccatcttctggagtcaacttttcagtctgccttttgatgatgctggtcgacacattgctgtacggtgcaatcggtctttacttggataaggtatatcttatgatgcttgactcttttctattatagtgctgagttttgtgctgaaatttctgtcagaaaatgttatttagttattgaattttttttgttgattatgcttgatatttatatctagatttggcacgcatgccagaatatatttgtcatgaaagagtacagatactataaatgagtaatattggatcaaaggttactgtgtttcgagtctttcaggatagatacttgcttctagagtatagatactataaatgagtaatattggatcaaaggttactgtgtttcgagactttcagaatagatacttgcttctagtgtcttttacttttttctttcttgattctaggattccttctctctcatgtgttatgtacctcattttttgaacattgaacttttcttttcttgtatacacatatttttatataattgtgctattcaaagaaatgtggttttgttctcctttaaaatagagcttggtatatatgatggttaacccaattgatattagccgcaaactgaagttcataaggtaaattttaatttcatttatatttctgatatcaatttgtatctacttgtgtttgtttgatcaggtccttcccagagagaatggaattcgttacccatggaacttcattttcaagaagactttttggaagaagacaaatatgagcattgattacgcttccattcttgacgctagtataaatggaaaagcttcagggaatttccatggtaaagataatttaactccatctgtggaagcaattagcttggacatgaaacaacaagagcttgatggcaggtatatgcttaactatttgaatgctgtgctggtaaactctgaccaaagaatggttttcttcctcacatcttttatttacccctagatgcatccaaataaggaatctgcgcaaggtatatgacactaaaaaagggaagtgttgtgctgttaactcattacaactcaacttgtatgaaaatcagattcttgctcttctaggtgagtgtattcttatttggcagtcaacagtattatgttaattatgtattaatttgttagtttggtccaaaagaagaaaatgctataagctacaagaaacttgaagaatgaagtttttttctccctttcccacttttaataaaacctctactttcctataagaataattgtatcttgatgcttttccaacaaaaacaataataattgtatcttgatatattactttttttcgatttagtgattttgaattatgggggtgattttgaattatttattatgaaggacacaatggggctggtaaaagtacaacaatttcgatgcttgttggtcttattccacctacttcaggggatgctttggtgtttgggaagaatataatatcagaaatggtaagctatgcttttcttgctctattttttttcgagtgatgtttctgtatagtctgtgattatgataatttctcattagttcctttccccccataatatgtttagttagtatccatgtgtgcaatcttgcttcttcttcttcttcttctttttttctcttcaggggagaaatatccaaagtacttaccatattaaatgacatactttagtggcgtaacagcttctataagattgatttaatagggcaggatatcttatatttgcttgctttttcgtggagtgttgacattgataagttggttgtattgagaatttttatactatgataggcttttaaaggtttaggattcaaaatatatgttgacaagagtctattttgtcatatcttccttactttcttattctatttggttaaatgtattataatttttttgttataataaacttaaaaatctgttgtgcaggacgagataagaaaggtattgggtgtgtgtcctcaaaatgatatccttttcccagaattaactgtaagttagaagtgtgattcatttgatagaacttgcttttgactataaggtgacctctcaatatagtttggataattccgttcacaggtgagggaacatttagaaatatttgccaaattgaaaggtgttgaggaggattctacagaaagagttgttactgatatggttgatcaagtaagctactctcaaattattctgtacttactttaatataaaaaaaaatagaaaataaaaagtaaagctcctctctagtgtcttgcctacattttctgctgtactagtttgtttggctaaattagtgtgagaggcactatttccagctagtttcgcttgttgttgaacttacatcaacttcttgcatgctctactttgattatgatttttttcccctatcagtttagagtgtctgtccaagaaatgtgattttgtgccctctttagctcaagtgctttaatggtctctcatgttagcctttgaattcaaagactctgtataccatggcatttgcaaagtccaaatttattaagatgataattttatacatgatgaagaggactaaaatctcacattatatagagatgtgaatgattaggggtttataagaatttgggttttcggtctataacaatctttttattatatggtcaggtggggctggctgacaaaattaacactgttgtgaaggctctttctggaggtatgaagaggaaattatctcttggtattgcgctgatagggaatagtaaggttgtttgaaatctgcagatgcatttcttcttctttctttttctttttttgatgtgaaataatgtactggaatgatttcttgcatcttttacaggttataattcttgatgaacctaccagtgggatggatccgtactcgatgcgtttgacatggcaattaataaagaaaataaagaagggcaggataattttgctaacaactcattcaatggatgaggctgaggaacttggtgatcggattgctatcatggctaacggttccttaaaatgctgtggaaggtacctgctatgctattttcttcactccctactctcattgaaccacacttatttattttaacacaatttttgcaaacaatataataatatatgtagattcttttggattatattctggtgattacaatatgctgttgaacagtcaagactattatgccttaagctacaggaacgtgtcacatcatgtcattggatacgttatcttctgattctgatttagactttagctgtaccccttttcattgaggtttataccatcccttatattccttctttagttttttcggataagaaacaaggttgaaatataaaaaatggtagagtatcatctgtattacagcataggcagtagcaaaaagtctactaaatcccaagaattgtataagatataatgaaaacatcttcccagaaaactcctagaaataccaatcggaaagaagcatagcaaatgagtatgcccgaaaatccataatattgaggatccaaatagcaactcaacacttgattttttccatgtaacacccacatcctcttctacattaaaattcttgatacctggttcttgcaatatcctctctctctctctctc

SEQ ID NO: 15463 - DNA, 13100 bp, Cannabis sativa
  modified_base (13058)..(13062): a, c, t, g, unknown or other
tgtgactgacttgtttgtgcctgtaattgacttgtttgagcctgtgctgaagtctgagtatcagaagctatgcccaaaactaccaatatagacctgataagaagatagaaaaaaaagaatataactgaaataatctaagagaaccatttacaggccacaagttctccccgtctgattccataaaaaaaaaaaaaagagaaggtaatttaatgaacctcggaagtgatgatcgaatatccatttgactagcatgtgcagccaatggggctctcaaagccggggtccgattcaatgcattttcaagttgtggtggaggtagctgccagacaaaaaaactttcagcatcttcaaagttcaagacacgagtttcactttgaaatgtgctagtgcactaaactctcctcctttgaggaagaggatgttggttaatttcacaaaaaaaaaatgatttttaatcaaatttaaccaaaacataacaataaaacaggataaaataaatagttacactatagatgagagtttttttttcaacgtaattcataaaacataaaaagcacgataagcctctgaagatacctgaagcaacacaccaaaagactgaggtttcgtcaagaatgcacacttcaagaaacccacccacagcttggggtatttccaaatctgcaaaagcttatattgtaaaaaagatgaagaaagcctaaatattaaatgtgcagtaattaaattacttggcgtaaaatcttagtacctgtttgcttacaagtcgagataggatctccataacaaaatctacctgcacaagccaaaaaccatgagaacaagttaaaaataagaatagcaacaacaagggcatttaaaaacccctctgttgatcccctgagagaaggaaaaaaattgtcctgttaaaaaccactcatgctcttagactcttagttactggcttgttatacaccaataacagagttgactcccgtgttcgacagtaaatgggaaaaagaacttgctgcttcttaaattcttaccagtgcaggaaaagcccctatggcttgtaacactgtacgcatgaacaagacaggaagaggaatctgctcaacctataaaaggacgaaagttggtcattgtaaatttagcttgaacactttggcaacaaaggataattccagtgatacaaaccaattgattcaacactttggcaagaacttgttgggtgaatgtttgtcgttgctcgaaacaagcgttgcaagcatctgtgacctgtgctacaaaatatcatcaattatcccacatctcgctttgatttggtaagcttttaaaacagagggggattggagtttagaaaacatgccttcttcagagggatcccatctctttcaggatcaatcccgtgtatagcaattaagacctcagcaggagcaagcagtggaccagaatgtggtgagccctgtgaaagaatgataagttaatatagacagaaatcaactaacaataaaatgaataatacaaagtggatagtaggagaccctcggtacaaaaaaactgaatacttcttaatttactctgttccttagagtttattttattaaaatcagagaatcttatcctcaacatagcttatctaagctggttaaatccaaagatgataacaggggtactaagtatgattgtacagtgacaagaatagatttgatcatttatataaaatctgtgttgcataaaaattaggaattgtgccaagaatgcatcacaattcctcccttctcatgtggggattcctcccttctcatgtggggccaataaatacatgggaactgtactaaaaacctccaattgatctatatgtatcctaaatattggtccttacaattctacaaagaacaaaaaaatgataaaaggacacagtttttcaaggcccaataattttacaccaagtaggattctctaagaagttccatcaggatgataagtatttttcagaaaatggatatatagatacctgtagtatgcgaatgagagctgtttgaaacttttctggtggaagtttcacaactcgggaaaagttgagcaaaacctgccacaaagctaattaaatcagtaaaagaacagtacaaacataagacggacaacaaacaattctttcattggaaagcattcccaatatgctaaggcattcacaactataagaaagagagtccaatcagaatcttctgacaataaggatggcattcatagttattcaacaaaaaagggtgagatgaattgagcacggacaaataaatattggaagactgaacatgtatttaaaaaaaaacaaaccatatcgcatcaattgtatagacaagtagctttataaaatcttaattgtgtaaataaagtttattaaaccttttactctcatacatcagttaactcagtgaaaatcacgtaataatagttctatgccattcttactttttttttttctaaaaataaccttggaaagaagagccaagtgttaaaaacataatagtgcagctaggttcttaatatccatagactgtactaatgtcaacacattgttttagtatatttcttatataaacacaaaaaaactggtaaacctttaaagcaaccaaccaataaccatattttagaattataatatatacagactgggaaagaaaaaaataaataaatagggaaaaaagaagaaggaaaaacctcatctttagaaagaaagggtaatattggaataagaatctctatatcctgcaaaaattacaatcaaacataatatcatcatatttttcacaagacatacattaactactatcttatttttctatgattaacaaagtaattttgaataatctacctttagttttgaattatatagcttcttaattgtatttatcaattcttgagaaggaactgctccatctgtcagagtatgcaaaacctgcattgtccaaaagaaaaagtggaccaaattacaaacatctccttgaaaggtgtttgaccaaattcagtaacagaaaaacaaacaaaacctgcactaaaaggttctcgcttccaacgggaggatccgaaataatttctagaagtgctggtgatgggcccatagtgcggactagtattggaatatgacgatcaactgcctgaatcaaatagtgaatcagaagcaggcccatagaggaaaacaaacatcaagtaatttcaagagatgacagaaactatatagggacagccaaaacatagttattatacctgcttaactgccgcagatgcacttctataaacaacaaaaatttgcccgaagagggaatgtttctgccaagtaaatcataaaaattacatgtctaattctgtttacaatgcgataaaagaaaaatttgtgaaattgagagataaatatcacatcaaaattgatgaaatacctttgtacacaaagcaaaatatagtgacatacaccgttgggcttcagagaccataagagatgaagcaccttgggaagtggaggattgatgagtatcagagggcatatctttactgttggtactcattgattgaagttcatttaaaggcctttctggatcaggatcctgaaaaagtaggatttaaagatcaaacaaaaatctagcatgcatatattatctaactgttgaagttaagtgaaacagtcagttcagaaaggagtattacctttctgcgttcagtaattggtccttcagcatccaatttatctgaggaatcactatttattacagaaagcagcatttctctagcaaaatcttctatgctttgagcaatggatgacacaggataaagcttgttggctacctgtcaaatgaaaaaatactaatatagttaacttaaaaacaataaaaataagttagataaacaattacattacttgcaagaagcaaataaagtaccagtcgaatagccttcatacgaacttcctccagatgatgaactgcactcttttatatggtaaaagaaaatgtcaattaataggagcaaaatggaaaaaatatgttgcttatcataagttcttccaataaaaattgcacggaaaagaaagaacaaaacaaaattatagtattatcatataaaaaattgtatattgaacataatgagcctgacaatgtcacaactgacgatgttaaacatgcataaatttgaaccttagaaacaaagcaataacaggaaaagagttgttttcagtaactcctgctagaaacattaaaaggatacgaaaacaccatatacaaacataattctcattataagaaacaaatttagattttcactcgaggggtttgagaaatgtaagacacccagatgtaatgaagtaaaagaagagaaaaacctttaaagcaattttcaagcaggcatctctgaaagggggccttagtaaaatcaagctccatactgtgctcaagccttgagtcactcgatcaccactttgaatttctttttcagtcttgtccaagatttctggcgaacacaagcactccaataactttaaaactgtatttggtaaatacggaacatcaccaagcaatctgcttaatgatttgtcagagggtggaaatgaatctctaagtgtttcgacctgcataaaaataaaaactataaattaatattttgaaagaaatgcaaagttgtcttttgaaaggaccaacaaaatacataccacagtaaaaaggaacatttcgtatacagaagtagcagttgtagacgatacaaagtcacggtcctcttctgcttcaccaaataacctgtacaggacacgcagtgtcaactcgtgtccctgaagaaattcactaattacagtcagctggacagataatagaaattaataataaaatagcacataactctgagaaccattaactctacagcaaccaacaacgcacttcaaagcaatcatattgtagaaagtttgaaactaagagcaagtacacagcgattggatagttaacatttttcatctacttcattcattaatgtatctgtaagctaaaccttatatcaacttggtgtacaaagtagcacccgggatcaaaaattccatggaaaaaggttatcgtcattttcttatatcaaagaaataaaggtgcaataaccaaaaaaaaacatacaaaaccagggaatgagtgtctccattaagttacacaaggtggaaaatcatttagcaaacataagaaaacaaaaccaagagtttacttgcctcgtgatttacataatctgccaaaatatgcttctgtatcagcttccagggttctaactcagagggaaactgaaaaaatacagtaaaaatagattagaacttcacaccatgaaagtttacaagtgctacataattgattggtgaacttgattttggaggataacgaaatcaacaaaacctaagaaaacgatcatcagtgtctaactaaattatcagtatgtttgaacactagaaagaagccggcaaattttgaaggaatgactagtttgaagaagacagagaccacagaagattttcctatatcctttccacaagacatttgcttaaaataaaacagttccatagaaaagataaaaaatcattgattgacagctctacccgtaaatactagaaatatatagtctcccacaagctgtgaagataataacatcttcaagaacctagaattattacctcaattcccaagcttgcaagcaacgaagatcgaatttgtaaatctcccgcaactgataattgcttataagcctcaacaatacgattgagggctgatttctgcatatcatctttctcgtcatcagcaaggctgataacaggagctgacatttttggcaagacaaaatgatgagatagcccaactgaagttgctgttgaagaaaccaggctgttgacatctgaaacaattgctttcgggcttagctcttcagacctatctgttgacacagatggaagtacattcggtggcaatatttgactacagctagtgatttgatctaaactggcatcttctaagtcagtggagatcaatgacgaagcagctagatgtccggacaggccatcattatgagcaacagaatccaatccaggtatttcattctctagattccccaaatcattaatatcagatggaattgctaggcaacctttgcccaattcagaagaaacatcaggagcagataacccagtagaatacaatggagattcagcaccatcaacaacagcattatcggctaaacattcttcctcctcttcaggttgctgcaatcaccataaaacatagatatatgtgtcaaggtatctagaaagctaaaatgaatgaatgtaccttattttatttataatacaaatatttagaacacaggaaaaataaaaagatggacaaatgtgaaagaggttgagaagagattagaggatgagatcataccatcatatcatcggatactgcctgatgagtgtctagcagtgaagctattggtgggaaagtactggaaagtgaaagaacattagcaacaaatgatggtggatatttaacttgagaatcgctgccaattatactcatgttcagcagtggttcatcatccacttcgtttatagaatgacttggaggaagattgcgcatattgagcatcactacctcagccagcagatcagcagagatgcttgaaatgagtatctctaaagaacctactgctttttccccttgagcaaccaaggcaccaaacatggcgacaagttgatgcacaggaccagtatcactctctcctttagaagtggttggtccagttgacgaaatgtcatcctgaacaccattattattcttatcaaactctttagctgattcagccgaggcactaggtgttactcggattcgtttccctgatgaatcctcatccttagcacaattacctttaccctgtgctcctgaccttttctttccaagattgttgtgcacggagtcatatggtctaacaataggtttctcttcctgtaaatttctaagatgttatatgagggtacagaagcaagcgggtatgtataaaaataatacatatgcatgcattatgttccaggagtatgcaaaataagtaaaaaagaataaatatgagaaatcacctttgcaaggggagtatcttcttgctctgttcccagacccccattaatctcagaaacacggtgaaggacaggctctgctgatcctccaactttcatctccctcaaggcccttgctaaacgatcacgccactacacaatcaatgctatcattactaacaaatcattagatctggagaaaaaatgagtttggacaacaattggttgcttgtgaaaagatatatcaaagaagagtagagaaaataaataagaaacttatggacacaaaacaaaaaaccaaaaattaaaaaatttgaactatttgtaaaacctagtttttttcactgaaaaagaaaaaagttttgaatttcaaatggcccacaaaagtgaaagaacaattaatccataaattgcatgaaatgccaagtctaaaggcatccatatagttatgaaacatgatgaaaagccaaggcagtaaactagagaacataacttataaattcaagatggaataaaaagtaccggtgcagcacccgggtatgtacacttcaagcaggtgatgaatgcatttttcaaagcatgatgtaccccaaatatatgcactccattaacttttgagcttgtaggcttcaaaccaagtagaactggaaggatgcgtccatagaatgcaggcctcttcgttgcaattgttgaaagactgtaataatgataagttagacaaaaagataattttgcagtaaaataacaatacacaaaaaaaaaaaaaaaacaatttcaatcaaataactggaataaaaaaataagacaccagttactgattaggctgtggaggcagtgagtaatacgtgtgtcggtgttggcactgtgcagtgttggtggttatgtggctgtgttggaaagaaatgacagaacatttgatagactaacaataataacacacaagaatactgaaatcccactagaaatccttcattgaatcctcaataattacataatcaagctcttcgagaggctttctatactatttctaacccttcaagagggctttctatcctatttctaacccttcaagagggctagatctctccaacttcagttactctcaattctcattcaacctaaggaatctgccaaattcccttactctatttatagagtatagattttgccacatcagcagcctaattgcaagctaataaccattgaaaatagaatacctcaccctaagcaattaaacagctagtacaagttaaataaaactctctaagattaatcctttggtaaacaaactgaataggaggcttatcaacatttcaaaacaaggagaattctctagcttatatatgggtcatctgggtcaatcagtgtgaagaattaaaaccctatccttttttctgatgtatttaagttggggagcttttgttgttctttatttctgttttgaagcttgtttgaactggctcctgctgtttgctctattttcggttgcttatttctggttgagcttgctttggagtgcagtgtagccacttaaaatttatttgtttgtcattgtattcacaatatgtattcataaattagtattagtattgtccttatccaaatgataaacatatcacaaaatcattatggtaggaatgaaatttactgaaaccaattgtagtaaaaattaaactggttggctgccaatctatttgagggcaatcagaatcaaatgaaaatggggtatatagatttatattgcatatgacaaggaaaagagtaaatacctattaataagcacaataagtgtcgagttactgagggaattcccagaagggagcctgattttatcaagcagtaatcccaaactttgactggcctcaattgataaatccccaacattgagtacgggatgacctccacgaagccaagatatattgaattccattaggtttactgcaaggagttcatgtatgttgtatcaggaaacacgaggtttggttatacatactttactatcaaacataaagagccaaaggcaaagtccaaatgtggtgtaactgtaaccttcgtcagatggaggctctaaagagccattagggtcaggtgtgtaaagaagaatgactgtctccacaaacttcaatgctagcaatcttattcctccaccaccatgctagcaagcatgacataacaataaattaaacagtgaacaaaaccaaaaccaaatcatactatattgtaaagcttgtttcttacccgaaaagctattgaaaatattttctccttgagcttcaacacccactcccatgccgactctagtgaatcatccaattcactagaatatagaccctactaaagaaaaaagtatatcagtaccgtattcggtccaaatacaaagtcgaatttctccaaaataagtgctttcaaactcctcataaaatcaatacaaggtgaccaacactaccccttgaatgtgaatcttgcttcttcttcttttttttcatttccattttacagttatataagagcatatggtttataacagctacaaagaaccagtgagaacaatgtatgaacaatcaagaacatactaatcataacaaacaaaagaaaacaatagacagagtgatatattcacctgaattgcaactttttcaagagttcgacgaaacaaatcaattccacaagtgacagcttgtcgagcaacagctggtgtaggatcattcagaacagttatcaatacaggaacgatttcagataagaaatcgacatgcttcagtccaatttcgccaattaacctacaaagaaaaaagaaagaagaaccaataagaaaacaagaacgaagtagtaaagaatcaagaaactaacataaaagataacacaaaaagctagggtttaacgaaatttactgaatagcgaatttgcgaaccggactgaacctatcagaatgaagttcgaaaagacgaggaagaaggtgagagagcaaatcaagatcatcttcaaccaagccattcttcaattgtcggaggcgatcgagcttcgatggaatgtctgtggccaacttggccgagtccacaagacccgaaagcttttccatggagttcgccgctaccatcaccattcccaccatggccaaaaaaacgacgccgtttacttctcagtggaacaaagccatgagaagagaactgccgttttagggagaaaaggagagtttcgaaaggtttgagttagcgaggagaagagggaaaagaaagaagtaactaattttcttattagatttggtaaccaaaatcaaataagggaaaaggaaaggtcccaccgagacttgaactcgggttactggattcagagtccaatgtcctaaccactagaccatgggaccatttttgtttatataagctaattttatttatttatatgttgttacaaatttatttatcttattttgtttcttctcattagctttcaaggaagaaaaataataaaaaatatatctaatgtgcatgtgaaattttcagcagtttgttaagatgctagttattgatcatgggatttgaatgttacagaggacttctaattccaaatgcatggtatgatattggtacttcttgtaaaaatggaaaaattgaaagaatgaatgaggttatttatttgtatgagaatgtacttttatatatgaaaattgtacaaaactgaataagaattgttatttcaatttttgcacaaggtgatatggcactaggcaaggtgacatgtggaggttaatttaagacatggatggtttgttcacctttgaatgctccgtccaaaatagtttacacttatgcctaaatacctagcgaacattcagactagacgccgtgaaggacaccgtgaatttagaatcctgagagatatttttcataaatatcttcttatttttactttaataaaatctatacatttatgggatttagtttgcacagccgagagattcaagggatttcatatttgatttcccatttattcttattatttttagtaacaatgttcattatatattcgttataaatagtagaatcattctattatcaagggatccgagttcagacttttgagagagcatttacgatgctaaaatattttgtaagctttcatcaaggttgttaagaaactcactgaaccagcttcttgtgatctcgataatctttaaagtaatacaaatataaaagacggggttgaacctctataaaattttatgtgttcttattgctcataattattattttattattatgattcataatattattactttaaagactcagcgtcattggctaaaagcgatgtcaatattttagtgttttcattgagagtgtttatccagatttttaaaaaacgaattataataaaatagaactgaagaaataaataattcaaagaaagaatagaacaaatacaagatttttacgtggttggggcgttaataactcttagtctgcgagtcggtacttatgtatttaagctagaaaagcctttgggaatacaatgagtataagctcccagtttttgcctgagcaagtattgcaagagaattcaaccctttatctaaaggatttattgggtatttatagtgttatgagaattatacttaattttctatttttttttttccctctaatggggaagtttacatgaaaatatataaaattgggctgtcttcgtgaggcccagcccataggaggatagatgtgctgactaagcagattggatacgattaagttgtcaaaactgtgtcctataattgtgaaaaattaattatggattaattgcttggtctctatttaggtaattttcctttttatattgatacgatcttctgtcgtgaattgaggaacatatacttccttattttacgtgcttgaataaaaagagaaatcggactaatcttccaagaacatgctttctggtccttcggcatcacggtactggaactgctttcaggtacaggcttgtcattgacagaatctcgtctgggtaaggtcttgtctgacttgggcttggcccaaattatcttatttgggcccacgggttggctatagatgctgacctagaatctacatgtccattactggataacatttaccccctaaacttccataacgttgcgtacggtggaagcttgccctaatccatatgagtggacaggtggaggtttaaaagtaatatttttattactttctaggtattaatcgatcacggaaggtgaacttctatcttcagttgtggtaggttaacgtgacagtcatctagtggtggaagagcacgtttactgaggagttgctttctagaaaaacttttattttgacgattgttcactgtttgccatgaaatctaagaaaaacatcttcatcattgatttgcgcctcgattctagagcgcattaattgtttgacacgcttggctgttggacttcttagccattggatgtgttgtttgtgcttttggagatacaatcttgaatttttttcttcttttttacgtggaataccacctttggtgtaaatacccttgaaagacatcatttaccactttccccaatttcatatttttcattcgtctgaattcaaatttccttgagagcaaaacacagtgagaaagtcttacattgaatgaacctattcttcgaggaccttctctaaatcacttttcgcctgagaaatcgtcattttccaaatcatccacccccagtgatcaatcgtcttcagaggagtgaattggaaaatgacaactttaactctaagattaactcgctgattgccctagccaactatcttcgtgctaggtgtgctcaatttcctttaccagacccgacaaagatcaatttattatcgttgattccaccaacaagtatgcattcatttacttttttgcttttaatcacatttttgagttcactatggaatgtgggattttcatgttcttttttggctgaagttagtgttggaaattattttannnnnatctagatttactatcatgtatgttggattaacaacct

SEQ ID NO: 15464 - DNA, 10484 bp, Cannabis sativa
  modified_base (8256)..(8269): a, c, t, g, unknown or other
ttgttagtaaatctaggtcctcgtaaaatatattctaatagatgtagcactggtcaatttctcacataatgatccctaggccattactatgcaaattgagaatatgaccgtcgctagaggtatggtggacaacggagcctcatccaaaattctttttaaataaacatatgaaaagatagagctctaactcactgacctaatgccttgcaaccaagtgatgtatggcttttttggccaaggcatcgcacctgtcgggtatatcagattaccgctcatagttggagaaaatctaaccacatgaacactgatggcgcagttcatcgtgatcgacgttccctcggctttcaactctatgattggccaactggcttcaacgacctgaaggcggtgacgtctatttaccacttgtgtcttaaattcccaacaaggcactgagttacatatgtgaggggagaccaacagtctgcccatgactattacaacctgtccttatccaaggccaaaaaggagaagatacctgccagaagtccagaatatgagtcatgcaaggggcaatgaagtctagccgaaggcggggacacaaacatagatcctggctttggggatcctacaggaagctttggacctatagaagagttggaagaggtggaagttgatccctctcaccgaataagaagactgaaaatcggtaaaggtttggccctagaaatcaagttcgccttgacagaatttctaacggcacaccctgacatgttcgcatggtcacatggagatatgatcgagatggacccttccataataacccatgcactcaatattgatccaagcatccggcctgttcaacaaaagaggcagtttttggacaaggagcgtgcctaggcactcaaagatgaagtcgaacgactgatggctaatgacttaataatagaagcattccaccctcagtgagtgtccaatccagtgttggtacctaagcctaacacgaagtggagagtttacatcgacttcactaacctgaacaaagcttgtccaaaggactagttcccactgcccaaaattaaccagctggtggatgccacgcttggccatgaagtcctaagttttatggatgcatatgcaggttacaatcagataaagatgtatccacctgatcaggagcataccagcttcatgacagacctagtcctatacatatacaaagtcatgccccttgggctaaaaaacacaggggccacttatcaaaggctggtgaactttacgttcacagatctcattggcggcaacataaaggtgtatgcggacgacatgcttgtcaagtccaaaaaggcttaggggtatgtggaggacttaggcgagtgcttcaaaatccttttgtagctacaacatgaaactcaatgccctcaaatgctcttttggcgtaagctcaggaacattccttggcttcatagtcaacgtaaggggaataaaagaaaatccagaaaaagatccaagcccttttggatatgaaatttccaacaactattaaggaagtagaaagcctaactggacgctttgctgcactaagcagatttgtgtccaagtctaccggaaaatgtatacccgtcttcaacattcttagaggcaacaaaaaatttgagtggacagaggaatgtgaaaatgcattccagaagctgaagaagcaattggcccaaccgccggtgttgcctaaacctatagacaatgaagagcttggtctgtacctagcagtcacagagcacgctgttagtgctgtcctcacaagagaagaaggcggtgtacaacaccttatatacaacatcagtaaaaggctagtcaacgtagaaaatcgatacccactcatggagaaagtttgacctacagcttgctcttggctttcagaaagttgaggccctacttccaggcacacccataaaggtgtacactaatcaaccactacgataggttttgtagaaaccagaagcgtcaggctgactagtcaaatgggccataaagcttggctagttagagatcacatattaagtgttacaaaaatcgataaaagttgttacaaaaattttatagtatggcgattattaaaaaaatccaaaactatcattagatcgataagaaacaatagatactttgtaagcacaacactattagagagttattctcaacggaaactattagaatcgatcatgtatgcactaatgataatttagcagatcatttgatgaaagtactaactagagagaaggtccataaaatttcaaaaggaataagactaattcccttagaatgatgagtcacctatgatggtaacctaacctaaagactggagatcccaataattaggttcaccggatagtaaaaagttatgcagttatatgtgttgatcatgatatatttatatgagaagcatgaagttctgaagagataagaggacgagttactaaaaactcttaatgagatctatactctatgtggagtagagtaccaagctacaggagtactcttgatatactaacccatgtgaatgtagaagtggggttgcttcttatggaattgggagccaaaatttctagagagttcattatacaatgatagacgtgcatggccattaaagcacagactttttaaatacacctttgaaagattggtgtgtggtagggtgttagagatagagttcaagactttgagtcactctagtaaaatctgaatcgtattcactatgcaaatattaaaatctaaagatttctttgtttaagcacagtcttatagttttctaatattgcttgagaaaaatatttttaaactatttaagtgggggattattagaacttttgagtgaattatacaaaaataagagaagtgaagtttgtgatattacaaagagtacctaatgggatagaaacacttactcataggcgtatataaggtggaaatgtgagatttgtctttcggccctaagggtcacccacttatgtgcacatgggtgaagactcacacaccagaccattgtcatccatccaaccgtgttgtgccgagccgagctaagtcgtgcacgcttcagacaaagtcgtaaaacgtcttaaagaaagcaacataatcttgactcagcaaaaattatcattcggaaaattcgctcctattttattttccgacataacatttactttttcacctcaaaagaaattccgacagagattaccttttaaggaagcaaaaaatactcatctatttgctttggaatcccaataatactaaattaacaagttaatcggattcctataatcctaatctacttgagaatgaactcataatgtgcttatttccatttgttggcctcatgtttatcttcaaatacttgatagggaaggagcccttcccaagtggtattattgctttaaagctttgcgtctccctttcctccataacaacaaagtagatatttgttatgtgtttatttctattaacccaaagctactattgaactcatgaaatgaatcaactatacatttaacatgtagccccttttacggaaaagtacaagactgtctgcaaaataaagatttaccaactttaatggttaacacatcggatgaaaatctcaatactctatttcttcagtgttgatagagaagacgagtgaaatatttcataattaaatatgatgtatttttttttttttgctattatccagatcaataatagaaaatttaaatgaaaagtagcaaattagtactaattcataagaacaaattgataatgcacttaattaaatataccgtacatacaaactaaacatattttcccataattaataaaaacaaagctacagcctatttttgaatttatttaagttcaaaataaatccttgcaaaacaaaacaacttaaagtaggaaaataacatttttaattacagaattaaagaattttgataatggaaatttttgaaattaggaaagttaattatacaatgtaagagaagatgaggattaaagaggacaataataatgaaaatattgtatatataatgaaaaatattaatagttgtacataataggagtagtaatgttaagagtcatgggcattgtggattttttccaggcccaccatagtagaagtaagtgccccattgatcattgtagaagctctttatgttataacaattggtattctcagccaatgtggagatgcctctaaccgagctgaggctgttgtccgagtccaccacctcaaggttcctaaaatagctagctttaccaaacccatcttctgcgaagtgccccgaacccatctgtgtcgacgtgtgctcgccattcggccttgagttcaccacctcgccaccccactccaccatggtggcgtggtccgctaggtgtgtgaatagctcagccggccagtaccctactagggtattgtcaccaaatcccatccaccaatttccaagctttggatcctatgtgtattatgcagtgacaaattcagaatttttttttaagtaaatgttaaataagtatatggattatacaaaatatgttttgtagtaaatatatatagaaactaatattaaaaattagagagctgtataaatatatgtaccttccaaatcaaaatggttacatcgtattggttggtagaaaatgaagaaactggggatatggcagctccaatggctattctgctatttgtttgaataaatcctgcgcagaggagattgtagcaccctgttgcttgatacgaatccgtctgtagtttttcagcttaattaattagccaaattaacattatgataaattcttttttaatttttacaatttaaaaacgtcattccgtatttagataaaaagtaatttttttttttaagtttaaaagtctttttttaaaaaaaattaaaatttgtaacttctaacaagactttttaaaaattatatatattattattaaaataatttaattattcttaatttactaaaaaaatatattttaaaagtactttttatcaaaaaaaaatatataataattgcacaattagtaaaaataaaacagagtttatacttattttatagttctaaacaaagaaacttaatcaaagggttcaattattattatttttagtattcgaaaaaaaaaacattatattatgtagaatacattatgaagtatagttattgctaaattatcacaatcaaaatataataaactttggcaaactagaacttccaatccttaaaaaaaaataggcaggaagatattaaatagacctaataaaatttgaaataatgtcattctaccaagtatccataattacaactttatgggtataacatttataaatatgatataacaataatttaagaaatgagtttctaatttttattataggtagataacataaattaatttgatgtattagttaatatttttataattttatataaaaaagatattcaaaaaattacttattcatacttaaattaaatttgaaaatactattgaatattttatttaagaaccatattgtaatctagtgacgcatattatgcgacgacattcatcattacaatctacaaaacttgttagctaatcacttaaatcacaaaattaaatggagtacataattaatatacataatgactttctcattccgtgtattattttgctttacttttacttttgtcaggatatactttacttttaaaaaattgaaaaaaaaaaaaaaaacaatataataaatcaaggtccaagccaaggttggttttttcgttttaaatctgaaacattggagattacattcattagtagctatagatagggttgactttgacctatagagactatagtaatttgagcacacgggaacacaccacatggtaatatacccaaatgattccattctaattataaataatgaatattttgactaaataaaaatatttacgaatttcggtgcattaattaaataaaaccaataattaataaataaattaaattggggttgacaaattttataggaagatagagaaagagatctgaccgtccaataagtgaacaatctgggtctgctgtcaccataaagctccggactgacctgactagtagaataatcaaagcttaagaaaattctaatgaagatcatgtaatattaattataattaagaaataagtatatacagaataatagtatgggattatgtgcgggaagggacatggaaatggaaggagtacctgccatcctgcttctatgctgttgagatctgagccgtcgaatgatcccgaaagaacccaaatctgagagagactgaactcgttcaccatttcgattgatgggtcccacacgtttatggtcgcttttgccccgtacacttcttctgatgatcctgtgtacgctatcgcgtgctatttaccatgcaaccccaacccaaaaccaatcaaaaacaatatcatcaatctactgcatttattttaatttttattataagtattctgcttctcaaatctcaatcatataccactaatctaatgaacgttctaacctaatttttaattaatattaatcttatattttcatggtcaataataaaaaaacggtatattagggtataattctgtctattttattgatcaaaattgtatgttacaagtttgagtattcattatacattttagatgaataatgaagctcataccccgacccgaccggcaattaacatttctgtacaattacgtttgaaataagcaaaaaattaatgtatataatcagcgtcttatataaatatatattatatataaaaaaaaattactaattaaatgagccattaagatgcgattcgaaaaaagatttgatgagtatgctatggtactagtgccaatatattgaatgagatgcaaagaattagataatgaacattgaatggcaatttgcataaatataggatcattaatacccatgtttcatgtcatcatcatcatcacaaccaattaagggtattatatatatgttatggtgatgctatacatatgtatatataaataataataataatatatagtaatattgatgatggtattggagtagagctagctagtactagtagtatacctcatggccattgccactgacaacatctggagcgtcttctctacggcggcgatgcaataaagagttagtgttccgttgtttcttaccaaagtcaaacaaagactttgctcttaagacatcatgagtggtgctccggcgaatggggaccgttcctttagggcatcttcttgttccatttgtgtgccacatttgcattaacattgcacctttcacttcattactactaccactatttgatgatgatgatgatgatgatgatgatgatgatgaactccccatttcatcattttcttcccttttcttcttaaattttggcatttctggtgctactttctgttcaaaatatactacattttttaaaaaaaatacataaaaaataatgtacacccttttgttacattatatatgccaaaacattagtacctggatcttgtgattctttagtaaaggatggtctaaagctggttgttttctcttgtgaacacaatcaatgatatctccatctgggctctgcaaattcattatatatataagtattttatagaagaagaaaaaaacacatgcatacataatcacaaatttttctcaaaggacaaaagaaaaaaagaaaaacatactggtatggtgatgacaggaggcttgttaatcttgtccaagtgccttcgaatcctatcgagtctcaagctactaacttgctgtttggtggtgtagtttagagccgaaacaagtgaaaatgtttggacaaagaataaaaataataataagggtacaacataataataatacagaagaagagctctcttccttccaacaagaatacccataatataattatctcattcagtgccaataatattacagagaaaaagatacacaagatagaaacaaacaaaatttaagaaatctccattactagttaaaaaactatatatgatcagaataagaagaatctgactcttttgtttgtgttttttttttcaaccttctccaatccttgatgattttttgctaacaccaatacaaacaaaagaaaaggacttttaacaaaacccaataaactccccccctttggtatacaaacaaacactttctctctctcttttttctctgtctatagagacttaaatttctttctcttctcttctcttctctnnnnnnnnnnnnnnctctctctctctctctctatcttaatggtgaggaagaaaaggtgggtgaagagcaattaaatcccccctcttagaccttcagcatcaagatcatcattgcctgcattggtttggtttcatatttgattgaatattcaaattaaacttctctcttctcttatatatatttttttggatttggggggttgcacagtttgacaaggcaaaggaaaataaaggaaagagagtagtgaagactagtgaaggataaatcaggaaaagaagggttgaatgcattataattattattgttattataaaaataaataaaataaaaaactactcagacctacccaactgaaacacccttcttttattacactcctcttcaatgttcatatctgccaccatatacactactttctcattaattaataaccatcctacatataattaaaaatatttatttatttatttatttgtttattattttcctttcttttcaaaccccacacacacacacccttctcttcttcttcttccttttatcttcttctctttgccttaacagaaacactatatatctatacttaaatttattattattttactataacaatgtaatatatggaggcaactaatattggatttttttttcttaaaagaaaaatgaagaaaaaactaatattggaaagtaaataataaataaggcactcaattgccatactttttttgtgtgtggtgttgccacgtcgcactgactttcatttctttcttgtatatatgaatttgtgtatatgatatgtcaccgtcttcacaaacaaatacgttttcccctctttataactcttatataaattaatacgttgttggagtatattgttatctatagctagttagatttttttattattattatttgttttaaatgtgtgttgttcttaatgagaattaattctaaattatactctctttttccgttttgaaaaagtttgcaaatttatacaatatgtctcttgtctttattgccctctatattttttttttaccgattaaaacgtacctcttctaaatttattatacatttctgtgtctctcctttatggacttgctctttaatatattcatattcatatatatatatatatggcctatgctatgcatgatgacaaattttagaaatgcggctttgaggtttttgttaccaaacaaggaagcaaagatatgtatcatataaatacaaatatatatatattatataagttagatcatatcgaggtatatatataatccattacatgtaatgattaaataaaagaatagttaaaaagggttattgatttttcaagttgtacattgattaaagtaatgagttgaacactttgaggagatgatcaaaaccaagaataataggaaatagtaattgttgaaatttcaacgtgatgggggaggcttctatgctgctttgctttggttattgtttattttaaaattatgggcaattggggtcgcaataccaatcccttaatctaagccggaaatgcactcttttccatgtggaaaattaattattcattatgtattctatgtacacaataagcaaaaataaaattaatatatatattaataaaattaaatttgatataaaattaaagctatagtttagtagtttatgaaaagaagaaaaaaggaaaagaaaaaaaaaaggaaggaaaagctaggaagttttctattctagaatctcgactgctattgcgctcattaatacagaaaattttcgttgtcagcctcttaactctccctaactcaaatttgggattttactggaactcaataacttaaattatagtatgtttggtattatttttcaattttttgttttaaaaacatgattttagaaatgaaaacaaaaaatagtttttgaagttttcaaaacacgtcatatttttgttagtattttttaaaaataatattgactacacataaattatttttatcaaaacagaaaataatattttattgtttttaaaaattttattttttgtaattttattttttgaaaattattttcaaaaaaaaagtcaaacacaaacttaattatttttttaaaaatataattttctaattttgaaaacaaaaaactattttttacttattatctcaaacatttacttattctctctttttttaaaaaaacctaaattactctttttttttttggaaaataagcgtagat

SEQ ID NO: 15465 - DNA, 8885 bp, Cannabis sativa
gtttttcattctaattgaagtcacatctcgagtcacgtgacaatatgagattggtcagcatcctcgagatatttaacaatgttcaggggaagaaggggaagaattaatgatttaaatacttttttttcactcttattttagggcaacttgctacaacttttttttttctttccaaatatgtaggttttcaacatccatttatgaccacacattaatacatgatgcccatattcattcaatcaatataaaatcaagatatgtgtatccaatatatacattccaaatattgcaaatagtgatgggacactgtattttaaaactatgtatgtatgtaacattataatttcacaataaagagaaaaatcaaaactttcaatttctcctaagtcaaatcatagcagctattgatttgaatgctcaaatttttgaaaccaaatactagttacactctattaagaactacaaagaagtaaaaatggagacccaaacattatttcttttttttttttcaagaagtaaaggaccacaaaactcaaatactatttacacttcataaaaatgaaataaagttatgttaagtaaatgatatatataataaatttttgaaatatactcttgtgttttagtaaaaatattacttttaaatttagttgtaagtatctaatcactaaacacttaagtgataggtttttcagttagtaattgtccagctcattcattcattagccatataaaagtggatttttttattcactctttaactaagaaaatagagagaaggagagatgtacaaacttgtgtttttgatcatcatgagtctcatgtgagatttttattgtgtaatgaagccattgcttcttagtgtgtttaatcagtctggttagttcttttaatcactaaagtgaaaataattctctcaaagttgtgttcaattcagagtaattcaatataagttcttatactttcattgtcaattcattttattgatttagtttaatgtcactcttttagaatatcgagatgatctcagattataacaattggtgtcagagccacgatgaatgaactctgagaattcaagaacttgatatagaattcaagaactcaattaaagaatgtcatcgacaaagttcaaggtggacaagttttcggggactaatgattttagtctatggagaatcaaaatgaaagtttttctagttcgtcaaggaataacatagcaatcgatgaagaactcgtgaaggaattaaaagattagaatgaaatgagagaagcggaatcaaaagttcacagtgttatattattgagtcttggtgatgaggttcttcgagaggtttcagatgaagaatctgctctaggcctatgaaaaaagttagcatcgatttattttaaaaaatcattgactaacaaattgtatcttgatacaaagttatgcgctttgagaatagatgatactaaagaatagaaaaaatatttagatgactttaaaaaaaacaattttggatcttaataatattggtgtacttgttatttcaagtcaataatcaggtgaggaattgattcttgacttagggtgttcctttcatatgatacctcataaacacattttcagtagttgttgatttttatggtccaaatcaaagaagaaagcagttgcagatttagaaaaatattttagattcttataatctgaatcataagacccaagatcttaataaatttatatgcattaaatttatacttcaagatgaaatcattatacatgttgataaactattagggtatccttaattttttttcgttatttaatttgacaagaactcaaaccacaggtcttctagatcaatctcaacactcagaacgagtgtgggctcatatgattaattacaggatgattatttatatcacagtgtgtactcaactcatgagacattatgatggtagagagaaagggactcacacgagtaggggagagaaagagaatgattggtggtcattttgtttttagaaaataattgatcgatccttttaagtcaaatgtgtatatatatagtttttatttaacccaataaaataaagataaataaatcatttattcaaatttaaataaataacttatcctaactaattatttaatcatttaataataaatattttatcctataatatttttaattaaatagttacttatttaaaattatttatatgataaaataatcgaaacaaatcataccgtctttcaaactgtatgaatgtacagtcataagcatgtgacattattttaatgaccgaaattgatttttcattcttttttcttaaaaaatatttataatttattctcaatatataataaatgattaattctaatcattatcttatttaattttagattaaataaatattattttctactaaaataacatattatctctcataatattatttaactaataaataatattatattcaattaatacatagttttaataaataaaactaaataattaaattaattaattatttaattcataattaaataatcattttcaaaataataagaataattttcaaacaaaattaattctttctcaaaataatcaatcctcatattaaactacctcatttataatgtggtatagaggtaatcaggagtacaaacctatatttctaagctccaataaactcaagattactagatctcataaatatagaatttttctcttagacaatatagaattatatttatagaattattctttatagtccattcatataatctatacaggtagtttgtcctcccgtttattagttcataattaaagctagtcaaaattattattttatccttttaattatctcttaaattgattcactcacaaaattaacactttaagaaaactaatatttaatctttttggaaaacttaaattccacttgttgtatagcatgttctcatgccatccttgttaatgttatataattgttgggcccatttcttccaccttgttgggtgcagttttatttttagacactttctcaaaaaatctcatactaatagagttggtagaacacttatatctaaagtaactcttacatattctttcgatgtgggacttgagttgataccccaacaataatctattctgacattaaaaaaaattgaaatgattcattagttttagttttcttttttccaaaaaaatttaatgattcatcaaatttagaaaagaatagaagagttatagttaattaactaatttgtggcaacattgtacaccattattgagtggtgcaagtataattattgagtaaagagcattaaagttagagccaaaaagatacaatcaattatgatgtgatagccaaccaattggtgttacacaaaaaggttaatggtagtcaatttatattatggtttttgttcttttcagctctaacaaatttcaatggcacaccttcatagcataaccacacttatctttatttcaaaaagtattttgtaaagaacaaaccctttattgaaacttgtcaaatcaatactcaataccactttgtgtatttatacaaatacaaaaattgtaagaactactaaaaaaaatgaagtctttcatatatagtagtatacaagctggtgattggtaatgatggtgttactatggatacaaatcacaatactaaaagagtgtatataccaatataaacctatgagattgttaatcaacaaaattcacagctacccaaaaagaaaaaaagaattgagtagaaattacaaagctatacataaaccacactaagtgattttctcttgtgcttatggcccccaaagttcactctcatactacaacaaaagaagtaaaagatttcgaaataaactactattgatcatcattatgagtgttttcttcaatcattaatgttattcaaagctctaaatagttattaactcctaagaatttccttcggtttctgctatcgaaggatctgtttgcgcttggcgaacaaactgtcccttgactcggggacgttgctcagcgagtttctttctgctctcgtaacggacctggaatagacatgaattcgttagaaaaatgaagaacacttaaaaaaagtaatgaaattgagaatggtaataatgttataccttcttttcaaagcatctatctttcctcttcattcgaaattttgtaagagctgcttctctttgaatggctcggtgagaattcccgctgttattaaagtaactttcatcattcttgttctcggaaacagttctaatcatggcagtctgatcaacattgctattacttccacaagcacttccatacccaatactatttagatggcttgcatttccattacacaaactactactagcgctttgatcggttgtaggagagatacgcccacgatcttcgaaaaaatccaatttatgttcttgatttagcaaggattgatctttggcgatgctgttgtttcgacaaaggccatttgactgctcagatttgttcttttcaggagtcgtttggtaaaacgcattgattagcaatgaagattcttgttgggcaaccgagcttggactgatcccggaggaagaacctgattgtgaacagaaccctgaaggtactactacagaaccatagcctgccactggattattaacccttacacctttcacaggaatcggtagaggaaataatctcggttgaggggaatgagttgcaacttcagaatggttagattgacctgtagccaatgtaatatgacttttcggtgagctttttgagggaccagggggggtatcagagttaaaactaagtccagcagcaaaaccgaacatatgcttttcggtgtttgatccgctttctttatcttgatcgcatacaccggctgatgtagggtttgtgggctgcaacggtttattgatgtatctgcatgaataatcaccgaaatgtagcaaatacaagttaagaaagataatccaattgatgaaactttccatatcatcatgacatatctcactggtcaaaaagtgagatgatcgaaatagaactcaccgtgtaaaggccgaaccattagaatgaccaaggttgtgcctcttctcaaccatatggctctcaaagtcaccagaacttgatctcaaggtaagatccaatttcggaccagaatcaaacttgctagttccattactagatgaacaattttgataattgcaattttgattttcatcgaaagctccattcaaatcaatggtgcctctagaatgattgaacaggaatttattgttctcacaagcctcactagacataatagcatccctcctactaatactttctggcttggaacacttgcctggtgaaatttcggtttcaccatcctgatagattcccatcattgaacctatttcgattgtgacaccgttagattcttgaacactgattcaagaataatacttaaaaaaaagttgtaatattattcacctcttgcatcatttccatgcatgaatctctgtcctgtattgatgtgcccttcactcttctgtgttctcgagtcacttggaaaagactcgccccgtgttggctgtgagcattcctgcatctgatcgacgtggacattctcaacctccatttctggccttgtacaagagctctgcaggagacagcaaacatgcagtctctatatgaaacctagactggaaggaaattccttttttaagaattaatactaacatattcctcggcgaagaacatactctatatcgcttatgaccagtctaaatttattctaaactaaaaccgttcattaatatcttcaacattgagatactagcaattacatttctgtcaaacaataaaggttacaaattctttggaggctcatacagaaaatatgagatacctgagaatcgctccctttatcgatgttttcttcatttctttgaatggaaggaatatagccattggattgattggttgcagggtcattttcagaagtggcttcacccttattttgtgcaacaccttcatatcgaagaccatttctcgaggcctagtagaatcacgaaacaaacaaaattagaacattgtaagaacaagacaataatattcgatacaacacgaaatcttaaaagcctgtgcttacagattttcttctccaaacatgttgccatagattactcagttcattccttctaataggcttaacaagataatcagcagcacctctcatcatgcatctgtaaactataccgatcgaatcttgtgaagacatcactgcaaagatccacaaaatacataagtacatgaaaatcgaaaaacactaaacacttaacaaatacatcatttttccatatttgaaaaacatacttataacaggaatgtttttgcaaacatcatgttccatgattaaggtaagtaaccgaaaaccggatactgatggaagatccacttctgtcaatataagatctatgttatggggtcttcctttcagtaattcccatgcttttaagccatcagccacagcagcaactgcccaaaccaaagaaaacattttcagttactaatcataataaacagcataaacataaggaagctaagccattagaaaacaaccccctcaattcacttgggctttgtttggatctcagattctaaatttgattcacatattcttgtttcatttttttaaaaccctaaaatctgagttctaaatagagtaaaagtcaaaccatatccttccttcaattggtttttttttttccaatttacaacaaacattaaagcaacaaaaacatgaaatttcaccccaattacataaacttgaccaaaaacacaaaattggaagaaaccccatttcaattttgcaaaccccctaaaaaaaacataaaagcaaaatcaaattaaaagaaacacaatacaacatacatacctctatagctacattttctgagaagagcagtaataatctgccttgttgaatcatcagcttcaaccaacaaaaccctcatcatcattctgggcaaaaatctttcccaggtagtaatagctccacttgagctacacccatctttcatcttaatctccacaacttcatcatcatcaccatcatcacaatcatcaccacaatcattatcaattttattattattctccatttcttccatcttcttcttcctccttttctcaacttcactatctcctttcactgcccaatcctcactactactcaaaacagcctcccccatcttcaaattctctctctaaatctgtaaaaatccagtcttttttcttcctaaaccgaaaaaatccagtcttgaattgttgataagctgggaaaagcttgaggaagaaagctcagaaaaaaaacttagagttgtgggagttgtaaatagaaaactatatttggtagatatttttatgcagtacctcgcttttcaatttgaggtgtgagatgtctcaattcaatttgagctgttagattggattctaattgtgaaaaagttaaatcccatggatcataattgtgcaaaggtaaagtttttaagaaaataggtaaccgattcaattgtttgaagtgatgtacttattttctttaggaaaatgctaaaaatatataccaatagtgtttggttggtaccactcaaaatattatatcattatattttgattaaatgatatcattgttggtgtaatgtaattaaagtagaaaaatttacttagtaaataaaaattttaaaaaatatatatatataaaaatatgttaatacgatttttttttttcgaaatttttatttataaaaatacttttttaataaaaataataaattattttttaattattttataatttatttatagttgtcatgaagttatttttctaattattttttatttttttataatttatttgtggttgatttatagtgatcgtgagttgatatcttgttatttttagttattttttttactttttattgagtaaagtatatttttgtttttttaaattttataagtatcttaatataattaaaaaatttgggccataaaattataataaaacataaaagaaaagtattttaaaaaaatttctattaaagtatctaattttacatgatttagtataataatttttattaaatattagtaactaatagtatatgatttaatatagtaatttttattaaatatcctttaaagcttcaattcttcaattttcttatatataatatatataaatagcattaatatatttttgagcatgttattatatctttcttcatcctataattatatatggatatgagtttttttttttgtatgttaattaaaaatgacataaaaaatagtgtataccttaggagaaaaaatatactcatttcaatatttgtatgataaatactattttggactttacattttataaaagttatttaattattttcgttaaataataatttaaattttgtatttttcaaaataatactctaagcacaatttttatctaatgaaaacttaataataatttgagttgaagattttaagaccaaattggttaaatttttgtatctattcatgctgtaaatgggttttaagttgattttattaaaaaaaaaatgataaaaatcaagcttgggatattattttgtattatttttgaaaaatatagaatctaatttattatttaattaattagagagtacaatcaataatttttttaaaatataaagtctaaaataatatttattaatatttttatgattatatatttgttaaaaatcatgttattcttttaaatattttctaacataattatattatgatttgctggcttctataattacttttaatatataaatatagatattggagaaaattgcattaattactttt

SEQ ID NO: 15466 - DNA, 4966 bp, Cannabis sativa
ttattctctgaactgtacaaaatatctagaaagcaacaataaggttaagtaaattgcacctcaagctaaaaggacttgatgtttttattttcatttatttattgtattggtaaaaattaaaaataaaataggaatggttaaattggtaatttaggcaagacagtgtataggagttaaaagtaccaaaagagtataaaattaaatatttttttcaggccacccaacaaaggtccccaataaatggcactatttattgtacacatctaatttggggagaaaaatctgacagagttcattcatatctgctcataataattatcaaagataaaagaaaaacaataaaacaaaagagcactcaccatgatcatattcaacaatcttactacccttttttaacccctaccaaaagaaaaaaaaaataaaaaaaaaagaaaaaaaaagacaatggtaagaaaaaatctaaagccaagtgaagtcaagccagactacaaggtgtccaaaagctaaatctgaagctttgagccaagccatgtgaagataattttttttttctttttattttttattcaatttttttggggttgcattgtatcacagtaagtcacaagactctatataagttatttatttatttatttttaaagttaacggcttgttaaaggaccaaaataacataaaaggaccaaaataaagagagaagccttgaaaccttgaagagtttatatttctttcttattttttttcttccttctcttctctgccagtgctccttgcactttgttttagccctttatcctctctctctctctcttaccctgaaatagaggaagcagagtcacacagaagagtttaatgtccaacccaccgcttcttgctttcattttctctctccaagactgaaccttgttgttggggtctcaactttctctgctcagtgactcagaactcagttgttttctctcattttctcagtgattcttagctaaaggaaaaggaaagtcaccaaaacaaagaaagaaaaagaacagagaagagccattttgtttgtgaaggagactcatttttctctcaactcatattctctctgtttcagctatttcttgtctttagagatctaccaccaaccaactcttatttcattttctcttttcttattctcttgtacctttgtgtttggtgcattttgagttgtaactatgagtaaagaagaggtttttgaagaatccaggtacctctctctctctctcacacctctactgttctttttttttttcgctcatcttgaactgaaaaagtgttgccattaatttcccattattattttttccttttaagtttcctatgacagacatatcaatgcacttttaatcttagcttagctaaatatttttttttgtttctctttctgaataataatatctcttcactcttgttttttgcaccttggattacttattcacgcagaaatgtgtcctcaaagtgaatatacactgtgatggttgtaagcataaggtcaagaaaatcttacagaaaattgatggtacactcacttccatttaacatttatattattgtacttttttttttcttttgttgttttgtatggtttttaaaatctttctttctttcttttttttaaggtgtttttaccaccgacatagacgcagaccagggaaaggtgacggtctcaggcaatgttgaccctgccgttctcattaaaaagcttgcaaaatctggtaaacatgctgagctgtggggtgccccaaaaccaaataaccaaaacaatcagaaccagaaccaactggctaatcagctcaagaacatgcaaattgataatggcaagggtggaaacaagcctcaaaagggtggaaataacaacaataaccagcctcaaaagggaggacagaatggtaatcaacaaccccagcagcaacagcaacagctgcagcagcagcaaatgcttcaacagcagctccagcagcaacaacagctccagcaacaccttcagcagcttcagaacatgaaagggttagatctaaagcttcctcaattgaaaggcatgccaatgcctcaacctaataataacaacaaaggacagaacccaaatcagaaggctgtcaagttcagtgagccgctagaggaagacgaattcagtgatgatgactatgactatgatgatgatgattacgaggatgaagattttgatgatgaaatggatgatatgccacctcatcctcttgccaagaacatgaacatgaagatgcctcccggtatgcctcctggtatgttgagtagtatgatgaatggaaataatccccatgcccagcaaatgatgaaccaaaatgctcagaagggtggaaatgcaggtgggaatggcaaaaaaggaggtagtggtggtggaggtggccctatacctgttcagatcaatgtccccggcggtggcggtgggcccatggacggtaaaaatggaggcaagaagggtggcggtggccaaaatcctgctgctggaggtaaaaatggaggtaagcctcaagatggcaaaaatgggggcggaggtggaggaaacaaaaacgttaacggcggaggtggcggtggcggcggtaacaatttaaacggtggtaaaaagggtggtggtggtcttgatggggctcaagttcaagctatgaacaaagggtttcaacacatgggtcctggaggccctgttcctcatcctcaagccatggccggaggtggtggtggtggtggtaacatgaatatgaacatggccatgagccaaatgggtcaaatgggcaacatcccagtcggccaaatgggtccaatccctgccgttcaaggactaccggcggcagccatgaacggtgccggagctgggtatttccaaggagctgggccagaggtcatgcccggtaatccttaccaccaacaacaacaacaacagcatcaacagcagcagtacttagcggctgttatgaatcagcaacgggccatggccggaaacgacaggtttcagcccatgatgtacgccaggccaccgccggcggttaattacatgccggcaccgtacccttacccaccgccgccacaatatcaagatcccaattatgctcacttcttcagtgatgagaacacttcaagttgcaatgtcatgtgaaagtaattaagttttttattattattaaaaaaaaaaagaaaggaagaacaaagtttgaccaaaagcactttgatctgctgctgacgtgggttaatttgattggtttgtgatatggtgttcctggtctctgggttctctacttcttcagtcatagttacaagtactagaaaaaagaggaagggtaaaagaaaaaaaaaagtctgatgatgccataatattatacatggaaatgggttttttcttctcattttcttttcttagtttttttatttacattttctccttaaatctctcttttctttaatcctaagtataattaggagtttaattatctatagaggggaagtacttcatatattagtataataatatattaaagctttttagggaagaatgagatgtaagtggtggggggcaaagagagacagtgctctgggctttttctctgttttatgaaagatgtttatatgtgttcatatgtttgcaaaagcaaaaaaaaaataagatatgaaaaaaaaagagagagaaggaagcccatctctactgcctatttctttcccaaaagtcttgatattttatatgtataatttttaattcctatgcataatgtgcactgatttttgttcttattaaatttgcattttcacccacttccctgttttagtggtttttttcaatgcacattatgtttacttcgaaatcatagatgtttgtgtggtgggactcactaacaatgagtagggcaagtggtgggcccaccccaccattgttcacaaactgtttgtttggttttgtgaattgtgtagttctatgataaaaaatggtttatttatccaagaccatggatagggtgaaatagttaagtgagtactcctattactattactaacattttggttttgaagtcatggaaaagaaagaaaagaaaagtactcactgagtcagatttagacattgatagaggccaaatcgtttaaatatattttctcaatctctatactctctgctgtgtagtaagtaataagaaaaatcaaacaaaaaccgtagagcgtgttgacaatgactagctaactacttaaatttcgaaaaatctaacggcgttgacactttgacactagtttctggtagggtctagtcttatcaaccaaaagggtatcagataaatttttcatgaaaaaaaaaaagaccccacatttcacatgggattcgtcacatgatgatcatcatgataatgggcctcatctaaatccatccatatggactaatcaggacagtgattgatgctctgggctccactccactgtaaggctgtatgtaccttctcaaaagtacttctctgtttcttcagcttcttcaccctacgatttcacataattatacacatatatgtattgttttaattaatactgtaacggatggacacactagatttgcagtttcattgggccaatctcagctttggattttaaagcacaacactggcttttgcctttgataacactcttcactcttcttctgttttttctgggtatttattattattatcaaaagaaccgtagacttttttattttattttatttgtttttatattttgagttttgagtgtctgcttacgccaacttgtgtggtgtttcaggcactctattctaccagggttttgctgcacgggtgtgcttctgctgatacaacatttaatgtgagtagctcgagatccaatatttgctctctttgggcttgtttggtaacaggttaatgttgtccccaaacattataataagttactcttatccttaattggaataaggatatgaaat

SEQ ID NO: 15467 - DNA, 2549 bp, Cannabis sativa
atagagttagggaggggacttagctacataaccttagttgaactggcatgctcatcaaaagacttcagttaactagaaaagtctacacttctatttcaattagaatttacacacacagatgctaagcctattaactattgatcactaacaatatatgctaacacaataaagaactatccaatcaacttaaattttaataaagccaataaaagttaatgtaagcccaaataaaagtctaacaaacctatgatacaaccgattggagtgttttcttgagtgtcttatgaagcatctttgttttccctccaagtttatttaagtgggttatggtttttttacaaggtacctcttatgttttaatgatgaatggctgtgttcaagggcattttaaaggagaaaaagaattaaggcaaggagacccgatttttcttatcctccttgttttatggaatacttaactcgattgcttatccaaatctctcaatctagggaattttggtttcatcctttagcataatttatatattaaacaattaatcatgaaataaacatgtgaaccatgcaatagacaatagtcaaaataatttttttttttaataatagataaaaaagattacattgaaataggactttatttagggcataaaactcaatggggtgtattgatgcatctcctattttcatatctaggaaaaaaattagtctagttatttttcatgattgtatatgttatagttatttaagatatattgtaaaatattgagaaattcgaaataatttacaatatagtttgcagtgtataaacaatttatttagcatgcgtgtgaaataaaagtttcacgagtgtaacagattttttaaaccatgttttcaacgtattaatttcttttttgaaattctcaaaattttatagaatttcttaaataactacaatgtacacgaccatgaaaaaaaaaattgaccaaagaattatcatgaatatcgaaacatacaagagtgcatcggtgcaccccctttaccatgaaattttcctatgttatttttgtgagacggtttacttcctatacattgcattaaagtaataaaaaatattttaataatgtttgtcaaaagaaaaagtattttaaaaatatttataataaaggtgtttttacaatgcactctaaaaaagagtttagcaatgcatttcttactattttggcatacaggagaattttttagttaattttttttcatgttcatatatattatacttatttaaagcatcatgcaaaattttaataaatttacaatatagaaaacagtgttcaaacagtctatttcacatgaatataaaattaaaaaattacgtgtataacaatctgtttaaactctgtttttatcgtgcaaaattaattctctaacatgctaaaataaatagaagtatatcaatgcacctaaaaaaatgtaccataaagtttcaaataatatatgtcaaaaaaaaaatattaatattttctaaaaaagagaatattaataataattgtaattaagttgacctaagaaataatgaggggatttaagttttttatcattccaaaagaaaaagaaaagaagatagaataataaccaacaatgaatgaatcaagtaggaagtgggtgcaatcatgtggcttcctcttaatattggcccaaatagacctaatccaatacatatcccttctttcttttctttttcgaaagggatattccctttatctagttgtaaaacatgttcagtcagtgtcacttggattattcttgctattattttattttatttagggtgtgtttaataatatttttttaattaaaaaaaataaaaatattctctaaaaaatatgttttataaaattgtttttactttttatttttaatcaattttttttttttaaaattatttgaaaacttttttaaacaattttttttcttaattaatactttagactctcacccatgaactttgagacctagactccgacctcgagcccagtcccagacttgtaccaccgtcctgcaccgtcctggcccaaactcgaacttgaatccgacttaaataaaatcaaaaaataaaaatgaaaataaaagttataaaacacacctttattttctactttttaaattaaagaacaaaagtgattataaaacacattcttattttttaaaaacacaaatttaacttttacttctatcttttcccttacattttccacgcaattttaaaggtgtgattttgctcagtcaatcacaaccttatcaactcattgtaaatttgattgtaaatttgtaatatttttatttttcatttttcagttatccaaatccaattaaaaacgaagaaaacatgcattacaagtgagcattgtctgcccttaaagtttgctctgtggcagttgtggtagttttttctttttaacttctttctttcagttttcttcacccgttctccttaaactcatctctatccatgaattatatacatctcctctgcatcttcatcgtttctctgtgattttctttgatctctttcg

SEQ ID NO: 15468 - DNA, 9957 bp, Cannabis sativa
tatgagtatattcccttccttttaagttggtataaggagaaggtgtaatgaacgcgcgaggcgatgcgtgtatggatgagagtaggatcatgtatgtatgtgtgtccaaatgaaaatactcactctcactcactcgctctcccccagaaaacagaatacaaatgcgtttttctttagtatcaacaaaatactctgataccatttgtatggtctgaactcatgcctctcaggataggacctcaaatcggtcccttctccactcaccgactcaccatggccactccttctactgcttctcttcttcctcctcacagtctcgtcttcttcggcaccttccctaccatttctcctcgctgctttcgtctccactcgctcagaactcgttctcccattcttccctccctcagactcagactcagagcttcttccgactcttctgactcgccgccgccgtcgccttcttctccaggttaatttactctcattgttatttcttcgatgttttgaatttttgtttttttaaagttcgttgatgaattagttgattggagtgtcgtggtgtaatgtctgattatatcgattgaagttttgaattatttgatgttttggattcggacttgatttttggaggtttaattgttgtattagttgtttttaagtgtaatttgtggagttgaattgcgttgaatttttgttttttaaaagttcgttgatgcattagttgattggagtgtcgtggtataatgtccgatttaatcgattgaagttttgaattatttgatgttttggattcggacatgatttgtggaggtttaattgttgtattagttgtttttaagtgtaatttgttgagttgaattgcgttgtgcgaattaggtggaaatgtgtattaagaaagtcactatttaaggttgtgattgttttttgatgttttaaatttcgacgtggaattttattgaagaatgatgaattttgaggtgtggaggttgcgacttggacggaatgtaatgaaatagaaaatcatcgattgaaatcttgaactatgtaatgttttggtttcggacatgatttgtggagctgtaattgttgtattacttatttttaagtgtaatctatagagttgaattgcgttgtgctaattagggggaaatgagaaacaagaaagtcactatgattgttcttggatgttttaaatttagctgtgaaactttgaggtatggagtttgcgagttggaaggagtgtcatgaaatggaatattaaattgattgaagtcttgaactatctaatctaatgtataggattcggatttgatttatggagctgtaatttttattttgattacttgttttcgaatgtaatcaatagagttgaattgcgttgtgcgaattaggtgggaatgtgaaacaatagagtcaataatattcaattttgttgtgaattgattgaattgaatcaatgtgaatgagtaaagaatgttagacccagctgtagaatgtgtggtagttatagtgcttattgggagttatctattggaacagtgcaattctgggcttctatggcaaagtgttctgaagctgtggtgattttgtttagcaataagcaataatagttcaaaaagatttttatggcgaggaatttacaacatttccgctggttattagatttacgccagatatggacctaagcatgattgtgatagtgaattactattattatattctttaaaagtttaaataatttgatggaagattggtaagttaatccatgtagggtatgaaatgatagcgatttaattattattttttttgactaaagatagcaatttaatttgattgttaataagttaatataatttttttttgctaattatttgttaatgcagcaagagaagtcgaaaatttggtaataattggctcaggtcctgctggatacactgctgcgatatatgctgcacgtgctaatttgaagcctgtagtttttgaggggtatcaagtaggtggtgttcctgggggacaattaatgactaccactgaagtggagaactttcctgggtttcctgatggaataactggtccagatctaatggacaggtatgatataatagtactacagagtcaaactacagtcttcattttttgctttaatgcatatgaaagtatgaagcagaaacttggattagaaaactatttaaaatcttggcattgtgaataatctaggatgagacggcaagctgagcgctggggtgcagaattgttccaagaagatgttgaattgattgatgtgaaaaatagtccttttacaatccaaagtagtgagcgtaaggtatgttgtccttcccaaaagagatcttactatcttcccagatgatcacctataactatgctctttaattgtgttcagttataaataattgctcaatctttgtccctactccctaggtttgtttgaaaaaaaatgtaatttttgttgtttgtacttttaaagatttcttttttgcatttatatgtcaggttaagtgccatagtataatatatgccacaggagcgactgcaagaaggctaggcttacctcgtgaagatgaattttggagtaggggaatcagtgcatgtgcaatttgtgatggggcatcaccattgtttaaagggcaagtacttgctgtggttggagggggtgatacagctacagaggaagccttatacttaaccaagtatgctcgtcatgttcatttacttgtacgtaaggatcagctaagggcttctaaagcaatgcaagacaggtgagctattgatgagctgtttaatattgatgtctggaagtttttatagcatatctgtagtacttgtaagattggtaaacatatatcattaatttagatgcatgtcaaattttgatttcccagcaattccacttataaagtatatttaaagcttttcattcatccaacagggtataccttaaactcctaaacaagtctacttggaataaagacgattgaactttggattatattcatgcacatgatgcattaattagcaatatattgacttttttctgcttaacttaccattcttctgatagggattcaatttatttttatctcatttattggatatggaaatttcaactttttccaaactagtacaaggtttacaactcctgattgaaacgtatagaaaatgtgtgaaccatctttataatgccaatgttttgaagttggctcctccagatcttgcaggtcctataattgggtattcttattctattttgattgcggtttagggtatttgcaattttttaggctgtgactgaagtttgttttgtggtggttcttttctgtttaacattattgattggctttcataatggtgtaaattatgtactaatgaaaattttgcatttgagttttcaactacctgaatgtttttttaacaggttaattatcacgaatgtttcagagtgttcaacaatccaaatatcactgtgcacttcaatacagagactgtggatgttgttagcaacatgaaggaccagatgtctggcgttttaattcgtaaaagtgatactggggaagaatcagtgctcgaggcaaaggggttattttacggtataggtcattcaccaaatagccagctcttggaaggccaagttgatctggacaaatctggctatgttatagttgaggagggctctgctaaaacttccgttgacggtgtatttgcagctggtgatgtacaggtaatcgtatctaaaagtaattttactaaacatgttcaacagagattgttacctttggtggatacccacgtaataattttcttcatatacctatataggatcacgaatggaggcaagctgtaactgctgctggctctggatgcatcgctgctttatccgttgagagatatcttgttggcgaaggactcctaattgaatttcatcaggtagttaatctattatacaaaaccctcctgggcacaccgtttactcgtataaactatttcaatagagtttttcacttacattaatgtttctttttacagccacacactgaagaggtcaagaaggagctcacaccaagagatgttaaagagggctttgacattactcttacaaagcataggggacaggtttgtattctttgacaaagacgccacgtggatataaactttcagttatattcagtatttgttacatcttggtccaaaactcaattatctcattcttttttcctttttcttttttgattttttgttttaattttttctttttcagtatgctctacgtaaattgtaccatgaaagtccaagactcatattggtactatacacatcaccaacttgtggtccatgtaggactttgaagccaattctcagtaaggtatgtgatttaaaacaatttataggtcgtagttaaaatactcaaaaaattaaaaaaaaaaaaaaaaagattcattactgaacaaaattgcatatgcaaaattgaattacatttaaattgcttagtgactggcttttattatatccattgccaattcgccattgttgcagtgacagttgaaaaaagatgtagagcattgaaccttttgctaaatttttacactgcaggtaatagatgattacgatcagaatgtacattttgttgaaattgatattgaggaagatcaagaaatagctgaagcagctggaatcatgggtacaccttgtgttcagttctttaaaaacaaagagatgctcaggttagactatatatgatattatatatatatatatatatatatacataactatatcattttatgcttcatttgtttaacatattattccttaaaacaattcttctgggaatacttttgggactttgtgtaaagggcctggcaatacaaaactccctaagtttaagtggactttatcactccctttccgtttgtatctgttgcaaattccgattttagaataaaattctctatattccatcgttcatacttattgttcatccatttatattatatggaattaaggaaaattagcttcaaaattacataattgttttgttattgtggttatgacaggactttttcgggagtcaaaatgaagagtgagtacagagaatttattgaagcaaataaataaataagaagagactgaaaagatatgctacattggctgaaagtttgctttctgtgattcaattttgttctctttgcaattttaaattagcttgtcctaataatcccttcaattttcacattggatctagttgtcattcattgatcaattacactgtaaattttactcgaagattttgccaaaatgcattaatgcggattctatgtttagatttcttgacacgaaatatatactggtcgtgttagggttgaccaattaaacatgtcaatttgcataacatgaatacgaatatgacacgataacacgaatcgacacccctaattttcaccatccaaattaccttgtcatttttcttaagaatttagcattatttacatgattttcaaggcttgaaatatagatttaaaatataatatttaaatgatataaaaaaaatatagagaaattaatgtatgctgtaatataaaagtgtgaggtaaaatagataaaagtaagattttattgatgtatttttaaaaagggcaatttgcagcgtaaatacttaagtttaatttttggttacagataaatacttaagtttaatttttaacggtaataatacctaaattacatttgcggaacttctaaaagtacctcgtcgttaagtgtcaagttaatattcatgtattattttctcattggtatatttaaatatatttttaaataaaaaaataaaattttaatgaatttgaccaatcagcgactgtcatgtgattattgacttgctactatggtcaagtatctctaactctaagagcactcttaacaacttctctactctattattcaaaatacatcaccaaaactctattttttctattttacattataccatacaacaatttctctatttttttttctctatatcatttaaataataattttttaatatatataaaacacataactagcacaagaataaaatactatttatatattattaaaaaaaaattgaaggagaaatattgcttctctatgtgtaaataagcactattacattctttatattgttctttaaaatacatcacttgttgttagacgatcattttcgcactttttcacctcttctcttgctattgtgagagctcttaggtctcaaattaatctttaaaaaaatggaaaaaaaagttgttgtgagtgctctaagagcatctccaatgcaagcaatctctaaagttatcataaaactttacattaccctaaaatataatattttattttctctcgtccacatcatcattggccacttcttactaaaaaaaatgctctaatactaaacaaccctataaattatgtcccatacactattatttaatatatcagttattttatttataatgttttattttattattgtttttttgttttaggaaaaacttatatttaaaaaaaagctatggcaattgtccaaatattttactccaatgctattgctactattaggccatcatcaacggaagcaatataaattgttattggagacccacataaaagaaagtaaccaattaatacatttcttttattaaaaaaaaaaacaaaaacaaaaaatggtgggcatcgtagataggcagtagctactgtcccatattaactcacccaaattttaaccctctttcctccacctcatcccaaccctaagccctaacagcatctccaatgcaagtaatacctaaaattatcataaaacttcacatcacttaaaatataatattttattttcttttttatccacattattttttactactttctacaaaaaaaaaaaaaaacaaatactctaatgctaaacaactttaaatattgccaccatacctaacataatagtatttaatatagcatttattttaaattcatttagtttcaattttaatttttaatttttaattttttttaaaaaagaaataaaaaaaagatggaaattatagttactactgtgtgtgacttctcgtgacattttcatgcatagctaagtgagttggagttgctctaagatcatctttaatggaggacaatatttatagttgctaaaatacataaatcatgctaaaatatatattttttttttattttttcttatccacataaaatttttcatctcctctagaaaaatattataatagttgacaacttaaaagttgcccagataatcctacatcacattgaattaatgacttattagtttaaaaaataaatttttcctaaaaaaaaattaaaaaaagaaaaaaaatatcatgtagccattgattatattgagtaacactttacataaaattattcatcatgaaatgctaaaagacaccagtagtgtattttgtcccttcctaatatcatatagctattgatgcaattaattatgtagtctcatataatttaatttaataatttttaaaaaaatatcgttaatcaattacaagagccacctataggtagtgctaggcactactgatgccaaatagcattgctctttgaaattgagcattgctattaggcaccagtagtgtctaatactttttataactgacgcctcacaattagttagcgatattatttaaaaattattttctttagttatacgaaatttaatacttttaattatactaataagaatataataccgaagaaaatactatacatacctaattctcattgaaattgcttgagcactatatcattagccaacctaggcattaggcaacctagggaatcacatgaggaatctatttattctctttaaaatttcacaaaattgtatttttgtaaaaaaaaaaaaataataataataataaaataaaagaaattgaaaaattgtataaacaccaattttgatccgatctcacacctactcaaagctcactctttcatttcaatggcttccatttcaggaatttgcttctcttcccaatctctcaaacccaggaaaaaccctttcctcagacccacttcttccgcattctcactcccaacacactcctcctccctctccatccccattcgcaattctcctcgaatcgctactcctcactccctacctcgtcacatttctcccgaccactcagatgggtctgcttttccgacgaagaacaatcatgggttggagaaagatcccggcgagctttggcgtaggtacgttgattggctttaccaacataaagaccttggcttgttcctcgacgtgagtcgtgttgggttcactgacgagttcgttacccagatggagcctcgattgcaagccgcttttaaggctatggaggatcttgaaaaaggtgcgattgctaatcctgatgaaggtcggatggttgggcattattggcttagaagccctgaacttgctcctaaaccgattttgaaatcacagattgagaaaacccttgatgctgtgtgcgatttcgccgatgatataatcagtggtaagattacgccaccttcaggtgggagatttactcagattctttcagtgggtattggtggctctgctcttggaccacaattcgtttctgaggcattggctcctgataatcctcctctcaagattagattcattgataatacagacccagctggaattgatcatcaaattgctcagcttggtccggagttatcatcaacacttgtgttagtgatttcaaagagtggaggaacaccagaaactagaaatggattattggaagtacaaaaggcctttcgtgaagccaatttggatttttctaaacagggtgttgctataacacaagaaggttctttacttgacaacactgcaagaattgaagggtggttagctagatttcccatgtttgattgggtaggtggtaggacatcggagatgtctgccgtcggtcttcttccggcggcattacagggaattaacatcagagaaatgcttaaaggtgctgcattgatggatagcgcgaatagaactactgtggtgaaagataaccctgcagcattgcttgctatgagctggtattgggcttgtgatggagttggatctaaggacatggttgtgcttccttacaaggatagcttgttgttgtttagtaggtatttgcagcagttagttatggaatctcttgggaaagagtttgatcttgatggtaatagagtaaatcaaggattgactgtgtatggaaacaaagggagtacagatcaacatgcctatatacagcaacttagggatggtgtccataatttctttgtgactttcattgaggtactaagagataggccccctggtcatgattgggagctcgaaccaggtgttacatgtggtgactacctttttggaatgctacaggttatattttattgcaaaatcttgtctttccagtttttctttttgctttcattttgtagtaacacacacacacactgaattttttactagcattgatataaggtcaaattgctattagtgaggttatatatgaaatccgaatttttactttgcaccaataacagtatagcaatgctgctcctcatcacgaggctgagcagccacacgatccatgtggggctgccggattggacagagtagcagctttgtaggcctgccgaccaatctggcagccccacgtgcattgtgaggctccttcaagctagatgggcagcattctttatagaagtatgtcaagtccatgcttcctaagatgccgtttagcatttctcatttttgtttttacagggcacaagatcagctctatattcaaatgatagggaatcaattactgttactgtacaagaagtgacaccaagatctgtaggtgctctagtagctctctatgaaagagcagtagg

SEQ ID NO: 15469 - DNA, 2477 bp, Cannabis sativa
caaaattagcattctcatatttcaaagaagccgtaacataacatgatagttcataaatttttggttggcttatttagtcctaatgtgtctgatgtacatttttatcagtgatcattgatttatttttttctgtcaaaagaagatgttgacactctgaattgttgttggtttagacaaatttgtaaacgatgttgactgcttatttatttatgtaatgttacaaacaacttacaaccccaaaagtattattattctcactagaagtctaccaactcctcgtttaggacattcctagtaaaaatttaaacactggagaactgaactggcatgagagacaacttggtctaaaaagatcagtttttcaatatcagatctgtacagtgagtggaataaagacaccacctttgagctccaaatatggtgctataatatacaacagaaagaagactcatttctcgcatctattcatggtgatattttgaatttctttttcacttttaagttttttttttttttatatataaacttctttgtcctcatcatgttgaggattctataatgtgaattatcttggtccagaaagctccattgcctgtgcaagcaaggaagagtcatcagtgaggtcagagtatctttctgaagaagagaaatcattggctctgcaacgagttgactcagctctctgagtagcttcccatttatccgcaagcccatcgccttcaagcatccgaaccacttcagacatctttggcctataacttggaagatattgagtacatagtagagctacttgaatcatttcctcaagctcaattatatcgtagtttttcttcaactccttatcaattatcatatccaacttcttttctagctgaagtttcttcacctgcatttgtatacatacatgaaacaaattacatcaatcactgaggattgttgaagttgaagctgtaaagactaaagggtattcagaaaatgcaagaaacggttctttcttattcttgttagttatatacccaatcaagcatagctcctttctggtttgctgctttcccaaaatcaagagccctttggccagaaattagttcgagaagaagtataccgaatccaaaaacatctgttttctcagaggattgtcctgtggagaggtactccggggctatatgtccaacggtgcctctcacagcggttgtaacatgtgaatcatggtgatctagcagcttggccaacccaaaatctcccactacggcctcacaatagtcatcaagcaaaatatttgcagccttgacatccctgtgaatgatcttgggatcacattgttcatgcaagtacaatagtcctcttgcagctcctaaggctattctttttcttgtactccaatcaagggctggtttggctgcatagataaaacttatgtttatgcacatgataatctagtacgaagcaactcaacattttctgtggacatcacaggccagcttacctttgaggcgagaggcaacactgccattcgacatataggggtaaaccaaaagcctctcagaggctgtcatacaaaacccgtaaagccgaaggaggttcctgtgaactgccaagctgatcatctcaacttcagtttggaattgaatctcaccaccaatagcattaccatctttaagccttttaactgctattactgtaccatctcttagacatcctttgtagacatttccgaaaccaccttttccaaccaagtatttgctgctgaagttgtttgttgccaactgaagctctctaaattgaaatcttctcaggtttcccaggcaaacttcttcatggtgttgctctgaaattttttaaagcctacaactgttagtctctacttcagttacttttttagtggtactgcttaaaagaaaagaaaaaacagagtttaaattactaaccgttgacgtcaaagaaaatttgctggttgtgtctgtacctccaccaaagaaggaagccaaacccaataattagtagacaaatgcagcctaggcttgaagcaaaggctaaagcaattttatggcttttgggtttcctagcagtttgagcatcttcaaaagtggtataaaaaaaaaaagaagcaaattagagcagttgatgtaacaataacatgttatttaatgataatctgtcaagtaatcttccttaaaaagcttaaactgaatcattaacatattttttttgctttagaaactaactcatgaagctccaactaaaggtaaaagggaaatagtacttgtgtgctttagaaaaataaagaacacaacaacattattacagaaaaggagaaaaaagcagaaggaaatgtttgaactagtaaagaaaagaatagttactttgtgaattattagagggaaaaggaagtgctgactgcgccgtggccgaacacacatgttcctttccagtgacacaaatcagagggttccccacaatgctgtgaaaattcaaaaatt

SEQ ID NO: 15470 - DNA, 10349 bp, Cannabis sativa
  modified_base (28)..(30): a, c, t, g, unknown or other
aacttatataaaactaatatttacgtgnnncgccacgtaactctcatctagtatgtatatatatatatataaagttattgttaatacacttatttacattggctaattaaattgtgctacatatatactctgtctatgtatacataagaattaaccttgacagttaacaactaaaagtgaataaagtggcaaattatgaattttgaaagttttaccatcaaaaaaatagaaattggggattaattgctagcgaggtgatacttctagtggtcatgctgcaatttactcttaaaataattaatattaagcgcaccacttaaattcttccacatgtacactagtgtatacttgagcaaggttccgatggttttactaccaaaaatcggattgtggggagtaatttacggtgtttatattacactcactaattaagccttagtcataataaaattttgattggataaatgataagtttggtgtgatttaaaaaaaaaataaaaaattttcaaattgtgtttggagttggaataaaggtctttacaaggcaaagggagtttggagagacgatgctaagcacgaaaatgcatgcagaggttatttcccgccatctcatattcactcttcaaaagtctcccacttaccctaccaaaaacccatgtccaccactttctgagaagctattatctctcttgaaaaaatgtttctccaccaggaaactgcgagaaatacatacccaaatgctcgtaaactccattctaaggcccaatttccttctatccaaagccattgatcttaaagactttacttacgcttccctgctcttccaccgtatccctgaacccaatgactatgccttcaatatcatgatccggggactaaccactacatggcaaaaatacgaacttactcttgaattttactatcaaatgagggttttagggataaaccccaataatttcacatacccttttcttttcatggcttgttctaacctgttagcgttaagccatgggcgtgttgcccagtcatcagtatttaagtttggtttggatagggatggacatgtgagccactccattattactatgtacgccaggtgtggtcaactagtgtgtgcacggaaggtgttcgatgaaattaccgaaagagactctgtttcttggaattcaatgatttcggggtattcgcagatgggttatgcccgggatgcgactgcactattttatgagatgaaggatgcgggttatgagcctaatgagatgactttggtgagtgtccttggagcgtgcggggacttgggaaatttgagtttggggacatgggtggaggagtttgttgttaaaaataagttaaagctcaattcttatttggggtctgctttaattggtatgtatggaaaatgtggtgatttgagctctgcaaggaggatttttgatagtatgattaagaaagatcgcgtgacttggaatgccatgatctcagggcaagtgattcttactctgttcttaataagttacgtagtgttttcaccttcaactatttattggttagaaattcgacttattttatgtgtgctaactaagtagtcttacctggcaagttcttatatttatatatatatattatttatcttatatatgacagatatgctcaaaatggattgtcagatgaagcaattatgttatttaatttcatgaaagaggctggtattgatccagataaaagaacattggtagcattgctttctgcttgtgcttcagtgggggctttagatatgggaaaatgggttgataagtatgcatcacaaagaggcctcatgaatgatatctacgtcggtactgcattacttgacatgtatgccaagtgtgggaacttagacgatgcactgaggattttcaataatatgcctaagaaaaatgaggtttcttggaatgcaatgatatctgcatttgcttttcatgggagagccacggaagccatatccctattcaaacgcatgattgcagagggcggagctactcacccgaatgacattacctttgttggagtactttctgcttgtgttcatgttggtttggttgatgaaggtcgtcgatggtttgatatgatgagtacatcatatggtttgaccccaaaaatagagcattattcttgcatggttgatcttcttgcacgtgctggacttgtacaagaagcttggaacttcattgaaaaaatgactgaaaagccagatgaagttttattgggggcattacttgctgcttgtcagaaatgcaataacgtagatatctctgagagggtaactcagcttcttctggagttggagccatcaaactctggaaattacgttatctcatcaaagatatatgcaaaattaaataagtgggaagagtcagcaaagatgagagtattaatgagagagaagggtgtcagtaagacacctggttgtagctggattgagtttgagaatcaacttcatgagtttcacgctggagatctcttaaatgatagttcaactgagattaacctaatatttagattgctaaacgatgacctgaagagagaaggttatgttcctaaccttagtgttctataaaaaaatataaagaaatgtggttttgcactcacacttgtccctccaaagaacaaacatggtatcatccttttatcaggttggtaatctcaaacaaatgtaattttttgttgggctagggcaggttatagaatgcaatctattattattattatatctttcatgctcatgctcttactggaaaggtgagtaaactcctatttttattagtttcctctcacacacctacatctgttatttttcccatttaataaatgtagaaaatttcaggttttgaaatcacggtgaagccgaaatgtagtaaaatttaattagcctctactggtttagggtcatctttccatattcagctcatgcattatttgcaagcttttcggtcagtcacacaattgtaattcagaagaaacttgatgtgattatatgaaatcctaacttctaacagtttcctttcatcaaaaaaaaaaaagtagccttacaagctaagcttattctgtagcttttagaagtgctggtttattattttggtggtattaaattcatttactgtgcacaaatttgatggtctgtctctatatatatacaaggacaaaacagtgatgatactcaataaccacatgcttattcttcattggcttttgacaaaaatgttattgttgggttgatattgcaagtaaaacaatacttgatggacgtaatgccaaaataaaaaggtcattcaatatgcaaatactgtacaacgctgggggactagtggtgtaacgtttttcttcaattatatactcttgtatgcgtatgagtagattcaataattatctttgataattttatattacttgcatctcagctctaattatagcaagtattgattaattttggcaggaaccaaacatgcatgggtgatagtcttcagccgcgacaaaaaattctgatgattttgtagttaacggtgctgcatattgtaggcgtcttgcaaggcagatcttgggaaatcaaggcatatgttcatgacaatgggcaaagtagcagctcagtttactaagccaattcagttcaactgcagcaatttttgaccataacagaacaggtttttatctaaattgggaactccaacccaaaaagataatttagaaacctagtcaataaagaaaaagaaaacatatttatagaaaaagctactttgaaaaagaaaagaaatttcgtctcatgtttgccactttattgaaaaacatcattgtatattcttttcaaggattgctttataaagtcatcgattcttttactgtttataatttgaatagaatacataatttggtgttttatgtggaatacctgatacatgataccagtcacaatatatgattttcattttcaaataagaaaaaaaggaaagactcttatttttgtacaactgaaattttacagaatatcattgtccagaattacatcaatcagcacctattcaataacaatgtataacaagttttctctagaactagccccatgttcataattaagacaacattgctccctggattgcttagagcacccagcaatctctgtcttctttggattaatttctgagacgctggtacttttattaagacattgcttctccatttgcttgcagtaattatcagtttccatcttctttgatcttttataggggtcagtaacattgttttccacaaagttagtaccccatgcaacgtcaatggcttcacaatagtttaattcactagaagccccatcatttttctggcagcagtgcgaatttatattgttcgttctaactgaagattttttcttgcaacaattttgtacatcagatttagagcagcatcgactgtcatttttctggcaagtattttgttccgaatgcgacttgttcgagcctccaacatttatgaccttctgacaacttccatcagtgcatttttttgctctgcaaacttgtttgctgcttccaccttgcttggaaatcgggtctaactttttcacctcacgtgtgatttttttgcagcattcattgttacaatcctttgtctccaggagcccataacctctattgttcttcaagtgacctttgctttcattgtttttacatgacactgaagagaaagtcccgtactcagacctggaaacgcctccatcaaggtttggggtgtctttcagaagtagcatactattaagaattacaactaagcatgtcccaacatcagttagaacagctgcccaaacaagaggatagcctgcaattgctaatgctagtatgatacttttggtagtgatggagataaggacattctcaaccagctttttgaatgtcctttttgcaagataaatggcatttggaatcttccggatgtcatttgacatgagaattatgtctcctgtctccatagccagtgttgaacctgaaatgcccatagatatgccaatatcagccttagctagtgcaagagcatcgtttattccatctccaaccattgctgtaggtccatccttcttaaactcttcaatgaatttggctttctcctcaggcagaagttcggcatggataatctctagagaacggtccaactaaacatgaaaatcatcgaaaggtgcaataagccagtgacaactaaatatttaatcaaattgatacgtatcttaacagtatttttggatagccggaaacagcttagttctgcacctgatcccatgcaagcatggctgctgcattactatcccctgtaagcatggcagatctaatgcctaattctttcagcccttcaatggcctctgcggccccagatcgacatgtatcagagagcccaaatcttccaactagagttgctccacagaatatgtagccatttgtttttccacttgtttgttggacagcatccaatgaccctagaagttaaagctacgcagaatcaaaattccatactgtaacacgggttaaaaatgactaaagaaagaacatagagaaactttattatcttgaagcttgaaatataaaatataaaaattgaaacataagatagacagacttctttggcaaccagctctcagaccaattctccagtttcctatgtagatatcttttccgtcaattttcccaaagactccttcccctggaaaggtttgaaagtcctccacattttcgggttttgattcaatggagtgtaaacttccataaccaacaagtgcagctgccattggatggcttgatttgctctcaatgcttgaaacccttcataatttcaataaaatatttcagtttctattttctgcagtgatacaaacccttccaattacatgtatcagtttctatttcttactatctaattctcaaatacttatcagttaagtgtgaaaacttaccaacagagcaatgtattgaggctgatttcatcacttacagactgaaaatcaatcaccataaattcaccccttgtcaatgtcccagttttgtcaaaagctactgttttaatcttcgcaagaagttcaagatagtctccgccttttattaaaagtcctgttgcggccgccttcgaaagcgcacagaaaatggtcacaggtgtggagatgacaagtgcacatggacatgtacttacaagaacaaccaaagccaagtgaaaccagtactcttcatttggaactcttagtacggccggaataacagcaacactggctgatattatcataacagctgcattaaagtcacaaaaaatgaaaggtaaacaacaattagatgaacaataaacaaaatattagtacatttaaataaaatttgagaagaatgctgccatttcattcatctttgagagttaatcaaggtaagaactttgtcaccattaaacaaaggtgcagtttggttgagacttgaaaaggtcactattacagcactgaaatttcaagaagagtggggagcaacttacttggaatatagtactttgcgcactcatctataaatctttctgctcgagactttttcttaagcgcttcttcgacaagcttcgtcattcttgccaccacagagtctttggctaaggcagtagttttcacactaacataacctttcaaattgacaagaaaaaatctcaaaacttcaagcacaaaaatgtctgactttctatgaaattaaaatgatgcactggactgaaatggctaaccgtttagatttatggtgcctgcccaaactgtagagtcctgttcttttgtaactggaaaggactcaccagtcatcagtttctcatcaacttcacattttccttcaacaacaattccatcaattggaatggcctcaccagccttgactgctaggatagtgttcaactcaacaacatcgacatcaacttgttcaccggtttcagctattgtagctttctgaggagccatgtttgtcaatactgacattgcagccatggcctgtcatgtgtgaaatatgtggaaaaacataccagaaatcaaaaggttatcttaggccattgcacattttataaataaaaagatacagaagtaggaatgtattgttctatttaaatacctcatgactggcttttgattcaagccactgagcaatggagaatagaaagacaatagttccagcttcccaataatcctgtaaagcaagagtacctaccactgaataacatcaaatgaaatatgcattagttagcattctttagttaaatattattgtcatttagctaaattaaatacttctgctcaattcagtcacgatctgttttgtgacattattgtgcatggatacacaaaatgaaagggttactagaatttgagtagaaatgtttacatacctgccaatagaacaagaatgtttacattaagtgtgaggttccaaatggaggtaaaacttctgataataatggagggagcaccaatgataacagagccaagggccaaccactctaagggttgatataagaacttcataaacgacatagcaagtaataatccacaggccatgaccgatgggactggccatttcttctttaagtatttttcatctcccttttgcttaacactagcttccaaccttgccttgttcaaggcttcaactgccattttaacatacataaattacactgaaaaaacatagatatgctaacttacatgcgttgatttatatagggattattgtgacataattatccaaaattttgagtatgtaattggtataaactcaatatatttttttttttttaccggcaatgcataaatactcaatgttagtaaaattataattccgtctaattttgtcagaactaactccgttagtattttaattaggacacacgtaagacccaaatgctaaattactcgctatgaatggaaacatataatatcagttaattttaaaaactaaatttggttataaatttaagacactaacaaagtctgtaatgaaaaaactaaatgaaaattacagatttatttacattgggtacttaagctgccaaaaaaaaaaatcatacgccgcttataaacttaaaactttagatacttatgtcgatgtttactctagtataatctatacaaatattatcctccaatatatcacttttgtagcacttaaataatttatttaatttttagtggcgaaagtacctaaataactatgtttgtagtacttaagtacattttttttgcggtaaaaatatctaaattattatattattttcttacaacgaaaggacctagtttattagtaaactagtaaacgtagtcacgcttcacgcgattatgtaatagaataaatataaattttgcttctgcgttttaaaaattattggtcattctctctatttagttaaattataatttagatatagtgtttcgcaaaataaagtaaaatgatacattgagtctaattgtgatttaatatttttaccttaacattaaaactttctcttcctaaccctcaataacgatcgtgatccgatttatgatctaattacactgaatcgatccaattacaacgaaccaatcaaattcattccaattacaaaaattggacatccagttatagttggattatattggaagtgagtagttgtattttagaattgaatcaatttttgaaagaaactttcaaaatctgattaacaactgatctaatctaattacatgtaatacatattatatttgttcatctataataaaaaaaatatttaaatttcatttttatttattgtttattaatttttgataaatcctattacacctaattaaagaaatccatataataaatactcacatatagttttgtttttatgtgtttttttagttaatattaaaaatcaagtattgaatagagatactatttatgatacccactcctagtctaaccatgattttttttaactaatgtgtcaaagaatcgtgttgtaaataatagttttcttatggttattattttataatatattttttttttcttaatactgaaattttaataaaacaataaataaaaaattataattaattaaaattagattgaataataaaaatattttattcaaccattatatgtgacaaaaaactaattttgtgataaattaaagcaccatgcgacggttttatgaactgtcgagaattctttggccgacagtgtaaaaccgacgggaatttagtttttttagtagtgacaaagataataatttgggtacttaagtgttaggaatataataattaagtattttaaatgcgtacagaatagtttgagtactttttttttttttttaggaaagggtctcaaccaccaaacaccaaaagcaacaggtactctaaaacggtgggggatttattcaaagatagcatcagctatcaacatatcctaaatacaattaggactccctggctaccaaatcatgctactacttgctgttaatgtaaatttggccaagacatgagcaacaccattacgagatctcttacaatgagcaaaactaacaactttgagcctattacaaagactaagaatatcatccaacactagaccgaacgaagtgataacaaagatattgtttttagttttcagcacaatactcaaataatcagattcgataataatattttcatacccaaaggaaagacattgagacaaagtttttctaattgccaatgctttagccacctcaggcacgaaacaaccatccaaacaccagctcactaaggcacaaacaaagttcgcatcatctttaataaccatgcttaaactacagtaattgcctgaagagcatatagccgcatcaatgttgactttgagacaacctagaggaggggtgatccatttagacgcttcaggaggggaaatatgccacatcaagggtaagccataagagttagccatcgccaaaggaggaggaagaggaggatgcttggtgaacgaaccctggttgttatgaaacgtccctagaaatttacgagcccaaaggacagtgagagcaatagataaatccacattattatagacctgttgcccctgatttctcccaaaatacgtggaccaaccggatgatgacacgaggacggaaagggattagcatttgataaaacggctaagtctccctaaagcgcaggagtaccttatgcctcctggagaaggcatgtaagtctcgtatgctcccagagagctagattgcaacaaagcacctctgggtggtgtcagatcctctctgagcagtcatctcacatttaatgccgcatgggaggaggcatgttgaaactgttgggttttatg

SEQ ID NO: 15471 - DNA, 4180 bp, Cannabis sativa
  modified_base (1819)..(1829): a, c, t, g, unknown or other
  modified_base (2024)..(2025): a, c, t, g, unknown or other
  modified_base (4099)..(4102): a, c, t, g, unknown or other
acctgcgccaggcggcgcaggtggcggaagtactgtccccgacagcgatagtatatcgaaacggccgtgaagcgtgaccacacttccggccactggggaagccggctgacgcagcttcacattggcgacggttccgttacctccaaacacacaaacacctcttcccctgcggcgtgcgtaggccgagacgccttcgacgatgtcagatccggccgagacctcgaggacgtgagatcgaagggcatttggggtgtctctggttaggacgatagcgggtttgggcttgtttttggagccgggtggacgcccgcgagggcggcgggtataagtggagacagctgttggctgatcagtagtagtttctggagaataaacttgcttggattcttgagaatagtgatcatgatcataatcaaagttgttattattattatgttgatgattattggataagggtagtgttgttgtttgttgttggaggttcagctccgttgtactgaagagctgatgaagatagcgatgagaagcagccggcggcggttgttgttgctgatcattgttgttgtaaccttccatggtggctacacccacatctattgttatttgccaataaattaattatatataattatcaattgtcaaacaaagaaattattaatcataaacaaactgatcaactttgtttgttcaactcaactcaattttaacttttgatcatctatatataagtagttgtattgtaggtagaggatgagtttgaatagataactctctcctttaattctgtatagaccattctgtactagcggtgcttaattaatactttctgtaattagctattaatattttttaaatattattacattagactatataaaacccgataactcgatagtaattatttaaatatatactaatattgacacataaaaaaaaatattaaacactgttaatattgtttaatatttctcatttatatgtacctggtcaacaaaataaagctgcaacagtagttacatacactagtttcacattcatattattactatataataatatacgtgtagtattttttttttttgaaatatcatattactattaatataattaagtattggatttaatttatataatttaaaaaaataatatttaaaaaatattgctaattaattgtgaaacactatctatagaaagtggtttctaataacaattgactaataataactaaaaaatacaactattggtgtaattaaatagtaagtaacttaaaaaaaaaaaagacttttaaaaaataaaagtaactaattataaattacccctcataatactcaacacctaatagcaattaatactcaaatcaaagcaacctaaattaggaaaaaagaaagtaaacgcacagtagtcagtagtcacgcatatatcatgatgtattatttataattatatatataatatatataataattaaataattaattaattaccgtcaaagtacgtagtagttcagtagtttcgtgattgaaattggtcagatcttcaaacccaaataaacaggtggtgattatacatgatatatacaaggattgtggctccactctcaaaaaaaaatggctactattaagcttgtgagaagaattatatatataatggagagagagagcgtgttcgttttgatttttgacaaagttaatatgataaaaagaagagggcaaaagtcaattaataaatggctaattaggattgttttctctctaattttaaaatgtactaaattatattttttaaactttttttaccgttaaaaattcctcctgaactnnnnnnnnnnntagatttaagaacttttgtctaatttcattcaattttactgtttcagtaattgtttatgtattaaatcatgctctccagactttgatatctaccaaaccatatccctcaaactttgatatgcactaaatcacgcctcctaaacttttatccatgttagaatttttttactaaaactagacaaaagtccttaaatnnaacaatctcaatagttcagagaaaatttttaacggccaaaaaagtttaggtggtatgatttagtacatgtcaaagtttggaggaagaagagaggaaaaaatcctaattagccttaataaatacactttggtcttcgcaccatcggtgattagtactttttataagtggcactttatgattagttaccgatatttttaaaaattattttttgaaattatataaaatttaatacttaattaaactaatagtatatgatactaaaaaaatgtgctaaataatgtcttttagcaattctctacttactactaccacagggccgactctagacataagcagactagacatgtacttagggcttacttattttaggaatccaaataaaaaaaaaataccttttaaaagatatacatatttttttaataatttttaaaaatacaatttatatttataatttataggaagggccaaaattttttttttttgtctatagcacatttcaactcaaaattgccctgactaccaatatatcgatttctcttcttacacctacacgatctcttttggtgcatgttatgcatgtcaaaacttcatatgtttgatttgctatacattttatctctttttttagagggaaaacactcttaataagtttcattccatttgaaaatttactattgcgtttattttactttgttaaatacttatgtggttagtcctagttaccaaattatcttacataaaaaatttaatatccacgtgacaaactaaaaactaaatttaataaattcaaaaaaaaaaaaacaacaaaaataaaaacaaaaacaaacaaactttaatatttttttcctttttttttcttcaatattttttctagttttgcctccagaactttagcattataaaattgatattgttaaacttaaagactttcatacaattttactaatggacatctgacatgtggataaaagtccaaagggcacaattttatacacgtcaaagttcgggggtgtcaagtgagttagttaatgacagttggtgatttagtgtgttagcttgttagttagttaagctgtcacagtttgttatttggttgtaacaaattttacttagcttcttgcttactttctgagcttgtatataagtcaccttttggtagagtatttcattaagaaattccttttcgatttcttcatctttctctctttcatttcttttgtcctaatttcaaaatatccaagacaactaacatggtatcagagcatcactgggctccgttgacagcgaacgtagtgactagctcaaacaatctttcaaactcagataacaatggcgaacaaaattagactgacttacatacaccaagaagaagagatgttgattactcttcttcaatctatttcaatcacaacttatcgatcaaactcaatgactataactatcttttttggaagcagcaagttcttgctgcaatatatatgtggaaatcgattgttgcaaggtcttggtatattagagagagagtgaaagtgaggataaaataaagggataattatataaaataccattttttgttaaaaaaaagttacatttttacgttgaagattttttttttttacatttttacgattttctatgaaaacaacaagactacataaaagtaacagaaaaatatcatcaaaataacaacaaaaaatagcatacatataataaaaaaaatcaataacaaattagtaagagtacaatataaaaaaaatcatattttctataaataaaagcataaaaatcgtaaaaatatttaaaattctacacaactgtatttttataattttttttgttgtttttgtgtatttgtgaaataatccctaaaataaaacagagacatcctttataaatgattaaatgcatcatacaaatatatgtgtgattttttttgaaaacaaaatgtgtgatttcaattgttatgttgtattttttatttttttttattgtgagagtataataatgaaggatttttctgtaaaaataattgaaaacataacaattgttataaatattaataattatgtggatnnnnaaatcttttatttattactattaattgtaatcaacattcctcttttcttagtttccctgtttcttagtttcttaatat

SEQ ID NO: 15472 - DNA, 3459 bp, Cannabis sativa
gcttccaccaccaccggtatccgccacaagaagtttagtgtcacttacaagccttccattgctccatcccattgcagacacagtttttcactccgaggtttgatgctatctctttctcaatctatttatgttacccccttgtttggctgctgagaaaatggaaaagaaaagaaaaagagtgcatatgttagtgaaacaaagataacactcagtattgatatgcaacagataaaaagaggcatgaattcattttttaccatgcaattgtgatactttgacagttaaatagcaattttagtaacttatagtaacaatattgttacataagccatgaacctatgttttatttatttatttatacacacttcgggaactgttacaaagatccaacactggattgtttctgtttttgttgttgtaaatgtttttggttctaataatttgttgcagttacaaataatgattctagtaggactgaagtgtccaccaccacagatcaagccattgaaaaatcagatgatgttaataagatgatagatgggatgaactttggtgagctatgcaatgagtttgagtgtattagtagcccattggttgaatcaacagctagacagctggctcgagatattttggagcttagggaaggcaaccgtgcccttggaacctatgctatttcggttaaatacaaggtcagtgcagttatatttattcataatcataatcatattgtacatgtagttgtagctttgtttatttgtgactttatttcatagtatgatgatttattattattatgactgaaaatgcaggatccacttagaagttttacaggtcgtgagaagtataagagacctctatggataaccactgctctggacagcccttctgtggtgagtcagtcataaatcaccaatgctttttttttttctcctttgtttctctgtctactttatagtactcaactcatattttggaaagtagcaattggattggaaaattttgctaaccaattgtactttagcataaatgcctcctccattgattttttgttgtttagcaatccaaactaacttttttctgtgattaaaattctaacaaaattctaggtttgatattatttaattacatttgctgggtttcgaacctacatctccaaatattttaaacatcacataaaaaaatactaaaaattttgtgaaagaaataaacaataaagattagtggctatttgcttatagatatagaactaaagcaactgatcactatatttgctttgctatcaatggaatttgtaagcatacagctcattgagtatttttatactaaaatcccttgttatttttttaattattattattgattaaaaaaatagattttttctttacacttcaaaatagttttctttttgtattttacgggattcgacacagaaactcttataacaactagcggagcatcctaaatcgcaatcaaaatttctatagcaacctacgtagaaaccaacgaagaaattaccagaacaacccaaattgtaaattttttttaaaaaaaaataaaaaatcgtatacgggataatttcccataaaaaaaaaaatccctttcttaattgattagggtagaaattgaagaaaataatccaataatctaactaatttaatctcattgaaaaaattgggaaaattctccatcttcatgtttatcaatggtaagaagaaaaaaaggtcacaactgtatccagtttaatttatcatttatcattaacaattggtatcaacccattcattaattttatgtttttcttcatttatagtaaatcaaaaccaatcctactctccaaacttgacccgagtaaattcagttagtgagttgcttattgtttcttgtgttttgtagagtgtacaagaaatggtcatgttaacaaccagtgtactaagtatcaagtggacaataaaaggaaaaccaaaatctttcattgctggtgttggaggagagttagtgataagaatcaactcaaagtttaccttaaaccaaatcagtggccaagtgactgagcatgaggagtcttgggacttatcatcttcatcttctttcactcaggcctacttctggacatctcgtcgaatttttgccacaactgagactgccaaagatttggctgatcttgttaaaaacttgtccagaggcttcccaaaagaaaaccaaaatatggagatttatccagacccttctggtgatccaacaaaggtgagtacttttgtagctagatttttctgctcgttctaaatccaaacttgttgttaatgaaatgaatccattgggttttcttacagttttttcagagggatgacagttttcaaagagatgcataccaaattgcattacttctggcagttctatatttagttgtacagtttttgaggacaaccttgtaagaagtaaagcccgctcacacttatcatcatatcatattacttgtttataattgtgattacccatgttatatacactcataccaatttaatatttatattggtttttacatgtttagaaggtgagaaaacagaaaaccacattgtattctatttggacagtatgttactataactcttgtttctacaaggtcggaaatcactgatttatgaaatatcatcccttactcttttttaattttttttaattttttctctttgttagaaattcataaacaacaaccaaattcatccaacacctacccatatcaaacataactaaatcacaggaacacaaagtaatgaatcaaacttaaatagaaattgaaaagcaataagaaagaccaggatttatcctgctttcaggcctagagatcgaattgatccttagccataactccatctaagagccatcataactaatccaatacgaacaatgttaaacttgtacaaactccaatgacagagatctagagagctctctgtacttacactagaagaacaatagcaattcttctcaacccctagtacaaccccttcgagttcttattcttaaaaaactcgaactctctctcactctccgcctctctctttaacatttacaatacaagttacattaaaatggaatgggataatagttatttataactatagcctcatacaagataacaaattattatgactgaaaaactaaaggagctaaacaacttggttccaacaagctaaaccgatggttagttatgattattattattttggaggattaaaatttaaaaattccaccttcatcctcaaaataataacagtcccaaatctcaatcaatgatgatggtaaactctcatggttttaataagcaccaatgttcagttagctaagacaatgctttagcttaatgaaagttagaaccttagctcccatatgagcaggattgtcacatgcgtggactttctcaaattctaaaaccttatttatcttctctcttatccaata

SEQ ID NO: 15473 - DNA, 5864 bp, Cannabis sativa
aaaaaattataactaaaaattttattgttgctaaaaattaaggaaacatatacaattttttaataataataaaagaatttacatatatgataatagtgttacgttttcaaatatatagtaaagtattataaaaaattattttgtacagtctaaaaaaggaatatatataatttattaaattgaataattgaatatatatataaatattaatgtattaaaaaaagtttgcatttaaaaattgttttaattagtattttttaattatatcataatatttattaattatgttatttaatgagttatttttaatttagtttatcttaattttatattagattgttcaattataattttgttatttttaaaatttagtgtaactttttctcttttggttaagaaatttaaattttatgttatgtatatttatattaatgtatcatttctttaaaatagtgtgataatgtatttataatttaaaaaaataatatattaaataataataatatgtgagatcataattatagaatttttgaagagaattatactttaaaatatttttagaaataagagtgtcaaaaatgatgtggaagaaagataaaataaaatattatatttttaaatgatgtggagatttttagcatccttaaaggatgctaccattggagatgctcttactatattacaatgtcaaaaaagtacccaaaaaaattatgggtgttactccgctcaagtacagagcattgattaggtaccagtggcagtaatgtttaaactttttagatatgtcgttttgcgaatgactaacaatactttttaaaaattattacatttaaaatatatgaaattgatacttaatttgaccaataacaataccactagtgcctattataatattattaaactgatatgctgcattttatcaactaagcatacatctactttaaccgtagaaaacctaccattatttggccattgaatttacaatgaagggttcagaaagtttccccatcggtaggaaatttatgaggcaaccctataaatttatacacatatataaatataaatataatctactgtcctcgtgccttttattctagcagctctatatcaagaatgtactgtactacttgtaatatacaagtagattgaaagagggacttcatctaagctcttatggtataaatatatgcatttaacttttattattataataaattactaaattgtgtccttgaagcaaggtagtactgaggtaccttctctttaggatcatgctaaatgactagtaacaaaagaaaaagaaagatgaaatttgtttctagttgtgttgttttgggtatcaattaaatagtgtaactatatagatcaatattctataacgacaaacaaatattacattggcagacatatttggcggaggtgcttgttaacacatatttaaagtaatgaagagatttaacaaaagttaagagctaaaaatggcatctttatgctatttgaaagacttaccttttaatttctctctaattgcaacttggctgttatataacacttcaacaaaagcagaagtctgaggcaatttacacagacttggtagtataatctgagtgtcacacaagtcttccaaaagaacaagccccagtccttctctagcataaggattcttttcgaagaagaaacttcttggtttgccttcccttgcacaatgcaaatggccacttagccaaatcagaaattgcccgatacattatatatatattcctatattaccaagtaagctttacacatcttatgaaaaatttctcttgggatatacaagcagagtcatgttttcttcatgcctaatcgcaatccacggctccactacaaggtcaagttttgcataggctgctatgatcaacatgtcctcaggagctttggcgtccacatgcgagaaaaccagccattttctccacccttcgcatcagaaattgtccttttgttcttggtttcctcatctcgaacagattccatcgacgccattttcaattgaagtggcggactccctggcctcgagggtgtttcagctattttattgaccatttccaacacttcactcatttttggccggttctttggcagtctgaccaaacagcggttggctataagtgcaagcttttgtaccgacttgagtgagcatttcttttgcagccttgggtctattatgagctggaacttttttatgtctgataggtgaggcttcacccattccagcagcttctgctcaccctttgggcggtttctatctataggccgcctacctgtgatgagttcgtaaagaaagacaccgtagctccatacatcgctcttgtatgtgagacgcccggtctggatatactcgggtgctgcatatcccatggttccaacaacctaatgaatatcagtaatttgagatggtaagtcatatgtgagagatggtagttttgtgcagcaaagcccaagtatggtttcaaatatccatttgctagagttgaacaataacttgcaaactataaattatagagaaaatagctccaactaataatgatgtacaaatctacaaagtatagtcaaggaagaaagtgtttcatttagccaattagcttgccatctagttctggcatgtattgtaggcctcagtttcatgtgaactttaatttcaataataaaattgggaaatccaattcttatatttatgtatttcaaaaatatgaaagatataaaaaaaaaaaaaaattatagctttgtatccaacttgttttctcataatttattgttggacaaggatcaaactcattcctttttctatcttttttcacttaatacttttaattcaatcctatccagcccaaaacaaatttagagtaaaatgtctaaactataggcgaatagagggatgggagcaaagaagtttgtcaagttcaaacttggaacctccatatttcaagtgagcagtaagtgttcccacactatatatataagtactcgcataaagtcatacgcattagcattagataaatgcataccgctgtggagacatgagtcaacccttcggttggccctagccttgccattccaaagtctgatagtttggcattccactgctcgtcgagaaggatatttgaagatttaaaatcgcggaagatgatctataataagcacgtattatcacatttgggaatgtcatgaggaagaataacaatagtgataaaaatatctcttacatttgcttaggaaattgatgaacaagcttaaaatttaacatagcaaagtattggaatggaaacataagtaagctacctgaaagtccatttcttcatgtagatgtgccaagccacgagcagcgtcctgagctattttcaatctcatggcccatggaagcggtgtctctgaacgagcagataagtgtccttccacacttccattaggcatgaattcatatatcagaagacgttgaattcctctttcatcatcctcggcgcaatagccaactaatttgacaagattgggatgctccacaaccccaaggacattcacttctgtcacccactccttgtgcccctgccgtagaaagaaaaatgaatctttataattccaacacagttgaagcaaagtcctattctttgcaaacaaaaacagagttccttattcagcaatataagccagaacaacaatctataacttagctgttgtgaaatggatgcttaaatcaaacacaaacagccaacaacaacaaaatctactagaaagatatcagttgtaaagattacacccgacatctaaggcatacttcgttcggataaacaatcctaagaatggaatcctagtcaactctaccagaacaatattagaggttaactttttttctgcaatttgctcgaaacgccttgtacaagatcactctcaaatcataaaaataaatcatacaaaactcttgtttttcttctcaagaaaatacaatatagtgtagaaagaatttcgaatctcctctaatgcttcctaaactgttaaatgtgtttacttctaaaatactcaattgagctattatggaattcccaaccaaaaatctaccaacctcatatcaacggttgacagatttcatgtagacctaaaattaatgaaccacttctacatgagcctacattagccatatcattataatgataatattagccaggactaaaatctatcaatagcctattttagtctttgcaatgattttaatgcaagttttctttcaccgagtgttttcatgcaaaaataacattataagtcatcctaataaaataaaaaacatgaaattaaccaaaatttacctgcaaccctcttttgctgagttgtttcacagcaacttctagttttgtggatgaatcatctgtgctctttatcaatcccttgtagacacatccaaagccaccttctccaaccatgacggagcggctgaaattctttgtggcggatttcagctccggcacagtgaacactctgagattgcttggcctttgggagaaactaggaaatgattggcgccttgaggattcgctgcttccatcagaggcattttgggagttgaattcagagccagatctcttcatttcaccatcagtgaatgttgaattgtaggactgacccgaaatcgattttgtgctcttggggtcttctttcttctcaccgactgagaatgggaagcacttcatagctcctacacaaacaaaaaaaaaaattaaatacaacaatttcctcacttcaagtatagaacaaattccagagctcaacctaacagcagaccttcaaaaccattatccaaaacacatatccctcacccataaacagacaacaaaatccaacattagcatatacaaaattgaagaaatgggaaacaaaaaaggttattttcaattgttaatgcatccccttattcttattcattttctataaccgtttttttttttcctgagttccgtataataatcaatagaaaatacaattctaaaaaaagaaaaaggaaaaaggtcataaaagaatcaattattcaattccattacaagacaaacaataaagatgcaatttttaggaaacataaggaaattgtacacaaatggcaagagcaaaaactcttacctttgatgatctggtttgggaaacttggcgtgctaaatctgattgagaccaaaatatgagaaagtaaaggaaaggcccatataagccactgcccaaaaaagacttcaaaactatagaaattggaaagagaaagaaagagagaacaaaaaaaaaaagcagtctttggctataaagaagtcgtcacacggcagctgatggagtcaaccttgcttaccaaccattaataaaaattgaatctcacattccaaaacttctaaaattcgtaaaataaagaaatgaaaatgaaaatacatacactgtaacactgacttttggtagcgaaacgagtttaataaccttaaccataagcactacgctatactatactctagaaaaagaggaaaaaaataacattatctaatctgtgtgaaaactgaaaagtgcttttgaaaatgaggtatggaagaaaagtcttcggatgaataagactgagtcattcgagtcaaatgaatagaaaaaatactctattttttaatttttaacaagattatcttgttcttgatgtgtaaagctaaattgggtcttcttgacttgccggtgccatatgttttggagttcaagaaaagccattaacatttcaacatttgggcgtaaacttgagtgtagttctatacaaaatctcatatcagagaaaaacaacacaatacaaagtagtttcggcgcacaccaagaaaactgcaattatt

SEQ ID NO: 15474 - DNA, 4620 bp, Cannabis sativa
  modified_base (398)..(424): a, c, t, g, unknown or other
ttttttttattttttttcatatatttttaaaaaaattatacataaaaataaatttaaaattatttaataaaattttataatttaattaatattcaggtatataatttaaaaaatttataaatacccaagtacaacacaacttgtttactagtacaaatgatatatcgaggagtttattatttgacatttaactgtttcttaactaacctaaacttaaaaattaaaaatttggatgatttagctaaaaataaataaataaaaattaggtagcaaagcgtgataataaataaaatttaagtaagccattaaggctagcttagtgatgagagagcgatggaaaaaagggaaaaatcatgggttcgaacccaaaacttttaagctattaagttaatatatgnnnnnnnnnnnnnnnnnnnnnnnnnnnaaaaaaaaaaaaaaattaggtagtattgccaaatactgtaatttctaattttctaggggagacagtgtttaattagagtgtccatagaaactcaaattttccattttaatttacaaaatgtaataacacggcacgtgcccgtttataaagtgagtgctgcagcaatccagtagattctaactggattaagtcaaaagtaggtcaaccatcaaattggacacgtggctgagaaatcgagagtagttcaggaattttacgtgcaccgtcacacatacacgcacacactctctctctcacatcacattggcattggtttcatcgaccccaacacagagaagtggctctctctctcccttatactcgctcccttacagctcagacggactccccaaaacacacacactctctctcctctctctttctctctctctacaaaatcatctcatttcaaatcacttctctccaattttcccttatctttcttgctttttctctcccttgctacaacaatggcgtcttcctctctggcgactgcttcggctgtgaccaaatccaccactttgcatcattgtcatcacaatacctacaggtcttgccctccttccaaggtctcattccatctctctcataagcccaagctccgattcgtcaccaccaaggtaattgactaatcatatgtatagggagggagtgatctttgaatttactataatgtttgattttcttctcttttttggttgctcggaaaatgttagaatttaattaagaggagattttgtttattattattatgattgacattgtaatccttagattttggaaatattgcggtatcttcgtcagatttgagcttgattatttgaattatttaagcttggaaaacatatatggttgttcacaaggaattatactgaaaaaaggctaccgttatgaaagttattacgatgatagaatattcaagaacgaaaagaaaattgataataaatcaataattgctctctgcatgggccggcctgtcgtttgacacatcacagtgcccagctgctgttttggcactctgctggttgagaaaggaagaaagttgttggcattttgtttagatcaattgacgtgtggttcactttattctatggtgtggcgtttacttataggtgacaaacaactgaataagcccaaatttaaaaaacttggaaagatctcatattcatctttttcttttaatggactcttaactttcatggattaagagtctaagacagattttaaatttcattcaagtttgttaggattttttttattattattataaactcgttcaagttgtaattggtgtatgcatctattgtggaagttgaaacttgtgtattcataatagggtttgcagccaagtcgtagttgttccattgtggtcaaagctcacttgaatgaggtaaggtttttcaattggatttcattagaggatgttttttcaaatttccattccatggtggatgcgctctcgggctcatttctttcatgtaaggttgccttggatggatcctccaatgctgcaccttctcctttacacaaatcagacccaaaacacccaaaaggaaaagatgctaaaccatcaagcaagccttcttcttcagttttggcgacggaggaatcaatctctgagtttattagtcaagttgcaagccttgtaaagtgagagaataaaatcttattgctttctgaaatcaattacttcagtcagcagtcagctatgcagatttgatttgataatttattatctttgtttcaggcttgttgactcacgagatattgtagagttgaaattgaagcagcttgactgtgaagttgtaattcggaaaaaagaggcgttacctcagccacctcctcctcctcctcctgcagctacatatcaagcactacctccagctatggccccaccagctccatctgctcctgcacctgcacctgctctagtgtcttctccaccaccccctgcagcaccagcggctcccaagtctacaaagtcatcgcttccaccacttaaatgtccaatggcagggacattctaccgaagtcctggacccggtgaacctccatttgtaaaggtcactattctcccctgaggggtgctatttcaagtttgattaagcttcaaattgttttcgtgttgttctatatcattctttgttgccttacttgagagttctcttcaggttggagacaaagtacagaagggacaagttttgtgcatcattgaggccatgaaactgatgaatgaaatagaagtaagttttgtttcgcttggcattcaaactccaatttatgcaaataaacttcatctgacaatctttctgcattattgaggccatgaaatgaaaagtatgacggatgaaatacttgttggtgcaataaagttaaggatttcaggaaaatctggagatctgtaaatatgaagtttgataaaagaaaaatgagacaagctcttaaatatcttctcctggtgcaataatttgttgcctgagtgttctgccttcgtttttttttttattatcattagaactagtagtttcttttgatatgcttgtcaatacttaaaacagtaagcaacatatgaaactgaatttagcattgtatctgcgctacaaactttgtttgaaatagaaagattattaaaaatttaggagtctcattcatttattctcctaatgtgtctggtgtgttttttaggccgaccaatctggaactatagtagaggtcgttgcagaagatggcaaacccgtcagtgtggacacagtaagtaaactcatccgaagatatttatagtgacttgcatgattagattcttactcctgttgatctatatctttaacaattcctttattaccttctttttttttttccagcctttattcgtgatccaaccctagaatttcaatgagtaatcatgcatagtagttggagtgaccggaaagtagaagaagtgctgctccacctagcaaagtttgtaacttgcggccgtggttgtgtgtgtcgtgtggtagaatattttggttgaaatgagatgtagttaacttaggggccaaataacttatttctgaatcttgaataccgtagctgagacgattttctcttgtgcttcacacccgatagtggttttcgtttctttttttcccaccccaatttcttatatgttgtttggaacccagcaaaatgatgctgttagacagaggaactaaattcttaatgtctctcggtaccctaataattatcaatatgatagttttcttatctatctaatatatacattaagtacccaattatagaacaaaatggtaagatacgtggatagagagattattcattgctatgcacaatttctttcttgtttgaacattttgatattgaattattaaaaaaatggaaaggtgcattttgaagacgtaaattgtttgagaacagtgtgtatatagtgtagatataagcaattgggttggctctaaggggtatccacttttgtggaagagggaggagttacacaaagcctcatctcaacactacacttataccacaatccaatggagctatgtggtatgcattttatttttagaaaataagttatctattaaattattattttttatttaattaattaaaataattttaaatgagtttaattaattggtaaacgaagaagttttctcttcttgtttttcaataatatttccacgatctagcgttcccataattagaaaaatgattttctttctgttgtcttctgtgtattctttaaatatttgtgaaaataaaactatttacaaatatattatgtaagtatttcaagcagtagtattatttttgagtgtggtatttgacggttttttatagtgtgtttcgatacagttgttcgaatgtgtttctatagtggtattctgcttgtacaattctagacaacgtcgcaaaatcttaaagagaatgacttagcaactcaacaaattttattcgataaatttgtttctcttattttctctagcaactattttaaaatttctcaattatcatataaagtagtggttggaatataaggttttccctttgatttgattttttttggggcaatgattgatttcatttttatttaaatacatttgatgcattatccctcctaaactgttgacattgcactgtggagttttaaactc

SEQ ID NO: 15475 - DNA, 3771 bp, Cannabis sativa
aaaaaatgagggtgaggctcgtgcgggtttcaacctcttcaaaaagcttcagagattgaaataaactcagcaaaccagcgttcttgggattcttcttcattctagtcgtccgtaggggctttgtggagaccgaaaagaattactgtgcaaaactagatttgagctatatattatgcatgtatgtatacatatatatatatataataaaaagtaacttacaggcagttcattgagacgagggtgggaacgatgcggaggacgtagcttcaacaatggccggaaaaagggtagtagtggggttggacggtgagaagggtgaagggtttctgtgagagagatgagattttttttttattttttttcctaatagaagttgagagagaggaaagaattaatattggagctaaacgtttttatatatatataaacaataccggtggagcccgccggtcaaaataaaagctcaccgataataatactaaatttaaaaaaatttgaattgttaggcgagactgttcccgcaaattaatttcctcattaataccagcggtattttcgccggtaataaattattttccgccagtattaattatttttttttttttttatatttcaaattcttattagctgtagattttgtatttcgccagtaataacccaactattaccggcctaataagttccgccggtattacctccgccgctattgctcatcttttttgtagtgcgggacccgaaacccgagaatcgagattggaccaagacctgagactcgaggccccagactcgggacccggaccctaaccctgacccgaacccaagacccggactgggaccgggatacgcgacccgggacctgggacccaaacccggacccagaattcaggacccggacttggtccggacacagacccagacctagacagggacccaaacttggacccgggactcggactcggacccaaacctggaccgggaccgggacctgacccggccctagatccgagacccggacccagacccggactcggacctagaccctgacccttacccgaacctgggacccaaactcagacccagacccgggacctaggacccggacctggtccggacacggacccggacccggacccggtaccccggacctaatcctggacatatgggcacttggttacggcctcgatatatgtttaattaggtttatgattatgctttttaactgagtctgtcgactcacaactattacctgtgtgtgcaggtaaaagctagaaccgaaccagttagagtctaaagttaaggatgaagattgtacatattaagatggttagaattgaagtgttcagggtctccaggacagtttggctcactttatgggtcgccagatgacaacttttgaagtttaatatttgtaacttttaaaacggaataatcccagattatgtaaattattttgtttaattatgaaagtggagtaacataataaagttttaattcttcacattttttaataaactatttaattagcaaaagcatgtacagtatttagaaaataccgtaacacgcctaattttgtagggtgttacagatagcatcagtgaagcttctagcaatcaaaatagagtatccaagcttattgacaaattctgcattgaatcagattgtgttaatgctatccctcgtttgaacaataattagaactactatggtgtgatttgggaattgtttgaagcactaaaaattaaacttgatttcaagctatcactggttctttggtttttcttttacttggaggctaactcctaaactcattgtgtggagtaagtagtaattaatttgaataggaattttccctgcttgtgacagacttgtcaattagatagtaacatttttctttccttttgttaagtcttccatttcacacacaaaaaaaaaaataaataaataaataaataaatcggaacgtgctgtatcagaggttcaataatggctattactaacaaacttataataaaataaagtaagataataagcaaaatcttctatatctgaaataatcgatgagattgagtcatcgtgctagctactaatatttaaaaaaaatacagaaaatatatattatgtagcggcatgaccggacgtgtatcttaacctctacgcaaaataataatagtaataacattaatgaagattatctataagtatagagacacatataggaattaaagaagcataacatattggagtgtggaagataggtgtggctgtagcaatggggaaggaggtagccattattggagcaggagtaagtggcctcttggcttgcaaatatgttctctcaaagggattccagcccattgttttcgagtcacgtagtggagtgggtgggttgtggaccaaaaccatagagacaactaagctccaaactccaaaaccattataccaattctcggatttcccatggggttcgtctgtggaggagatgttccctgaccaacatcaagtcttggactacatcgaatcgtatgcacaccatttcgacctggtgaaacacatcaagttcaactcagtggttcgttcgcttgaatatgatgcttccgaccaagatatgcaacattgggctctttggggtggcgatggtgaagcctgtggctctcgagggaagtggaatctcgttgttcaacaaaataccaaggccgatgatcaggtcattaattaataatataacatttctttcactaactactatttcttttttttaatttgtatttgatgtagtacatatatataatgtgttagataggtgcatgggattgtcatttgatgctttgatttaaatatgaaatgttttgtagatctgttaaacgtgtttaatgtagtttgtaattatatcttattcagtttcatatcgaaatacatgcaaactttaagagcaaccaaactttattatttttatattcttcaagcccagtttagcgggagggcacatgtggcttgtggtatcccacttaaaatttcttatatgtaattagcattactataggcacgagctgttcctaaatacaatcatgaatcaagtctcgttaggcatattgtctagcataatattactatttgtgtaattgaatatctgatcctacttgttatactttaataaaaattatagaaaattgttaactttgtttttaaagatgtcatctcatagtggtggtactcacattgatgtcctatagcaattctcttgtataatagaactatgagattagatacttataccttttaacattaaatttaatattactcctactttttctcaaattaaaaaaaaaaataagtatatacatatctaacttaatatataaaaattaaatgtttggaatgaatatgagtagcttttaaataccgaattcaattgtaaacatataatgacaggtttacagagtcgactttgtgatcctttgcattggacgattcagcaatgtgcctaacattccagaattcccaccagatcatgggcccaatgtgtttcatggccaagtcattcactccaaagactatgccgccatggattccaaagctgctgctgaatttgtcaaagataagcaagttactatcgttggctttcagaaatctgcactagacattgctatggaatgttccactgtaaatggtataaaaatatttgcattaaaactattgctagatttaaattgctcgtaagaagaaaaaaaacgatgatgatcaaaattttattttaatttatatatatgcagg

SEQ ID NO: 15476 - DNA, 3758 bp, Cannabis sativa
cgatctttttcttttcttcaaatctttgccttggaataatgcctaaattagggatagggtttatagtaacagtaggtatgacaccgatctttttcggattggcgtttcagagctttgctactcgtgatgttagaataggatcgttgttttttgcttttctagttttggtgacgatgacgatgatgaaattttgtggcgttttcagtagcttaaggaactttatgcttccaaagaagagagcttggcaagtaacgattgttgaagacgatagtgattccgccaccaccgattcgaccgccgaaggctcgtcaagcgttaagaagcgtcgaattgcctccaccgccgcaggaacaaccgaatctactgtgagagacatcagtaatagtattataaagcatagtagcagtaccggagctaaggggaaagaacacgctcacgacatggctcggcataatggtaacgctccggacatcgacgaggatctccacagtcggcagcttgcagtctatggacgcgacacgatgcggagactgttcgcatcgaatgtcctcgtctctgggatgcagggtctgggagctgagattggtaactatcttagaaatatttttcttgatttgattatattatataatttagctagaacttggatttatcggtttcaagattgctagtgtctgacatagattagccgcctgattgcttaagatcggtttgtttttgtattttttaattaaccggattggatggtcaaaatttgttaattattaatgactggagatgatgttgaaggtaatttggatgtatctgattgtaatttggtctaacttctttgatttgcagcaaagaacctcattctagctggtgtcaaatctgtgactttgcacgatgaaggaaaggttgagctatgggatttgtctggtaattttctcttctctgaggatgatgttggcaagaacagagcacttgcctctgttcaaaagttgcaagaactcaacaatgccgtaattgtgcaaactttgactacaaaattgactaaagaacaactttctgattttcaggtacctcattaattatcttttttcttagtagcattgctattgtgttggttgtgttttctttaggttaagttttcttagtacgacagtgttctaatctggaatcataaaggtacatggtatataacatgttctactttccatgtttgggatgtgagaaaatcgatgcctaattttgcttttgaggtaatggtttatggatttacctacttattttctcgtttacaggctgttgttttcactgatatcagttctgaaaaggccattgaatttgacgattactgtcataatcatcagcctcccatagcattcatcaaatctgaagtaagaggcctttttggctcaatattttgtgattttggacctgatttcactgtttgtgatgttaatggagaggagcctcacacgggtattattgcatccataagcaatgacaaccctgctctagtatcatgtgtagatgatgaaagacttgaatttcaagatggggaccttgtagtgttttctgaagttcagggaatggcacaactaaatgatggaaaacctcgtaagataaaaaatgcaagggcttattcattcactcttgaggaggataccacaaattttggtgcctatgaaagaggtggtattgttactcaggtgaaacaaccaaaagtgttgaaatttaagccatttagagaagcactaaaggatcctggtgattttcttctgagtgatttctccaagtttgatcgtcctcctgtcctccacttagcattccaagctctggataagttcatatctgatttgggtcgtttcccaattgctggctctgaagaagatgtacagaagcttatatctattgttagtagcatcaatgacagttcactggatgggagagtagaaaacattgacccaaaacttctgagacactttgcctttggtgccaaggcagtcctgaaccccatggcagccatgctcggtggtattgttggacaggaggtactaaaggcttgctctggaaagttccatccactcttccaggtcagtagctttatactgttttaccctttttatttgtatatgagttctcctttatgaattttgatgctagaaggctgagctgttaatggttgtgtggatattcttctacttattctgtacctgacattttaagttctcttataagcctatttgaacacaaccattcatgcataattgtactatacggttaaacttatgtacttcatatagatataaggtctatatattcaaccttttattcattctttacaagtatgtaatttcttgcttcaagaagattttcatttgtctcaaatcatttgatttgtctttatattggactgcagttcttctactttgactcggtggagtcgcttccaacagagccaatagattccagttcatttagaccattaaatagtcgttatgatgcccagatatccgtttttgggtctgcactccaaaagaggctggaggatgctaaggtttttattgttggatctggggcacttggctgcgagttgttaaaaaatgttgccttgatgggtgtttcatgtggcaaccaaggaaaactaacagttacggatgatgacgttattgagaagagtaaccttagcaggcaattcttattccgtgattggaatattgggcagcccaagtctacagttgctgcgtctgctgctgcatcaataaatcctcatttaaacattgaggccttgcagaatcgtgttggctctgaaactgaaagcgttttcaatgatgttttttgggaaaatttaaatgttgtaattaatgcccttgacaatgtcaatgcccggctttatgttgatcaaaggtgcttatattttcagaagccgcttcttgaatcaggaactcttggtgccaaatgcaatactcagatggttattccacacttgacggaaaactatggtgcctcaagagacccacctgagaaacaagcgcccatgtgcactgtgcactcctttcctcataacattgaccactgcttgacttgggcccggtccgaatttgagggtttgtttgagaagactcctgctgaagtgaatgcgtacttatccagcacaagtgaatatactgcctcaatgagaaatgcaggtgatgcgcaggccagggataacttggaacgtgtccttgaatgtcttgacagagaaaaatgcgattctttccaagattgtgttgcctgggcacgcataaagtaattccttgcaaaatatgctgctctcattagatgctagcttataacttccttctgtcagtttctaatattcattgtctgttttttccctttctttttcatctcagatttgaagactatttcaccaaccgtgtgaagcaattaatctatacatttcccgaagatgccacaactagtactggtgctccattctggtctgcccctaagcgattcccccgtcctctgcagttctcagcagctgatcctgaccacctgcactttgttatggcggcatcaatactaagagcagagacatttggaattccaattccagattgggttagaaagcataacaagttcactgaagctgtagacaaggtgatggttccagaatttcagccaaaggaaggtgtaaaaattgagactgatgagaaagccaccaacattagtactgctgcatctgttgatgattctatgataatcaacgacttaattacaaaattaga

SEQ ID NO: 15477 - DNA, 4797 bp, Cannabis sativa
ttaatatataaagataaaaatatacatctaaataaatattaacaaaaagcaagaccacatttgacagcactagcactgctaaaataatattataaacaatgaaaatgataaattagacagaagagccgagtaaaacaagaaaatttaagagtaagaaaaaattaatgacattttaccaaaagatattaatattataagttagtacagtgtaaagggggcaaaaaaaagactcattctgtgtctctaaccttgtaatatttacagggttttctttctctctttcattgaaatttataataatatagctccggcctcaaaagggcaatcatcaaaaggatgacacacgaaggaaaacaaggactttgacatagagactcaatttgatttcatctcaatatcggtactttcgtctgaatcagaatctggattgtcgtctggaagaaggcctagaaatggtaaaggtaaaagtgaggtgagattgcacaggattatcagaaaagccaagttatcaaacttgtctttggtgacaccaaagagctgagtgagaccagcaccaatcaatcccccaagaacactccctccatttgatatggacattagagttgcaaagagtgttgcttccattccctctggacataatctagctgctaaaactagtaccggcatgaaagaagcctgcaaataatcatttatcagtatttagctataatcatttaataaaaacagtcgtaaacaaacatgttttggaaatagtgatgcattcagttaactgttttgtaacatatgggaaatgtaatgcagagtgtctagcaaaattaacactagaattgtaactaaaatacttttgaagaatgcctacctgaccaagaactgttaaaattaaagaatcaccagctgcaaaccactcatcacttatgccaaattttcggtttaaaccagtaacaaggaaaacctgagcccaaaaagagtgtataaatagatacataaatatattacagtacaagaaagtgataataaaaactcctgctaaatcattgatatggtcaattttggtcttagcatatctgagaaagaaattcatcacaaacctgagtcatcccaagagctgaaccaatgatagttgttgcaagaaaaatcttctttaatggaactttctttaaaaaaccattatacagtcctacaccaagcagtgatgccactgaagtgacaagcttgactcgtcctagaaactctggagtaaaaccaagcttgttcgtgctggaaaaaaaaaattcatatcacacattgtggtacatgctagagaaacacacacacacacaaaatatatcttaatgggtattattagaaaattttgagtttctatgtttaattgtgctatctaattaaaaaaaaaaatctttcatttttgcattatatggttaaagttgttctataaggtcaagagagaaaaaataaaattgagtttaaattggagagagacagataaaatataaacatatttttgacataacataaaaagagagattttttaattaaatagtaagattaaacacaaaaactctaatttttcttttattatcggttattggactaaaatcttatttttaaaaattaatattttataaattgacatataattatagttagtttttaaaaattcccatcaataggtattacccattcaaaaataatccatatatatatacacactaacatgtgtagaactaaaaggaaatattgatatcaaagaagtaaaaaaatgtaaatttaaaggtgacaataaatacttaaaggggtaagaaatggacatacgtgaagtaaaacatggcagagtctgactgaggtgttgcctgccagaggaaaagaaatgttgtgggtagaaacacactgggctgcttgacagcatcccacaactcaataatgttctgtttagtgctacttagaaaactcgagctagccaaagtaggaatttgcccccttgctggacctaccacacgttgctcagtaacaagaacagcaactgcagatgttagcagtggtagtaatgccgtgacaccaaaaacaaacctgagatattacaatggaaaccttaagttgtcctgttcaacaataaccagcatgagaaagttgaaacgagaaatcccaacatataccttacaccataagcatcgaccagtgagccactgaagtatgaactcacaattccaccaaaagctgaggatccccaacataaggactgaagagagcctgaaacactttgtgactcaccacgagccctctctactaccatggaatctacaacctacacaaactttatcatatttctgaaatgcattatggaattgaacatgggaaattccctaagatgcttgtcaatgcttgcagtgagacaaattcaagctatgacaaaatactttatgattgacaaactctaaagtagggctgaccattcgtgtactcgtgtcgtttataaataggtaaacctatgacacgacataattaccacgatatttaaacatgccatattcaggtcatgttaattcaagctatgacaacatactttatgacattgacaatctcaaaatattagttctaaagttcaggattatagaaactgaaatcgataagcactacagctgattctatttgcagggaacctcatatcaaacaggcgaatgtgaagcttagattaaccataacttattaagattagtacaagaaaattcaaaacatagatagaataatatgtttgggaggaaaaaacaatatgcagaatcatgaaattgaaatatagtgcaaagcaaataacttatgattatgaaacccatattcttacgaagcacattttgtttataaatattaaaaaaaaaatcatacatttttaaagcttccataaaactataacatctgaacaatactgaaagaagtcataaattagaagatactcacaacatctgagaaggcaacggagagagacccaagaagtatgcaaaaagcagcactatacttgctgtcaacaagactagccatcaaggtccatgagaatgcaccaagaagccctgataaaatcaaatacgatcttcttcgatagccaaatagtgggagagaatcactttgaaaaccaaaacaaaaaacaacaacaacatactcaaaataatgaaaacagaagataaccataaagcgagaatcataggaaataagtaagttagaataccaagtctcacctaataaatccatatactggtttaatgagccatggcaatgcagaaaagcctgttatcacagctgtctagtcaaccaggaatttttatcagtccacaagacgcaaaccagtaattggataagcatgtttgaaaagtttatgagaaaagctcacatacctctgcaggatctaaatgcaaatcatcttttaagtaaaaactaacagcaagtcttgaaagtcctaaaacaccttgcacaaaatacaccatagccacagcaatattatcaggggtcaaatccaccccaaagcatttcaccccacttccgcggtgtttattcttgcgcatggcagttttgctaatggatggtatttctgctgcctcatcttttgtcaagatatcaccatttctggcacctacattgataatacaaaggattgggattaataataacaattatgccccactgaaccttgaaaagatgcttttaggttaccccccaatgcatatctctactttaagtttagttgctcaaagcttgatgagtagtataacggcaaaaacaaagcttttagcctgaagtggcaagtttgattcttttgctaaatatttgaattttcttttttcattttgaggaacaagtatctcatactaaaaaaaatattggtttaggatcaataggacccacttcatgacagttaatattaaacctgaaatttatataaagctcattttttttattcctaaattttctcaaatcccatcaaacagttagtttgttattgttaattgtctcaatcaaaacttataccctacaccgagctcaataaaatccattgagttaacacccagaactccaaaatcttataaccacttgtaataaacaaactagggtaactattaacaaagttcctttttttttttttcgtaagaaattatctcggcgaccaaacatctcaatttccataattaagagtcccccaatcgaaagaaataaaagaaaatattaatactatggtgataatttctcataaaggggttaccaggcctgcaattgaaaagggtctcgtcgttcgaatccccactgttgggcgtcgtcgaagacaaaggaacagaaaacgacatgtcgttttcggaaagcttacgacgacgagctctccttcgataagcagcggtggagatgagagtggcaggtctccggctgatccgcgagatcaaaaggagaggagaggggcaggagactaatgaaagaaatgaggtttggaagggcaatattggaattgaccaaaatgatgaccacaccatttcattacctatcatatgatttcttcgccaatttgttgaggttttcttttttcttaattaattttttaaacaaactaatttgtaacaggtagttacagttaatgtgacgtaaatacccctgatgcgtgccactaacttcgaacagaagataaggactggcttgcaaatggacacgtattgtgttcggcccaagttcactcagctaggttcacaccggtcgtacacacttgggtacatacgagaatagcccacctcaatatctgtttaatgggccttagccttacaaacattt

SEQ ID NO: 15478 - DNA, 4928 bp, Cannabis sativa
  modified_base (108)..(132): a, c, t, g, unknown or other
aagtcatatttttcaaaatttccacaaaatgatccaaactcaattccaaacaaacatccaagtgttaaaaaccgacaatgctcgtgacttcttcaattctgtacttgnnnnnnnnnnnnnnnnnnnnnnnnntgttcatcaaagttcttgtgtagatacaccacaacaaaatggcgtggccgtacgcaaaaattgtcatttactaaaggtagcttgatctttactcttttcatcccatgttccagaaagattttttttagtgaaaaggtggaagaaggaagtgtggatatccaaaaaatctatatgaaagaccgcctagcagatggtttgccaaaaccgatcaataatgacaagttcatatgatgtcgatcctctgttggtttagcagataggtaagaaacataacatgggaataagaaaatatgacttcaagtgggagaatattaaaatagtacagttatatttatttattaaggaaattcttaatctagtttataactaaatttaagaatggcttatataaattgatatttataggttccctaactatttttgctgttaatatgctttagacaaacatataaattgagatgttgtaatcatttttaagtcatctcataatcatcccatttcttagagaattaatttctattccgtgttttctttttattgagaaagaattggatcttcttcttagctagtaaaatattttttaactctaagttgttgagcatcccaattccctaacagtttatatccctaatttttaggatattagttgacaaaactgattgtacaactttttgcaattagcctattaatgggaaattatttttgaggaataaacatacgaattttcatggtatgggtgtttctaattctaataaaaaaaattcctaccataatcacacctgccacaaattttatgttttttctttcaagcatctctttcatcatggaagctgaaatataaagcctaacctcaaatgcatcctccggggtttgagaactcttcaaacaaagatacagttagcaaactcaagaaatatctatgtagtgttaaaacaatcctcagtgagcatggttcgatagatttactaagtcaattattcagaatggctacgctcaatgtcaaatagaccactctattcgtcaggttctcataaagtaaaaggatatctatcctagttatttatgcagatgacataagattgacatgtgaggaggtggtgggaagaatttttatctaaggaaagcaatattaaaaatctttttaatcttagacattttcttcgtacagaaatagctcgatcaaaacttggcatctttgtctcacaacataagtatgtcctagacttactaaaagaaactggaatgttaggatgcaaaccgctgtcaatttcaatggattccagcaagaaagttggttaagaaatcggcaggaccccagtggacatggggagatatcaaaggctatagttggaaacttgatctatctatcttatacaagacctgacattggtttcccagttagtgttgtcagacagtacatgaacaatcttactgaagaacacatgaaagtttttactagaatcctaaggtacttgaagatgaatcctatgaaaggacttctattacagaaaagtaataacatacagatcaatgtctacagtgatgcagaatgggcatgagatgtaactgagaggagtacttcaggaactatggtcctttaaagtttccaatttcccttttatacttcaagttataaatgtgaaagtggttacatccttggggaataatgaaagtggtgaaatgtgaacatagggaatgttcacagcttgtatacaagttttcttgaatgagccttgccacaatgaaggtggcacaacccataaaatggcttctcgtcactgagaaaattgaaagtgctgcaattcaaactatttatactccattcagagttcaaacagtcggcattttcaccaaaactcttcccaggaatttacttttgatgaattattgaggaagttgggaatgtttggtatacataatccatcttgagagaaattctagaattaagtaaatattatgtatttaatttggtatcagtagggaaaaccaaattatttgagattgtttatatttatttgttttatacctctgatttgtagtatattagttgacaaattgattgtacaaccttttgtaattagcgtattaacatgcaactattttcgacgattaaacatacgattattctaaaaatcttcaaatggagtctttgttgggattggggtgctcaacaacttaaagttgaagtttgaattggtaaagaaaatatattagtagttaagaagaagatacaccactcacaatgagaagaaaacacagaaaagaaagttagtttctacgaaatggttataagatgatttagaaattattacatcatcttagttcataggtatgtctaatgtgtattaactacgaaaatagttagctaacctagaaataacaattatataaatcattattttatttagtaaatctaaattaagaatttcctaaataaatgattaattaaatataactttactatttctcccactttaagtcattacttcttattatcattttatgcaacttatgtatctgctaggccaatagaagatcgacatcatataaacttgtcattattgatcggttttgtcgtagcatttgataagttgtcattcctatggatttttttggatatccacacttcttcaatctttttacgaacaaaataatactgaacttatttgtgttttgtctttgagtgaaggattctttgtcaagtgtaaggcactttgactatcacaaaacaaagcaatcttcttttgtttgtgctcaaactactccaataacatttgcaaccagatgatctctttgctagcttgtgtagttgtgacatattctgcctccgtcgttgaaatagccacgatagactgtagttttaaaacctaacttacataacctgtggtggatttcacttttatcaagatcacctgaataatctgaaacaacgtagcacttgacagtaaagtctaattctccatctttaatgcaacatttgaaagtacccttagcatatctcaagatcctctttacaaacactccaatgttctataccgggatttgccatgtatcgactaaccactctcattgcttgtgcaatgtctggtcttgtgcaaatcataacataaaattaagctacccattgtttatgcatacgatactccagacacttccatcctctagcttcactgttaggactcctatttgagaataactttaaattaatagagagagaggtagaaattggcttacaaatttgcatattaaagcgatgcaaaattttgttgagttaatttttttgagaaagtccaatcttctcattatttctgtcttggtgaattcgcatctctagaatcttgtttgccacaaggatctacactaagtctgttacatccaaggttcttgatggattcagatctcttataccaacatatcgcacctgattgagatcgtatagagatttgttgaacttgcaagtgaagctctcttttattttttcttcatatcctcctttttgaagcatataaatttcttcttcaagctctccatgaagaattgtagtttttacatctaactgctttaagtacaagttaaatgtagcacacattgttaagatcacttgaattgttgcaagtctaaaaacaggaaaaaatatcttgttgaacttaatgccttcaatcggaggaaatcctttcaccaccaatctagcatgatatcactcaactttgtcattgccaacttgatcttatagactcatatgttcatagtggccttccttccgtgtggtactggaacaagatcccatgttctgctcttatggagagcttccatttcttcttgcattgctgtcatccacagcaatgcttcttggctttttgtagcctcatgggaagtttatggctctccatcctctataagtaggcagtatgcaacattactctccataacatagtcttagtgccaagcttgttttctcctttctcatattggtcgtcgaacttgtggagttgagtcagcttgctgcccttctagtttgtgctctagtgctgcttcagtagaaatctagttcttgttaatagtttgagtcatagtggtctttggtttttcttttaaagtgctatcattttcttcttgttctacttatcttctaaacatatcacgtctctattgattatcacattgtgggcagtgggatccgacaggcgataccccaatacacattttgttgtggactttatgccattgttaattgtcatttgatatcttcttgtttatagaagctatgaattttgttactggtatgttctcttccgttgtttgttcttaaactcttgaacttcttttttgattcaagttcctgataagccccaatacacattgtttactctaggagaccgagggaatggctttggacaggggttattttgtattcaggtcttttagtaattttttcctagttttgttttagtggctatgttaatgatagaataatcgtaagagtggaaatagtctgagttatttttcaaaataaacaccagtaatgaattcttcaagtgatctttattctgaaaaaacagtgacaaagttatagtatcgagcatttgagagacctgtctctccaaattttcaatctttcgagaggattggtgtctccacaagagtctactcttttctaattataagttaccgtacaaatgattccatttcccttatttacaggtattggataacataaaatggtgccagctaggatatacaaaaaataagagaaaacaacagtaaaagccagcttgataaaaataaaaagcctcccc

SEQ ID NO: 15479 - DNA, 4699 bp, Cannabis sativa
tctgattaatttttcaatgcaacataaatatgtttgtgcggtttttttattagctagtctacatttgaattatattagcaagaagaaaattagaggtgtagaaagatgggcgtgggatgtgtaacaatttgttgtttgacaatggaacttaaaacaaggaagaagggaggaatttttatttgacaggtacagcaataagtaacctatacaagagggaaaaaaaggagtataaataaaggaagctcttgtaacctttttagttgtattaattatttttattcatttgcggttctccctgtgtcacttcttactatattgcatggtcataatttttagtttgtgatgtgccatggcttttctctgcaggctcagagtctgaagatctaccatcatggtttcagttcttcaataaagagcttgtgcgaagtgcatcgttttctgatcatgaagcttttgatcatccagtgacatgtaaggtgttggaaagttttagtcttatgtttgacttgtgccttataatgcaagactcaatgtatagcttctcatgacaaatgcgttatttagaattgttgatgattactctttcatttaaatttgattctgttctcctctcttgcctaaatttacttccaggtcttttggttgtctcttcaaaggatgaacagcctatcaaccagtttgttgatctcttcaacaccaacaaactgccatctctttttaatgatggtgcaatggacccgaagattttaaagcattatttattggttcatgataatcaagacggcagttctgagaagtataaacatattttctgatttcttagaacttgttatatataaatgttgttttaatatatgctcatgttacagtgtgagacttggtacctgatgactatttggtttgctaagaaatgtacattgaatttctattagctatctttatgaaaatttcaactaaataactacgtcattgttgtcctaagctggattttgattggaaactaaaatttattgctgtttcaactccatcagtcgtttccttaattaacatgaggatttgttggtgtctagatcatggtataggtatcccttgtcaagtttaagagtctaatttgctggttcaacttcatcagtcgtttccttggtctctgtgatgatatcttgtctactttcacagcttttctggactttaatataagactaagcaacaacttaaattgaaaataatttgggagctcttgcgattatctgtgcagagcagctaggattctaactgagatgaggagcacctttggttctgactgtcaattactttgcataaattcctctgaaggcggtgtagttgaacatgatgacaatccttgggtgccttatgtaagttacgattgaggattttataaatcatttatcgctgtgtattccgtctccttccatctttcagtttattaatagttgataagatacaacgaatctgctctagctaagccttttttttaatgacagaaatctgatgcaccccatggtcagaaacttggctgctttcttgatgttgatgatcttaatgaggtaaatttctgtttctcatcgttttcaataccatcaaaaggttacatacagttgatgattcaagtcgtttttgcttaaatcagaattttgaccatgatatccaatttttacaactgggaacagatgaaagatatcatgcaagatttgtctacaaaacacatcattccttacatggagcagaagatacgtctactcaatcaacaggtatggcatttcacatctttgggtgtaatatattttctttgatggtatatgactgtcttcaatggttgtaaacattaaacatggaaatgagaccttcccatctttttataaatacacaacttattgtatcttataaaaaaggaaaaagttgtgaacttgtgatttcatcatattttccagtgctcatagtgatgggaacactgcatgttatatatatatataatatttctgataaatgaaaggtaataataatgacttttggtctttcttccttttccttgtttcttctttgtctcattttatgcttttatcaggtttctgcaacaaggaagggatttaaaaaccaaattaaaaacttgtggtggcgaaaaggcaaagatgaagttgtagaatcgtccaatggttcgatgtatgtacaaatatttaattgttaattgcatggttcttttctcaccttgttatcctgcctgatttggtttctttattttgcttttaaaggtacaccttcagttccattgaatctcaaattagagtattgggtgattatgccttcatgctgagagattatgaacttgcgttgtcaaactatcgtttaatttcaacggattacaagattgataaagcctggaagcgctatgctggtgtgcaggtagctgttacttgtattttagtgaattcatgtttgtttgatttgggatttgattctcagcccttgtgctttgtagtaatagtaaatccttattttatgtttttcctcttttataaatagttattcttcttatagttccttctaaattctaatcattatctctaatttgggaagtggcttgccttttaagggccttgagataattatgtgttcttgtaggaaatgatggggcttacatacttcatgctagatcaatcgagaaaggaggcagagtattgcatggaaaatgcatttaatacttatttggtacatacctcagtatcttttttttttattattgatatttaaggcaaaaactatatgaggagtatatacacaatatgagaagcccaagccttattaaacattcaactgagtcttctcctggaatctatttttaccttgtccgtattctgtgctctctaaaatctgtttgtttcttttctgaagaattgtgtgattatttgacttggtattcatgcagaaaattgggccacctggtcagcaaaatgcaacacggtgcggtctttggtgggtagaaatgttgaagacaagggatcagtttaaagaggctgcgatagtttactttcgtgtttgtggtgaggtaaagcacatattctacaaacaataatgggtaagaaaatttggttgtatgcttctgataaacaaatcctgttttaggaaccactacattctgctgtaatgcttgagcaagcatcttattgctacttgttgtccaagccaccaatgtcacacaaatatggatttcatcttgttctttccggtgagcgttacaaaaaaagtgatcaggtaattataccaaaaacaaatctgaaagttaacaagggaagttgcatttgctaacaactgccttacttgttctttgccagattaagcatgcgattcgtacttataaaaatgccatttcagtttacaaagaaactacatggagccatattaaggatcatgtgcatttcaatattggacagtaagttgcaccaacttgctatgaccgtgatttctcttagttgtttttttttacctttcaatataagagttgcaaaccttttgctaaacttttggcttagatggtatgcgattcttgggaattatgacttggctgcttcacatgtattggaggttctggcctgtagtcatcaatccaaggcaacacaggacatatttcttaagcactttcttcaaattgttcaggtgacactggtgtggtgatatgtcattttttttttaacttcaatagagtttgcaacttgtaagacctgtctggttcttgaagagttttttttttccagcctgtagtacttaatcttgtttgggctttcgattctttccacaaccttaattacttgttaaaactaaagcttctttaaaataagcatggtttatgagacagctgaaagaatctaaggttggattagtgcataacatctggaattaaacaaataaagggtagaaaatattctattatgtcatattgctgtaatccaatggttttattttacctttgctctttaaaacaagttcttgaacgttaattgtatgttttcttggtgttaatttatttatgtttttcaaataaatgcagaaaactggaaagacaattgaagtttcgaaacttagattgcctgagattaacctctcttctcttaaggtcgtttttgaagatcatcgaacatatgcatcacctacagcagtaagttacattagatttgaattcttgttggttcgaaacatgtgcatagtttttttttttggtatggtcttctttctccccctcccttctgtcatcataattgcacaaatattttctcagtcaagtttaaactttgcctttgggcttatattgatggattacatttgcaaaatatatcaggctagtgttaatgaaagcatatggcgttccttagaggaggacttggttccatctctgactactgtcaggactaattggctagagatacactcaaagattcttcccaaaaagcttaaagattcaaatgtttgtgttgcaggaggtatgtaggtgatagaacatcatttagcataaattagtttgattaatttacctttatactcttatgatagaactgatatgttcttaggagtgaaagagatgaacatactggtccatttactgcaattatcaccatcttctcttcaccttctaattctccaccagtctttctctctcgctctccctcattttttgtaaaagctatttatc

SEQ ID NO: 15480 - DNA, 5325 bp, Cannabis sativa
  modified_base (1403)..(1403): a, c, t, g, unknown or other
  modified_base (4994)..(5021): a, c, t, g, unknown or other
atttattatcatgtctggtattttttattttaatatatgttataatttgagactaaattatgaagattgctataagtattaatagtgcttagtaccactgaaagatagtgcttttcgataggttgacgattttttttataaaagttattacattaagactaattagtatttttacctctgaattttgacatgtaccaaatcatgttttttgaatttttaatgtcgttaaaaatctcccttgaattattgagattgttggatttaaagatttttgtccaattttagtaaagaaagtctaatatggataaaaattcggggcatgatttggtacatgttaaggtttgaggggtaccatttgatagatatcgaagtttgtggagcatgatttagtatataaacacaatcactgcaatcactgaaatcactgaattagtaaaattgagtgcgattaatgcgattaaataaaaatccttaaatccacaaatttcaataatttaagggaaatttttaacatctgaaaaattcaaaagacatgatttgatacatattaaagttttagagataaaaatcttaattagctttacattaaattatatgaaattcgatacttaatagtaatataacacggaatattaaataccactaataatgtcttttaacatttcgcgctatttatgtgtggtgacatcattaatattgttagcaatattaaagaaagaataaaagggtagatgaatattctatggtggaggatgaaacagtagaagagaagacttaaaatgggccattgaagtaattattgtatgcttatataatatgtaccttattattataccaactctcccaactggccatagccataggccacaaaactcagtctcatatttatttatttatttggtacggattagaaatttccatatctttataagttttatttatttgtaataataataaaataaaaagattgatggtgtcttcaattcatattaccaatttatgaaacagagcatttgtttcaaacaaacagtctaaaaaattagtattgaaaaaagattagaatgaggataaatattgaaaaaaagtaaaggataaataaacactcataaagtctcatatttattagaaaatgaggcctaattagtaacaatatatatatatatatatataattacaatctattacctacctatatatagaggtcactctcctattatacatattatatatgtatatattcaacaccagctcaaacctccatgagggacattatttttttagtgttaactcccatgctacacaccactttgacttagttgaaatggatggttctttataaattaaatagactcaaattatttgtggggaggagctcaaggctcttatataaatatatatatatntatatatatatagatataaaagttagtggaaaatgtccattggaccacatctacattctacactatcatcttcaacaactacatatatttgattatgcacatactatagcctataccccctctctctcaataggtaagtttataggacaaccctacctatttccacatttaagagagtttttagtttatttattttaatgattgtgtacattataattatgtaagatgtaacaattatgtaggatcaattgtaaattttttaaaaaataattgaatagttcacagagttaaaaatagtattatttttttatatgcgtagtaaataattatttaaattttatttttggtaatgtaaattacttagaatattttaaaattttacatgtggccctaaataggtataacatacgttattataagaaaaaaaatagttttctagaaataagaaagatagaaagtctactaaaacactctaaggttttactagacaaattttatataatttataataatatagaaatatagctcaataaattaataaagcccatgtattattatcatgggtagcttttttttttctttctttttttggttggaagtgctttatgagaaaaatatccatgtatatgatcaataatgtttcaataataacaaattcaataaaaaaattaggttaagtgaaaatgaaagaagaagtttaattgaatggaaataaatgtaactaaacaaacaaaggataagccattatgattttattgaactatttattgagtgtgaagggagaggagggtgtgctttatttatgagaaaatagcttaaatactcaatatttatatatgtgaagtgatcaataatgtctcaataatcaattgaaaaactttgattgaatgcaattaaaggtaatcaaacaaacaaaaggagaagccattaaaatttatggcactattaactcaaaggataacagaaaatattttggtatggacaaaaatggccaatcaatcacaggaaaatgtcactttcccttctttttttttttttttcttttaatataattttttgagtattgatattagataagtacttaatataaatgaatatttattaaataaaaataaatatctagtatgatattaaactgtatcaatatataaaagatacaccaaggtggtgttgtttcgtcatgcaattctctaattgttttgactcgtaaacttaggccaactccaaaagagttgcctatagtggtacttgtgagtcaagtgagacccaaataggttctcataaattaatattgaaccctgttatttatcccgaatatcctgaccacctcgatctacgtggcagatgcaggttagtcggtaagtatgcagttagatctgctgaccaactagcatctgccacgtagactcgatcatccgatactcaagataaacgactttattgaataatattttataggcaaggccgaccctatgttaatttgggccttagacaaaaataaaaattagggccccagtgaaaaagtaaggctattgggattcgaactctcaacttattagactaatcaaattaccactagactacaacacataattagctttaaaagtattattaattatttattactaactatattttaatttttttttttcgaaatggggccttgagcggtgaggggcttaaggcggccgccttcttcatcttagctcagggctgaccctaatttttcttataaaagggagataagaaagagtgctcactattagcaccctgtgaagctaatttttctttttttaattgattaaaaataatttgtggatccaataggcaccaaagtaagaacttctccaacgggacactaaaaatctcaaaaatagtagagtttggacacaaaattgttttaatggaactctaaatgatatcctatatatgtgagagtctatagtgttccactaaaaatagtgggacactctagactacactactttttatttagtttttaatattaaaataacgtgtttatgattaaatttttatatttatattataatttgagatagtttaataaaataatataataataaagaatattttttagtgtaaattttagtgttatgattggaataaaaaaaataatgctaagattatattcttttggggttaatttaacattaaccccaaaagaatatacaaaacacacactaaggtggtaaagaaattatctacatttttttggtcataaacttatgggagttggataatggaaggttgtgtaggtaaatgggtctgcaaccccaatttaatgtcaaatgggtccacttgcagtagtagtagtagtagtgagtgactatatatagagcctggttgaaatctaattcctacccaccattaactgcaagtcattttcaggcagggaatccaaagggttgagattttgagactcattaaacatgtttgttcatttctgaagttgtgtgtcttatggttatggaaacatctcatttttattctattctatctaagcctgcatagcatagtgtaccaatataagatggcacatatatgctcacttacaaaattgtctctctatgataatgccaaatgagtttttgtgtttctttgggttatggttaaaattctctattttcaggttatatatgtaaacaagtgtcatgggagtggataattttgattttataagatttttggtttattattattttttgtttttaagggtttttgataaaaattaaaatgacaaagggtaactacattacacaataaataaagagattttttttgtatcgaaaaaaaaatttactgtctatcttaaaattatgctaaagtactaatacttatatttgttaaaaagatccaatgatgcataatacaatttaggtaaaatttgatatttttggagtgatttttgagtgttttgtaccaaaaacttgattaagtattataaaaagatcatttgcttgatacttttcttttggcttgatacttaaatttgttaaaaaatacccaataataatacagagactgatttgttttgagattttttggtttgatacatacccatgatttgttttttattggttgaagtattgtaaaaacatcatttgcttgatacttatatatttgttaaaaagacccaataataaagagtgtaatataattaggtagttatttgttctttctatgattggtataaagaacatgaaaaatattgtcagtaaaggaaggagaacttatttaaagtaaacagtagaggagcgtttattaacctcttattacaattttttagttagttttcgatcctaaaaatacaagtcgaaatattttcttaactttttttataatggtgttcattaaatttttgaaaaatttgtaataatttatagtgtcgaaaataaatttgaagttttttgaatacatgtggtaaactagaatattatgaactctattttcagtactgtaaactatttagaatttttcaaaaatttacagaatgataacgaatataattaacgtgtagcttaactaagagattgtaattaggaatcctctaataataacaataataataannnnnnnnnnnnnnnnnnnnnnnnnnnnaataataataataataatgtaatgtgtgtgatttggaaatgtttgtttaagaatttgagatggcaatcatacatgtaaggaatatatgattagtcccatcaaagtatgaaactgtggtggtgggatgttctcattaaggacaatttgaacttgtaatttaattttttataagaaaaaagaaaaataaattataaatgatgaaaaaaaaggtgtagtaggagtgtagtaggacctattagaagctggcgtattatgtaattattggtgtgtgattttcttttcttaggccttaaaaaatatatat

SEQ ID NO: 15481 - DNA, 9365 bp, Cannabis sativa
attatataaatatatatataatatgagtcattattatgggtggtgtggtgagtacgtatacgtacgtacgtttctgataatgttatataattttgtgtagtgtgttttcattctttgagcagctcaagaactctttccattgatatctctgtctttatatattatatatacatatagcatttattatctgatatggaaatacatatatctaatatactatatgcttacaaaattatactgctgacgtcacttaattataattcaaatcatcttttcatatattagaattattgtttttagaaaattttctaaaaattttaatgctcaaaatatggtttaagcaatttgttgtacgaaggtaggggctgtaaataaattatgtctattttcatataaattaaatatgaaaaaagatatatgtatagatattaatagttagcccccaaaaataaattaattatatatataaatttatatagataattaattgagaaattattttatatactattttttttataattttttaaaatttacaatttgagttgttccggtaattgctatgtaggttgctatgtcggttggtatgtggcttttagttgcgattcaaattactctgttgattgctatgtagattttcgtaaaaataccaaaaaaaaaattgcttaaaaaatgtatgtgaaaaatttcctaattgatactcatttggttttatcaaattatagatttaataactttataatctcacatatttaataccatgaactttgatcaaattgatgtattaatataaatataacagatgtgatgtaacatatgaattttattgaaaccacacaatacccaatagtatagtctctatatattaaataatacccagtttttatttattaatttattttatgacatgattcagatcagtgctcatagttttctaaaaaactgtctatggatttgctatatatattggtcaagaacagactgttgtacatatatatatatacatatatatacatgcatgcactgtactattatttgtctactcatttgctgaaaaactagctactcccattgactcatctcattcttaaattcatataaatatatatatctgtgcatatattggaggaagaaaactttttcactgaaattcagaagagattattaataacaataagatcatatgatgtaagagaaataaattgtgattaattaaataattcactccagtcttattgttttacttcacaaagttatttcaactaaaataaatttttttaaaaaaaaaaaatcatctattaggctggtttacaatgaaaaacactcaactctaatatggtttcttcaacaatttaataaaggatgattttttttattcccttttagaatttccttctcttgggacttaaaatgaaatcgtcgtcttcgtcatcatcatcggtatcgtcatcactcttaactctcttctttgacactagctgctgctgctgcggcttctgctgtggcttttgctgttgctgtggctttggctgcggcttttgaagcggcttcttctgtgaactttcaggtctgctcagtggttttgaaggtttcataggaattcccgaccgaatttctttctgccttctctgtttcttctcgaacgcctttttggatctttcaggagataacaaaccatgctccatcatcctgaaaatcgacaacaacaagaatatgttgatcatatacaaggccagtgctctgaaggtcaatatatagtagttcatgcataacaacatcaatgattaacacaagcaagcaataaattttaagtctttgttagattcatagcaagtcaagtgatcagtttccatgaatttaataagattttttcagtccacgggagtatggaaagaaaaatatctcttcacaaggttaaccgaaaaagatgttttttaacatagaagagatgtttggataggattacgaaatataagcaaaaaaaacatagaagaatgaatgaggtgatcattttgctaataataaatttgaagaaaacgaattagatgcaaagtagtaagttcttttttctttccattagaaaatacaaggagacgaaaatcagataggataaaattatcccccccacaaaaaaaaaaaaattatatcattgaatcctattcaatccaatcctgttgttgtaagaatgtgagcttagtacacataataaaccagaaacaaggaaagtccaaagctcgaactttagacttctgccttatccatttcccgcccacaccacttatagcttgtttcaattgtaggattaagatggttccctatcataacatactttcagaaccatctagaaagtaaggatactccattacaagacatcaagtgctcggcattataaaaagtaaaaaatgtgagttgcatgtaattcgaagtcaaaattgcatcgatggaagtactttaatcatgaaaaacatttttctgttggacaagctataggctcaacaccttgtactcatatagcatggaagttgtcaaccaagaatcatgtgttaatgtttctaaacttcaaagaagaataagaaagagcaaaggagaataagtattgacccttcatcgttcgaagtctgaaaatagtatctgattattgcagttttcatcatctaataatggatgggagcaagactaatgtaaagttgtaaacctttgtaggaggagataatttcctaatcagagaacatctaaccctgcaaagtgaagtaaaggataaaaccagcacagcaatgaagaaggtaaaataaaactagtttcactcaatcagtatctcgttacatccgtgaaattcaagggtgggtggggaccttaaacatatctaagccgacttctgccatatctttctgattgaaatcagagatatacaccttagaaaccatatagtcagttctgagggaatgcagattgaaattttaggattatatgacagttgacacggaagatcaaggatggatccaaaggaaagaggaataaacagagcataaaagacttctgagttgtgcccattgcagatacagaagagtgaattttgtattttctggagactatatcgagtaaaggaacaatggtatatagattgtggaatgattaacaccttccttgtactgacaacagaaatactcgaaccgtatgccttttctcggacaataaattcaatgaattaaacaaagcaaaaaaaaaacttcatgtcaggaaagcacttgtggagcactgtttaactgatgaggaagagtaaactcaagcagaggatcaatcgatggtgatttatatactaatactgagaactgagaaggagaaaatgaaatcatttaagagttaatgatctacgagaaaaatttatgacaaaactttcaaaccatgtttggaccttggtaaatccaaagaaaaaatttgaaagaaaatacttggggacaaaaatggaggaaaatatttttggacaacttcaataaaaggcttttttatatttataatcattctaaatttcataaaattatactatttattgatttaatccaaagtgagaacttgaaatgcaaggtctaaaactttaaattgaagaagaaaacttcaagggtactactctcctcctaaagggagccacctcactaattatttaatgttgaaacttcaacaaccgtgatctttttctttaaaacttagtggtcgtgttaactcatcactctattctcatatgatgcaacactcattgtggcaaaacatggtagcacagcttttccaaacatatggtacgatgacatatagacataaagaagatatactataggcatcaaagttcgggaaaatcgagtatagtaggggttaatctgattcaaataaggatcagttttccctttattggtattttttacactagaataactcataagcactctgaaataaagcatgtaaaaaactaaggatttccttaattcagaaagttatccctgtcaattgattaatcaaaggatgatgttttctgccaaggcacaagtagtagtcacaaaaaaattgaaaaaaaatagaagattacttaaatatctttccttgtgtgaagtggcattaaaaaattcaacacaatactttttttcctgcaacaatctgttaagcacagaatcaatatttatctcaaaccaataaatacgaccatgcataagagcaaaaaggtaagagaaagacatttcatttgatctcaagataagacaattgccttattaatttccaagtaatactcaaacttctttatagcaaataagaatataatagagtacatcctagacaccaatcaacaccatcaaaagatgacttgatcgaaatcccaatgcaagcttcaatttagaaatgactcatcaataggtgaccatacaatttactcgaactattggataattgtttttttggatattgagggaggagggattcaaacttggaacctcctctttgtgatgagaggtgtgaaactactaggctatgcctatgaactgttggataattagttagagagaagaatctaaatcaagaatgcattaatttttgttagtgaaaaaagataataggaccacaatggttctggaacaattagatttaaggtacacaacagtactaaccaaaattctgccatttcactgctaggaatctgtttagacaatgactcatagaagatcctcaggggctctctctgttaataggaagcaaccaacaaaaaaacaaagatgaatggaactatatcgtattagacatcttccataaaaaggggaaaaagaaaaaaggaaatttttggttgcaaagtcagaaacctcttcaggaggatcaaatttctggccagccaaggtataaactttcttctgtttcaccttagtagtaacttttgatgttgttgcttttgatgacactactgttgtttttgttttaaccttcaaatttgaaccatcaatatcaaattaacacaattacataagattggtattgatacagacccaattaaaaaaaaaaaaaacatccaatctcaaccaattcaacattattcaaaagaatcaattcagaaaccctaaagccccaaatcaaaaacaaaaaaaaaaaaaaaaaaagaagctaatttgctcatacaaacataacccaaaaacacattcgaaacaagctaaagaaaaacaatcattccataattcaatcacccaagcaccaaagattataactttaccaaactaaatcaaaagatttcaagtgggtatacctcagttttcacagtagttgttattgttttgggctttgaatcaaaactctgccggctcgagctctcgatcttcttccgattaatagaatggtcaaattttcccttcgaagaaccatcttggttactgggtttcaacttcaccacagctgttttcgtctctgtagccatatataatatgtatatatatatatatataatatatttgggtattgatctggttcaggtcttatccaattgaaaattcttcaatttgagctagctctttttcactttaatcaataattcaatgattttctacagaacccagattaaatcttctcacaaaaaaaaatgaaaatcgtactagaaaattaaaattatcgagatagattttggtttggttttctctgggtgttctaattgggaaagaagtagtttcagttcacaaaatgaccgaaatgcccttttaactttcgaggataattagggcaattatgtcattatcgagattattataaatttataaatggtaagtgtaaagcaatgaaataatttttttttaattttaaattataaattatataatattatcttttttaaagaaaatttaaatttacaaatcacctatatatttataccaatgcaattaggattaggattaattaactatataaatttaattaacatctaagtgtaacataacaaattgaattgtgacgagtttaaacaatatggagagtgaaattattagtgtagtaatagagaattttgaatggttgaaacttgcattgattgagtacataatactcacatttgccctattaataatcggtatgtgtattataatttttatatggacatgctacatgatgttggatcgtgatgaagaagtagtaattgttggtgcaaaacgatatcgtattatccaattattaagagattgtttcatcaaagataatcaagacgataaccaaactataagatacggattagaagatgaagattgtgctatctgtttggaaaaattatttgatgatgagccaacaacaattaaagaggttgttgaatcgaagtcatgcatgcatgtgtttcacttgcaatgtatcactaagtggactcaaactgacaaaacatgtcctctttgtcgtctccgtttgcatcaattgaatgttattgtttgtaaagtctctaaaaaatttatggatggttgtgatgttttagataatatagtttaaataaatcttttattttgaaatatgtacttttatagagattcattttaattataagaaaaattatatgtaagttaatttattatttagtcctttataaatatttttacactaaaacgccccattttatatataattttttgcatttttacttattaatttacatatcattaaaaataaagtgtgtgaggattagtggttattatattttcttagaagaatctaaactttcaaatcactatcaaacataattgttgtataagtatttgtttggaaattggaaacaataatgtagtacacaataataaataaatgtgcttgatttgatagcagacaaaacagagaacataataaaataattaatcttcttcttcattatttctgtccctttatatgtacattaaaaaaaattaataattactctcaaattctcaatacattaaataatttagatttattcctagttacattacatgggtctaatttgatgaagtctattgtaccaaatagagtgaagtatcatatgaaaaatatcatatttgacaggcttaggattccacaaaaaatgtttttgtacctttttcaccatcatttgcaaccttctatacttcctatccgagatcgaaactagaatgttcttcaaattgggaatgtctttctcgggtacaaaaaccgcgaaagattcccaattaagaacttctagaaacggaggtacaaagttgtcggatatgatcaccgggacacaatcgtagaaaatcgcctctacaactctaggactattgacttcatacccttttgcacaaatgcaatacttgctgctcttcatgtagttgacatatactttgttgcccttcttcctaggtaacttaccaaaaattttcatgtcggggtctttattttcccaatgctgcagcagaattggccgaacatagccgtgcatactccccgcgaagaatgctagggttgacctcttcgatgcaggcttgcctccaatatttcggaggacatctttgggtgagtgaacataggtttcgggaagggacacatctttaccaaatacaaaaccttctttcacatcagcattgcatagagctctaatgcatttccccatatatcgctttgtctctgaaggagcctgattttgtatatgattcaagaaaattcaattctaactataagaaagagttattactaatactaggcatagaacaaagattgattatgtcactactttgcaaagataagtgaacatttttatccaaaaattaagtttatttttacccattactctatcactattagggtatgttttatattagggtatgatgttaaatactctctctcaactttgaacgttactgaaatataaaacttccattaaataattagtaattttacccttaaaattttactactgtcaaatcgtatccttttaatttaacaaaagttcgggagacacaatttgacagtggttaaaatatagaggacgaaatatgagagtggtcatacttcgaatagtaaaattgctaactatttaacaaaagtgtaacaggagtcttatgaactactatcgttcgaaattgagggaaaatatttaacatggctaatagttcgggagcacaatcttattattgacaaagttcaagaacaaaatacctatttattcttgttttaataattttcaaagtagttttttcgacacaaatgacaccctatctagaagattacgttgcaaaggattatcaaaagaagatgattatactactcttatcacatatgaaattgagaaaacatacccaatcatggcaagcaacaaggaaatgatcagctccaccagttctgttccagtatggatattttgtagcaataatgtccaagtaattcttcagaaactgtatgagattcttatgactatgtgaatcaactacatataaggtttcctctaacattctagagctaaaaggcaagtaaaacatgtgagctttccttggatttttagtaacaaattgtctattgttctcaagctgtttcataaaccatccttcagaagcatatattcctgtgagtactggtgtgtgtagtataggcctatctccttccttgtaaatgtaaattttaagagtttgttccattaattcataactcctgcaaatatgtcaaaatcattattaaaatcaaaattaaggacgagtttggaaacccttttgtaattgcaatgaatgtcagagtaattataaagtttagcgtatttggaagtaactgtgtaattactagggtggtaattacacaatctagtaattacactatattttaagatacaaagtgtgtttgtatatgagattgtaattacatatgaattcataatatcttgaatggcaaaacaaataataattaaacaggaaaataatagttaatatttgaaatagaaagtttttagtaattacacagtgtaattacactcaattctcatggggggccgtgaaaattagagagtatatttataacctctcaattaccatcaattacacacttacagtataattacattgtcagacaaagatgctaaattgtataattaacttcaattacaccgtaacgtgcccttgtaattggaagtaattgaaggctctcaatttcattctccaattctaatgacccctgatgagaattaagtgtaattacactgtgcaattacagaatattactaattttagataattactactcatttgtcaaacacgagaataagaattcaaatataactactacttagacatctaaacacatcttgtatttcaacacagactctgtaattactcagttacttccaaacaaacgcactctaaatcgtataattagtgattagaagtagctagcacaga

SEQ ID NO: 15482 - DNA, 6744 bp, Cannabis sativa
  modified_base (46)..(52): a, c, t, g, unknown or other
  modified_base (3522)..(3527): a, c, t, g, unknown or other
ttatttcggatgctaaaacaaataggggtgcatcaatatatccatnnnnnnngggtgcattgtagaattttctttttttaattattctttaatgaagaagttttaccatttaaaaaaaaaaatgaataatgtgtagttatttatgttatttatgaattatgattatttatagattttttaaattttttaaatagtttacaatacttgaggctgaacatcggacaggttgacaagtttcgaattaaaaaaaagtaaactcgaacatgcatgttcacggattgcgggtgtgtaagttcgggttgggcgcgttgattgggtcaacgaattggctgggtcaacttttttattttttaacccaaaaatatacatattattgatgtaattgtagagtgtcatgttgttcttgtgatctgtcgttcgttgccctagtgtcttattttggctgattttttagtgttgaacgctccctgttgtgtcccttctgagtgtgtcgttggcctttccttcctttatttctgttgacctctttgtttcttgtgtgtttgggtaagtgtttttgtcttgctctatcccttgctttctgtctagattgagtgtctcccttattatggtcttgtggggttgggtgtgttggtgtttgggttgtgttttcacgtgcgtgttggttggtaattgtcgtgtgtggttgtccagtgttatagcgggtgttaatgcacagtctttgaattctaaaagtaggtgcatcacctttaatgaagctaccctttctttggtccccagtgcttctactgtccttattttatccaaatttttccttgtggaaaggtgctatcttctaaagtatttgtggaaagtgaagcagaagcctactgtgctaaaatatggaatgtctaggtgaaagtggacaccccgatctctggtagtgctttctcaaatgtgttatattttggctttgctaatgtagctgatagaaaatgggtgctcaagaatgggccttggtgcatcaaaggtgatatcattgcgatgctctcttggtcctcgggttttggctttaaggaaatatcttttgattttgtctatgtgtgaattcatatccacaacttgccacatgattttttctcctgagttaatgccaacctcttaagtgctcaagcagggaaggtgattttcattgagctggatgaacagaaatctgcttcatggttataatggattagagtgcaaatcgagattaatgtgaacaatcctcttttctgtgggcgtttcatcaagtttgttaatggtgctgagaacgagattcaattcaagtatgagcaaattgatatttattgttacctttgtggtcggctgggccaccaaagaggcagttgttctctatcctcaccagtcacggtcctcaatcctagtggtattccttatcctctctatgctttatggctcaatacctcgtctaagtacccaagttgtttctcgggcaatttagaactttctagccattggacaaaatctagcaaagtgttgaacaagataaagccgcagttgggtcgtcttctcaagtgaaggaaggtaactcgcaggcggtgaggcagggtgtttccacggttgttcatgcacgagattcgagtaacagtcggttgtagaaattgaaggctagtgctggcaacagggctatgaaggcgtgggtacccaaagatttgttgactgagcagtgtaaggtcgcgagggagtctcatgttgagggtgggtggtattgagcctttgttgcaggtgagaaaggaggttgctattgtgccgtttttagaggatattgtggtttcaaatggtaatgccattgtagatacttccaaggtgaatgatgtggatgggtcttattcgaaccctaccttctctttgggtgatgggcctggtgtcacttcgggccacgtgtctaatgtgggagttggtatcttaagtgggtcgtcccaaccatctatttttaatttaaaattgttaaatgagcttataaaagatgtggctagttctgggccgtatgaagctttttttcctattgggtcgcatgcttctcctcgggttgatgatgggccaactcctattttgctagttgattataacaaaggtgactcgtgtagttctttaaagggccaatacatctcagctaatttggatgagaatcgatctctagccaatttcttccaatctcaagagaggtatattaaggaacttaaagaaattggtaactctgggatccttaaactgaaagcttcttgtgttgatattggcatccaaactccttctgaagttaatgagcaaacaactcctataaagaagcggagattgaactttgaagaagagtcaagagggtggttcgtgagttttcgcacgatgttagcccagtttgtgcgttggatgttgtgaatgtttcgcttgactcaaacgagtcttgggaggagcccctggctagcaatgaattgactaaagtttctcaggcaatggatacttctaattgttcacaataagttgacaaacctatttctttgggtcagtcagttaggctcacaacctggaaagccagagctagtttggtggatttagtcatcccgaacaaagttgaggcaatcattgaggatgagggttttgcggtcagtgtgcactttgctgcttttacccctgtggaggaggatgttgtccctcctccacaggagccacgagaggccttgcttggaactacagagagttaggacagacctctacagttcttgaattaaaagccttcattcggtcgtgctctcttgatctcatcttcattatcgaacttaaagtggatgcggataatctggtatgttctcttaagaattaacatttttactttaatattgtggttcttgctgtgggttgtacaagtggtatcattgtggcttggaaggccagttatatctttgaaagtatttgcatttctaaaaattagattattggtattgtgtactcagatccagagaataatccttggttgttatcgtgtgtttacgggcctccttacttccatgagaacaagaaattatggtcgaacattatgaatattggcaaaagatttggggggccatggttgattttttgggaacgttaattttgttctaagtaactctgaacgggttggttccaaaggaaaggatcaattcctaccctttattgcagatttgattaattgacagggttagtcgagccgcccattaagggtgataatctgacttgggataatcatagagatggcatggctcacattaaatctgctcgtaataaagcgctggtgaatgacgagtggtttcagctcttcccaaaagcttgattcttttgttgcatactagtaactcaaatcactggccactctatatctttacaacagactagggatggcaattcgtgttcgtgtcgtgtcgagacccatatataacgggtacatgctcaacttgaatacgacccgtttaataatcgtatcaaaaaaatgaaacccgaacacgacccgtnnnnnnacgggttgacacgacacgacccgtgtaacccgtttatatgctttatttaaatatgtcaatcaataacacgttttgaagtattcaacacatttataacccatttatgacacgttaaagtactaaaataactttaaataggtcattaacgggtcaattttgtgttagccgtgtcaacccgaacacgacccgtttattaaacaggttagacgagtcgacccaaacacgtcccgaacccatttaaggcaaacccaaacctgctaactcttatgcgggtttcgagtcgtgttatcgtgtctgacccgttttgccgaccctacaacggaccctgtataggacaaggatgccttttagatttgaagcttggtgtactagggaccccccgtagtttgttagtggttgaccatgcttggaggtcaattactcatgattgggccccaacaagaattttcaagaaagtgggtgctacgcgacttgctctaagaaaattgaatcgagaacaatttagcaagttagatactagcatctcctggcttgaaggccaacccgagcgtattcaaagtttgcctaccgggacaagaggttgggcttaagaggcagaagtaaggggagctctaaatgaagcgcttagtcagaaagccctgtactggcaacagcgagcccgcgtttcttagatcaagaatggtgataaatgctctaaattatttttcactactgccactatccaaaatagatgtaatactgttgacagtattttgagcaaggaagggatttgacttacaaatagtagggagattggtagagagttctcataattcttgggagacattttctctaatcctgtggagagacatcttcaactgatctatcctacccaggctactcttgttcttgggcagattattcaggataataatgtgttagttcaagagatcatcttttcattcaagcttaagaaaggaaaagagaggtttttaactatcaagattgactttgtcaaagcttattaacatggcagtcattcaacttaaaaaaaaagtataatatataatgggttgtatcccacattattcatgagtgtggttaccaaattagatcaacaaatcagttacatatagtttgtatgtttaacaaattagtactagataaatattatatgagagatataattttaactttttaattgttttttattaacatggtttgtattatgtaagtgcgtattttaataacatggctgacgacaaatatattggctgaagcaataatgtaaatgttgtcttgtgtaagacacacagtaaaaaatttgaccatgcaattgttgtcttgatatttttatttttattttctcaatatatgtaattcaaattgcttctaaatgatatcatttctaacaagcttatggtttctccatatggtggcacaacttttctttagtttcaatttcctttgtaaagtgatccgcgaataaaattgtgcatgcattgacgtacgtaactctgttcatatagttgattgtactgaaatgtgcgtcttctttgctaaatgatattttatccttaatttgggatgatttaagttagtgaaattatttaaaaaaaattacttttatttgattattttaatatgtttttagcatacaatattaattaatcaataagaggtactttgtaccatttgccttgatgtttttattttctcaatatatatatatatatatatatatatatataatccaaattacttaaatatataggtctctcacgctcacttactacattactttcgtatgattttagcatacaatactaattaaacaataagagaaaaaaatacttccaaaattattactcagaaaaaaacttaattgatgtccaaactaattaaataaaataccaaaacaaaaactaatctaatataagctaaaatttcaaagggaggaaaaaaaaagaaaacgaaaactattaacacactaaaacaatctataatataattaataagttcaaccaaaaaacttgtagttcttagccgaaatgatgattgtcctaagagctccaataggtgctacaaccatcaatgttactcccaatattatgcaaaactgaaaaaaaaaaaaattaaagaaaaataaacacatcacatcaaaatacataaataattaaataaataacaaaacaagcgatagatatgtatgtaagtataatttacccaatttgcaatccaagacaaactatattttttaggcttgtagatagaaagccacataacacatggaagctgaataaaaagaaagaattgttactactgaaagaaatcatattatttagtaaataaaaaagaattatagtaatattattttgcttacaaaatatgtggttggagcaaacacaaatccaccaaagaaaccaagaagaccaccaaagaaaggaatagccatagctacaaccatggtcattactgaacaaaaagagtaattttattattgtttgatagttattaattactctatatatatgtagagaaatatatagacatttaataatttaaaacactatatagaatatactcacaaacataagtggtacgagtgaaaaatcgaagacaaaaactaggtgtgaagttcatcttcttcactaacacagtttcaatcatatcaaaaactggcattgcatatatctgtagacaaaatgagaaacaaagagagtattatttcaattaattaacataattcaacattaaaaaagtataatatataatgggatgtatcccactttgttcatggttgtgtgattaaattttaataattaaataaatactatatttgatgtgattactaaattggatcaacatatcacctacatatagtttgtatgtttaaaaaattaatactagagaaattagataggagagatataattttaatgtaaatgtgtacctgatagcttccaataacatggatgacgacaaacatattagctgaagcaataagccaagcaggcttttcaagggtgatgagaatattgtcatctaccgagttaccaaaaacatagtaacctatcaaagcaactggaaaataacaaagagctactactatgtaagccacaactactcctctccacattggtttcttagatggtttttctggtgtggatgggattgtggcttgaatctcaagcaccacattgtgcccagcataagcaaaggccacatctcccaatgc

SEQ ID NO: 15483 - DNA, 7607 bp, Cannabis sativa
ttttattgggcaaaaagtaaaatttcccttttactttaatgaatacatgaaaagccaaattaacaaaatttattcatccccataaataaattttattaatgggaagaaattcatactctttctcttctaacatcaataagaataaagactatccctaaaaagataaaaatcagtttcattacacattttatgcaattttcaatgtattgaacaacaaataaataaaaatgttaattaattatgaataagttagaattttttattggtggcatatgagaaaaaagaaataaaaaataggagaacaaattatacctacaaagctacaagtcacctcacctaatttccccctccctctgaggttaccggcttgtccggttgatcaattctagtaggactgattttgtttgtgtacctaaaatgaaaaaaaacatagattctattttaatagatattaaattaaagtatagactatagactatataatataataatatgaatgactatatacactcattattatcaactagtgagctctttcgtttcattcggttttcgtttcgtgtcgaagtaaggacccgaagctggctcttgggaaagaaaaaaataaaactcttctctggttagtccactcttgcataaataaataataattaataaatggaattgagatttgatacaagatttgtttcagtaaaatgcatgcatgtttttctcttggtttgtttgatttggagtattattatggctgctactgactcgttcttgatcggatcttgagtttttggttttgttcttgtttggtttgtgtgttttggtgttcagatttgagttttaattttcttagtcaaaatgttattttaatttgctactaaacgattttgtttgattatgtggcttgttttgttttctgtttgggtggaaaaaagaatgataacggaactgaatcctttgaatgtttggtttatatctaaatgggtattgctagttttattctatggggggaatttccatggttgaatcttgtttgattatatatggttgaacttgcagggtggtgaatcattgatccaccatatctgaaatttccagagcatattattattaaccatggagctgcctcagaatggaagtgcaaggagcaatgaatcgttatgcactgtggcagaaatcgaagacattgatttctcaaaattcatggatagaccacctagacccttgaatatggataggaagagatcttttgatgaaaggtcgatgagtgaattatcaattgggttctctcctcggcactcctctagaaatgctgacttttcacgaaatatggaccatgctgattttgtttattcacctagtagaaggtcagggattaacactccaatgtcacagcatagttttgaaccacatcccatggtgggtgaagcttgggatgctttgaggcgttctttggttcattttcgaggccagcctgttgggacgattgctgctttggataactctgaggaagagcttaattatgatcaggttctttagaaaattaaagtgtggttttctttggagggtgttacttgattgtttattggtatgtattaaaactaacttggccttttgtttatgtcttaaaggtgtttgtgagagattttgttccgagtgcattggcttttctgatgaatggtgagcctgagattgttaagaattttatcttaaagacgcttcgccttcagtcatgggagaaaaagattgacaggtttcaacttggagaaggagttatgccagctagtttcaaagtactccatgatccagtaaggaataccgagactttgattgcagatttcggagagagtgcaataggaagagttgctcctgttgattctggattttggtggattatattgctccgggcatacacgaaatcaacaggagacacttccttggctgaactgcctgagtgtcagaagggtatgcgccttattctaagtttatgtctttctgaggggtttgatacatttccaactcttctctgcgccgatggatgctgcatgattgatcgtagaatggtatgttcttgcttttcccgtttcatgctttcattgtctaccaccttaaaaacatgctgctaactcacggattcattaatcttgtggtgaggggcatcaataatgtgtgttctgcaaaaagaaaagtgtggtttctagtgttggagccagaaatttttccagtggtggggacatggactaggaaatatcataacaaagtgttggcaaaatttttatatttcacacccagttgagacatatgcccccactgggcaccaatgggtccgacacgggtggcttcagagggtatcaaacatcttagacaagtactttaaaatttaaattaatttcttactgagaatgctgacctcgttctctgtaacctaaccactaagaagtagttggatgagttgtttagtgtgtgaggctcttgtggctctgtaaggccaagtagttgaaaagtattagttgatgaaaacaaaaagtggtcacggtttctaagtgtgagcttttttcactttcttacctaaaaaattgccagccatactctgattcacattccagaagatttatttgatgaatacaaaaatttactgattgaaaataaagattgttgatctcaaacccacttaggctgatcattagtaccggtagaatttgatttcccttaaaatttcttgtggtttcctgctaaatataattgtttcaatatctttactacaattttttattaattatctaagtacatgttttcagggcgtttatgggtatcccattgaaattcaagctctttttttcatggccttaaggtgtgctttagttttacttaaacaagacgaagaaggtaaggagtttgttgagcgaatagttaaacgtctccacgccttgagctttcacatgagaagttacttctggctggacttgaaacagcttaatgacatataccgatataaaacagaagagtactcacacacagctgtcaacaaattcaacgtcataccagattcacttccggaatggatttttgatttcatgccatcacgtggtggctacttcattgggaatgtcagtcctgctcgaatggattttcgctggttttgtttaggcaactgtattgctattctgtcgtctttggcaactcctgagcaatccactgcaattatggaccttatagaatcaagatgggaggagttggttggagaaatgcctttgaaggtctgttatccagccattgagagtcatgaatggcgaatcgtcaccgggtgtgatcctaaaaacacaagatggagttaccacaatggaggatcttggccaggtcagtttccttccaagtttcaaggaactatatacatgttgagggcgtttgacaaaatgacatttttaatcacataaaagggtctctttttgataattcattccaaaatgagtttactgacaaactgtctaaccactcactttggcactttataagaccatctgacaaaatgacaatatgtatttttccacaggtttactctacatgtatgtaaatgcaactctctttattcaaaagaaagtgtgtcataattttagcttccattataaccgaaactaatgaactttttacatacagtgctgttatggcttgttactgctgcttgcatcaaaactggacgaccgcagatcgcaagacgggccatagagctagcagagacgagattgcttaaagatacttggccagaatactatgatggaaagctaggccggtacattgggaagcaggctcggaaaaaccaaacgtggtccattgctggttacttggtggccaagatgttgcttgaagatccgtctcatttgggtatgatctccctcgaggaagacaaacaaatgaagccacttatgaggagatcaaattcgtggggttgttgatcaatttttcttagttttctttcccctttattaagaaaaaaagaaaaaagaaattttagactgaatttcttgcctaacattacacaagtttttcaaaccaagctaaagtcaggcttagtaaaataaaggtatttgttattctgtgcttacaagtgcaaaactatccaactatttttattgttaatttctttatgaagttttgtcattttctaaattttttaatggttcttgcttcttcatccttatcgttgtttttttaaaatacaaatccgacacaccatcctcgtgattattgtttatttgattttaagaaacgccgttctatctttgttctaacttctttctaataattctaattgaaataaaaagcttttttaaatatcattttaaatattgtattttataaaaaattacaaattgaacttttaattttattaaataataaaataaattatgtattttttaaaatagtataaatagaattttaaactaatttttttgtcaaaataaaacttactaatatttcaatataaaagtgttatgataaaactgactacatttttttgtatctattcgtattaagaattgtttttaaattggttgtatttaaaaaaatattaaaaattgaggttaaggttctatttttatcattttgaaaaatataaggtttattttatcatttaacaaaatagaaggtccaatcgataaattttgtaaaacacaaggtctaaaatgatatttacccttctaataattctcataaacctaagaaaaaaaaaataaaaggttttaatttttgttgttagttttcttatcgcattcttgatttgtgttagacctatccatcaaataataataataataataataatgtgatttacaaaagttatcgattggactctttatattgttaaatgataaattgaacactaaattaatttttcatcaaaataaaaaataataatccgatctagatttgttatgagaaaacttggtacattttctgtatctgttcctgctagaaattgtcttaagttggttatattaaaaaaaaaccaaaaattgagaccatggtactattttgtaccattttggaaaatacagggtccaatttgtgattttataaaacaaagagttcaatcggtaacttttgcaaaatacatagtccaacttaatattaatcatgtttatcgagtttttcaaaaaccgatttaaaaataaaataaaagctaaagaaaataaaaaatatatatataagatcaagacgagagtactttttggtgggatatggttgttgtcgccaaagtcaagaatcttaggcgctagtgttcggaccattgcccgctattattgagtttcaatatcattcctccaaagtaagtggttaaggtacaatgggggcattgttttgattatgaataaacttggtctaaaaataaagatttccatcagttgatttctgttgttcggagtcaaggaaatcacatcagtacacccatggagctaggaaatcattttcagacttgtggtactcgtttggctcgctagaataacatccaaaagaaacaatatcatgcttaaacaaaggagcttaaagcacaaatggagtttcttttaggttgtaacttgatagaggctttgattaatcttcgtggggtgaaaaagtagcttaatctattgctcattaaggatgaaagtttttggacacagagaagctgagctatttggttgaatcatggggaccgtaacactagatgttttaaaaggcttcatctcgccaaaaaaagaatcatattaagggtctatttgattcaaatctggtgtggtagagttctaaactagcaatagaaagtatcatttgtggctattttcaagaccttttcacctcttgggagtctcatcgccaattgataactcacctctaacattttgtgccatatcatctcagtcgcactcaaaatgataggcttcttcaagaatttacagtagcagatatcaatatggctttgtctcagattagcacatttaaatccctagggattgatggtcttcctcgcctcctttatgatcaccgctcaaacatcattggtctagatgttagccaagtttatttaacgttctcaatcataatatggacttcatcgctctaaataaaactctaatttgtctcatccctaaaggcccaaaccccacaactatctcagtattttgacctattagcccttgcaatgtcagctaccaaatcatcgccaactacttggctaatcgaatgaaggataatcttcatgaggtaatttacgagaaccaaaacgccttcatcatgggatagattatccaagacgaggcgatttcaggttttgagagtctccgctgtatgaaaaagggtcgctttgggaatggccaaaaaatggctctcacattggatatgttcaaagcatacgccagagttgaatgacactttatcgaagaatgattatctatgttgggtttgattcagattgggcagctaagatcatgaattgtgtctgaatggtctcttttttggtgctagtaaatggggacatttttggtaatattcttacagagtaggggtaactacgaagagactctttctcactttacctatccctcatatgttctaaaggtctttcttgcctccttcaagaggtagagtaggctgacctcctccatggaatacgttgtggctgaaatggcttaactttgtctcaccttttttatgtagatgatagccttgtgttcattaatgccaatgcaaaaaaaggtggctacctaaaacaaatcctagatgaatattctgctttgtcgagacaaagtatcaatcttcaaaagtcagacctttgtgtgggtcgttgaattcaataggccgagagataatttttggctaatcttatgggtgtcaagcaggttgaatgtcatctcgttcctttggtatgctagcctatgttagaaaatggaaaaaaggaagtattttattctctttgcactaaaatttgcaattttcttcaatgattgaaagaaagtctttttcccaagttgggcaggcaacacttcttaagacagtcatacatgtcattccttgctatattatgagttgctttaggctttcaaaagaactgattatgaatattcactcaatgatgacccgatttatgttgggatccttagaaaacaaacataaaatttattgggggcgatgggattaattgtgtaaagctaaaactaatggtgatttgggattctgagacttacagaaatttaatcaagctctctgttgaaataaatccccacatgccctgtacactgttcagatctacatatacagttaaaagactaggtggcctttggcctttaaattcctaggatagatcagcaagttagttacaaagtctgttaaactttgtaagtaactctttttctctgcattccactacaacatatataaagccaaaaatctcagaacaaaaatagagaccagatcagaacttagaaaatcagagcagtacacacaggaaaaataagaccagccttgagaattggaagagacttacattgggtaagttttggagccctagggttagggctcggaggtccaacatcatttccaggaagattgtacatgcagaaggaagaagaagagattaatgt

SEQ ID NO: 15484 - DNA, 5688 bp, Cannabis sativa
tctctctctctctctctcgtcttcaaactcgcaatggaacccaccactaccaccaccaccacagagctctctctctctctctcacccctctccctctctctctctctctctcgtttagcgcgatagtaaatctcgagtgttagtggggcctcctactcattggtgatcgtagttttacaaataattaattaattaatctctattaattatttatttttattttggaatttatgtatttttgagatttttgtatttcactaatcgtattcatcaggtatctcggggttgtggtttcaaaggagccgttacccgaatctcggatctccagggctcttaaggccaaacgaaactctcattttgagttcttgtcggagaagatgatggatcattcttttattattatgtttcttttatctattgtatatatatatacaaagttgttgtgtatatgagtttagaattttatatttgtatagtatattatttttattgttcatattgtaaaaatttaagatttttttcctatgtaatgctatagccaaatgtgctatagctgacgggtttgcacagtcgcttaaactataggtgacaattttacactgtcacctataatataggtgactgttataaatagtctcctataatgcttagtatccccgacagttttgtatagttggaattttttttttgacatttttgcatcgttgcctattctacccaattttcttgatagtcgaataggcgacggtcttagagactgactagaatactttatccaactgtttaatatagtcgaaaaacccaattttttagtagtaaattgacctaagatcaactaagtgatatcaacttagaaaatacataacaataagtttacgatatcttttccactgtcaatcgatctagtctgatgtatagccaatacacctgatacaaatactagtttactttgccaataccttaaaaaggacattctacttatacaagtgtaagtaaactacatcactgattatcacgtcagtgtaaatcagtgcactattaaatcgtaggactaaatagtttgaaacatataatcatgattattttttactgtgtagacaacactataatcatgaataactatatattcgtgatttaataaaatttatatattaaacatataattatgaaagtaataatgtctaattatttatttattaataaataaaattatattaaaataagttttatataaagcataaaatctcaataattttggggtattggtaatggctcctccactaacgtgttgggtgaatcgtggcttcctaacgttgaagaccctttagtaagatcaaaccatcctgctttgaaccaagtgaaggtgagtaagagtaacttggtaaaaggggaaggtggcgagtgggataatcagtagatttatttgatgaatgagataggaagctgattgttcaaattctacttcaaatagctcaagtcaatgataatttaatgtgggaggtttctgtatattttaccatattgatatttaatgttaacaaaatacagtaataatcttttttttttattgttctttagttatagagacacaagaagggaggaaatgctagatcaaaatcttttaaaatttaaactgtacttaaaagttaataatttatttgacaatgtaattactaaatagtgtatgtaataattatattttatttaaaaatacaagctaagtctaaattccaagtagtaattatataatgaactttgactaattgaacctgaaacttaattcccaaacttaagttttttttctcttcctggctaggaaagttgtcgccgtatttgtttgttggtcaaggagaagtgttgatgttggtggattctcttttgacgagaggttggagatctataatttgtgagctattggaggcgtctttggaggagggcgatggttgcgcctcattggtggggttgttgggggtatcaaggagggtattgtcaggtcttaggtggtggccatcggtagggagtgggtttaatttgctactctacgaaatttgatggaagagttttttttgccttttccattagagtattgatatttggcccaccacggtgttctataattaattagtaatttcttatatcatttattaaaggaaaattttcaaaaacactattcttttatgttttatttacaattttacgacctaaaatttttaattataaaaatactcttataaagttttaaaattataaaaatacactttattcagcaaaaaaaaaataaataaataacatgaaatcaacctcacgacaactataaaattaactataaaacaactaaaaaaaatctcatgacaactataaataaattataaaacaactaaaaaaatagttcattattttcattgaagaggtatttttgcaaataaaaaaattcaaagagtaaaaataatttttttttggtgttgatgtatttttgtaaacttttttaaatttttagtttattatgtatttttttttttattaaattaaaatgtaccaataacagtatgttacgttttatggtgcttgacaatcttaagatgccccttaccatttttctttccgttaaggcatgggacctagttttggcagactcatctccatcacttgctccttgagttggatcggtgccgaaagtgtggagcttgtggctggttggctcttatgatcccgtagctttgcagtttaagcttatgtcgttttgttcaattatatataacattttgattgttattgttttggttattgtgttattttattttgttttaattttggtaatttgattcaactttggactttctagtaagagatttggggagtttgtattcttattttattttattattacctactatttataatggtatgctttttgttaacaactacaattataattaacttttttggttcgattatttagtgtattggctatcttgttgttaagctaacttttaactatttatgagcatttgtaatagatttttatatactttcgcatttaatgaaaattagatatttccctagaaaaataataattatacaaattatatttttatttttgccaaaataatattgtgtgagtttccaaaagcatcagcaatattttatcgaaaatgaatctacagataaaaaaatattctataattatcacaaacgaaaaaaaaaggaatatagagcaattaatttcctgctatatgattcaaaacaatgaccaacccaaaataaacataaaagcaacagctaccttacatattgttctttcatttcttttcatttcaatacaaaaaaagtgaaattataaagaaaaaaaatggcataaaaccccttatataatttagagttttttttttcttcttcttcttcttctatgttttagtacatcaaaattaaacccacaacatctgtttcttcctctaaatacacaccaattcatggttcatatcctcggctctcttggtacttttcatactcttccatggaatcaaacacatacctagtgttcttctcagccgtctgttcatacccattatagttgttgttgttgttgttgttgttgttgttgttatcattgttgtaattatatttataattatcgttcatgttattcccattattactcacatgatgataatactttccattctccaaaaacctcgtgtcactcatcccttgctgctcactgggcttgatctgatcgtagccgttggttccatagtggtagtttttcgtcacgggaccagtactgaaatatttcccactctcctctcttcgatcatcctcgccctcattctcatcaacttcttcactctctggccactcatcttcggcgaattcctcgctcagaagctcattcccgacaatagcgccggcgccggtggtgctcggaatctccttcttggagctatactgttcgttataccccactccgtgaccatacaagccatacccattttccttctcgtccggaactgaactaggggccggagaacgaacctcaactactgtttccggcgccggcgacgacgacggagagagtactacagtttttgacggtgataactctgcagggagtttggtttgtggatcgacattggactggactacatttttgtgagtgattttgctgaagaacttgctctctctggctttgactagagaagaagtggagaagaggaagaggaggaagaagaagacagagaagtaatgtttggctgaggtagccattggtgagtgagggagcttggataaggaaaatgaaggcttggggttttgtgttttgttctccaaatatttatactgttatttatttattttttaaatatattttataaaatgggcgagtaattatgcgtgaatggaggaaaggttaaattgaatgatgaaaagcattgcatgtggagggtgaaggactctctatagctattaattgattatagtgtctaacaatatgtgatcacacacacttatacatacatacacacacactcacccaacacaaccgattagttttattgcatatttatcttgatttgtacctaacctcatagacaggacaacattcatggcactatccatattaataagaccagggtcctacttctttttccttcttggaccatcttgatttattatgcagttttagttagttgggttgaaagtaaaagtaaggtaaataaagcaagtaaaggaatgcatatagtaataaagtaagattgaataaataaagtagtttaaagttaattaggatttgtcagttttttttttaggattcgattccagttataaactgatatattattatagtgtcaattatgaaagtgaactattcttgattttttctgtgtaacttcgatggttcttcctctgtatatttttttgtttaagatatcgtatttaactaatccaaatgaagatgtgaagtttggatttatgtgagcctgacaagtgagaatcttacttggcttttctgtgtacagtttgggtatgttctacataagctttcaaaatcattaaattcccgctaccatataatcacacaatacacacacatatatatagatataaatattctgtttggtcccagcacttgtaagttgtagtttggttttattggtacgtcaattgtaattttcaccacaaaataaagtcatattttatggggggagggggcgagggaacaaaaaaggattatgtgcaatacaagacataaatagatgagtgattattatgaaacttccctaatgaaaattatatgaaaaatacaaatgattaaacttggaagtcttaaaagtaaagctatataaacaataataatattatatgtctaccatgatgttgtgtgttttctgatgaaagccattaatcttgcaggaatgtaatttatggacccctcagcgtgatgagcggaacaacatttgaaactacaacatatggttcaataaatcaaaacccaaaaagaaaaggttaatgatgccgacattcaaacacactgtgcttttgcttttcatgagtcaactattctgactttaataaatgggatttaattcttaagggtaatttaggagaaatggtgctacttaacacttttgtatgtgttaatattattattgatctaattaagtatcgaatcctatataatttaatataata

SEQ ID NO: 15485 - DNA, 3046 bp, Cannabis sativa
aaacagttggcagctgaaccaaaggaggagattaatgtaagcaacactgttttgggcaataacaatcttgaattaagtgactctgtgagtgaggaagttgttcagggagctgcggattctaagttgaacgagaagagttgtgaaccaagtgaaaacgaaacagtgtgtgtcactgagccttcagaaccccctctttcggtaatccaagaaggtaattttgcttgctctaaatgcgttgcgttcctgacaatgtgtgatctacaatctcaaaaacttgtgttattgtgctatggattccttaattttctctaatgcaaatattgaagttttaattgtattatcaattgttcgatactgctatgttaggaagccaatgaactttttactctgtttctatttgttaagcagttatcacaaccgaagcttcaagtactgtagttgaaggtagttctcaatccgagtctaatgttactgaattccaacatgttacctttccaagtaattttgaagtcccggaagctttgaagaacgggctaacttttggaagcttcgatacaaaagttgagtcagtaagtgaaggtgttgagaatatgggccttaccaaatcttctcaggatactgatgaaacttataaggaacgttcttctagtgtcccgagcgattatcttgaaaattcagagtctctccctcaagtgcttgaaaagctacaacctttatctgagggtacagatttaaagggtaaacagttaaaacaggagacagtcacgcagcttcctctaaatggagctcagttcccagtagtcataaatgcgccaaactatggtgtcggtttaatgcctcctatgctcggtggtcatcatcttgtacgtttggaaggacatgaagttcaagctcatgaaaaccgctcccctaactttgctgtaagtttactgatccaacaaaataggaaatgatttcgttttgtgctaatactcttaatcggttcggtgatctaatgctctttctatattgcattgtagaatgggaattctgtgacttcatctacagcaacttcggttgcaccagtaccgagctccatggccatgacaccacaaccactcccagttttcaggcacgcatatccttcgaatttctatccctaccattgcatccctcctccatattatgtgccaaacatgcaccaccagtatttgagccagaatgggtttccatcttcaaacggaaacatatttctaccaccaccaccaccgctgacagctgctgggctcaaatacgctgtttcacagtacaagtcaccgaacaacggtggaaacccaactcatttagggatgcagccgaccagttcatatcttaccgctccagttggttatgctcaaccgattgtatctgcaagcttgatgggtaatgaagatccagcggcctctcacctgaaagaaaatcaaatctacaccactggacagccggttagttttcgttatttctttaacaaaaaataagaatagtactcgagcaaactctaaccttaacataaacaaagctcgaatcgagctccacaaaatgtgaaactgtgagcttttcgtgtaattagagaaagttaacaaaactcaaatcgagtactacaaaatgtcactaattcttgctcataaacttagtttttgttatctttaacaaattaatgagaatagtactcgaatcgagcacaccacaaaatgtcacactatgagcttttcgagtaattagagaaagttaagcaaaactcgaatcgagtactacaaaatgtcactaattcttgctcataaacttagtttttgttttctttaacaagataatgagaatagtactcgaatcgagcacaccacaaaatgtcacacagtttttcgagtaattagagaaagttaaacaaaactcgaattgatgtcactaaatcttgctcaaacttctgcttgctatatatttttttttctcttttgcagagtgaagcatcaggttattggattcatcccacaggacaagaaatgcccggtttacagatgaattcaatgtacaacatctccccacaacacattgcatacgcagcacctcagcaatccgctcatgctgcctatgctggaatctttcctcctcccgggcatgctatgaccgctccttcaacccttttgcagcattctcaagcagtgactggagctacaatcgaaaatgcaggacccccgaacggtacttaccaacagccccctcagcagcagcagcctcagcatccacaacaaatgaattggaatgcttccttctgataactccgaataaaaacattttccaaagccccccccctacaacaacaagtgaacaaacatgtctagtgtggatcaagattagttttttttgcgagtttgatgcgcgccgatggcctgttcttgagtgtaaatataaaatgtggcctagaattttgatttaaagaaaaaaaaaacacaaaaagagaaaaatcttcaattgggggagtcatttgattactgactaatcaagaattaagggggataatagttttttccttttttttttacttgtttttatgtttctcctcatcccttttgtttttggtagttgttcttggttatatgttggatgagtagtgagagagagagagacccttttagtaatttcttttagaattaagaggtaatataggaaatattgaaatgaagagaatgatagaataggtgggattttttttttaccagtttttccttttttttttatgatgatatatctcacctgtatacttcaatagcaacaattattatggaattataagattttaagtcattatatgagaaggtgggttacttatattttgctctgtttttattgttattattttagaatgttagttctaaattttcaaaatgaatcaaatatgcatgtgtatgttttttgtgaatgaggagtgcaagtgttttctcgattattttttgtttccgaatgttaaacaagttaggggcgatagtgatactttttgttttgatagagatccgtttaatatttgagtcaattt

SEQ ID NO: 15486 - DNA, 1765 bp, Cannabis sativa
  modified_base (1555)..(1557): a, c, t, g, unknown or other
cctcgagtacgaagatcaacaatgctggatatctactccattttccctatcatctatcaagcttgaaaaaatcaaggaaagaggattcgtgggaagagtccagtgtggtattcccactagagctcagttagcacatcgtcagccatctagctagatggcatgtccaggtcctcacgctgagcaagggacattcttgcccttgcatccctatttcaaggacatagctaacttcttcaggctatttccaactcaaattaccctaaaaggcattaaatacctttcgacgctctttattaaccctcaccttaagaggtgagttactactttcaggtgaaatccactttaaagtagggcaggtcttgatacttctactttagtcagttaggctatcaatggcttggaggtactaatgacaaagccatgtcaaaaattgggaagtactccaagagctacttcatcacttgggatgtcagatatttccatcataacatccaaagggtcccgacatacatttactcaatccccactctcaagttgagggacagagccaaccatatcctgtatctccctattgaaaggtgcaacttctgtaggttggcccgtgaagagaattttatgaagtgtggcctctaccctattggataggatattgagggcattggaatccctcttgaagatccaaatgacactcccgtgaggaagaggttagctaaaaggaaaggcttgctcccgagcacaaaaagggtgagtctaatgaggacgtctctctaacaagaattgccaaaatagtagccaggagggaacatgccctttaacaatgtttggcatagggaggaatggttgatgatgcccccgtgttgatcaggccttaaggacaggagtctgtcagtcctgtccaaccaccacctgcatctagagacaaaggcaaggctactacttttgaggataggtcctatgattcctcctcttgggatgagaggctcccaaacagccctccaaacaatagtaacttttttacattcacttgcatttagtacttatacttgtattataaatatgttattttccttttttcaaatatggcttccatgatgaaaaacttggtaaggggatctttaggtgtctctttttctggtcggcctcaagctaaggtggcaaggactgtcgagtcttacaatgtgaccaagtccagcttgcctcctcctccaggtcctccaccggccaaccaactcgtggttatagatcttcctccaagtagtactcctcctacttctcctcctcagagaccatcaggtatggcagcctagaagcacagtcaggcaacctactcgactaagggtaagagggagaaagaggttgcccacaactatattggaaaatgcctacaaagggtagatgagcaagtccaagagctagatgctgacaccttggattacttgacaacaaacactctcaaagatgctacctccgtaagttgtttacttgtctaactttgtgtatgcaagactttatgaacaactttttgttgggtattattttaccaagatctagattnnntaccatgtatgttgtttaacatcccaaatatgaattatctaaaatagtggaatttaaacacatataacgttaagaacccatacattgactgtagtagaattaagtgtctccttctacttagatcactaacccttgttcctttcagtcgcagagtattatcaagatcagagcctgattctccttcaggtgttggattcttcatagtctt

SEQ ID NO: 15487 - DNA, 3668 bp, Cannabis sativa
tgcattctaaacatactactgttttttgtctgttgaacaatttgtcatcttgcaaagcaaaaaagattgcctttcatttcaaacaacaatattgctgcctctaataaaatgttgaaacttttgtctgttgcaaccaccctgcaactatcgtctgattatgtaagtgatagtgtaagtgatattttggtaattaaaatcacataaaatgtataaatgttgtctttaccttataaaagtatttttgtaaataaagtatcaatttatattttctatataataattctaaccacgaaatacgcgcgcccttacattaattccctgattgtgcctaatctcagtaattaattatctagtgttatttatataatattttgtatttttcggttcgtgatgtaattttctttttaatctacgtacgttttcttaaaaaaaaaatgctattttgagcttttttagtttttttttttacatattaggtatttttgaatacgtaataatattaaaagtgtcaaactttaccataatctaaatttattttttggctaaagttttaagttttttattttcgataataatgacgatatcctaattgaataatttgatatgaaaaatcttatcaccatgaaaattaaatggcaaataccaaaacaaaacagtttttaataaccgcatcccacaaatccatatttatctcctactattcctaatgcattgaatagttccctcctctctacccctcctccccctactctccccaaaccaaaccccatttttcaactcacatgttctcacttgacttttaagcaacaaaaactataatgcccatgttggcaataggaaacacgacactcactaggctaatttcattaaagagttctctttttatagttgttgactttaaactctttttttatttttttaatggaaaggaattcctctagtaatttaaaaagaaagttcaacttttaaactaaagattgaaactttgtatgaaaatgcttagatagaatcgtagaaatacaacaaaactaaccaatcaagagtggggcagccggcagaagaacaagaaacatcttaagattacggcagaggatccacactccccaactgccaacgaccccatcttctcaaccccacaccacacttaaatgtgtcagccacgttttaacttttttagcaaaactcttaactgtaaacctttattttaaatcaataaataaaaattaacccaattaatgtgatccctcacaaatacgtctctctactctttcacaatccaaactttaaactattgcttaacattggttatggctatggctatggcttcctccacttttctatgtgtttctcttttggtccttcacctccaaccggcagctccttcttccgttggggaccttttatctcctattctcgcgcctgtcttcggtttgattcttcatctattatatgttttctcaaatggggttttatccattttccttcaaatttttttattggttttgtatgttttctgatgtggggtttttctattttccgattttatttgagtgattttttgatatggtagcatcaaaactttgtaatgttgaaaaggggtgtttatgtgttagaatagatgatatctgcaaaccagtgcaatgtggcaaaggcacttgtaaggcttcaagtgacactactttcttgtttgaatgtgtttgtcaacctgggtggaagcagactacttctaaccaaactgatcacctcaaatttctcccttgtgtcattcccgattgtaagactctctctctctaaactttttttgatgcttatatttagaaagcaaagcatttttatcttctcattacaaattttttcagtatcatagtccactgttcataatatgaacagaatcttttctgttctgttctgtctaatgcttgtttaatcaataaaattataagatcatattgtacttctaattgatttggataaaaaaatcaggggttcttttaacaaaattattccctcaccaattgcatactaaaaaatagactaatggggtcatttttttttattattgaaaggaaggaagtagaaaaactctcttgttatgttatatgtaatctaatattatttatgtcttttcattacaaaaccataaatttcatcatatcttttcttgtttcaaattgttataggttccattccatattcacacataatctgatccagattacctaaatatgcattcttgacatcctatcaaagccatatattgggtactattttattgagttctcaaatgattcttcgattttgtaggtaccatggactactcttgcactaaagctccttctgttaaagataaagcaaccaaaccagatgatacagtttttgatcgtaaccactttttcactactaccaaatctttacaccttttttcatggtaaaaactctcttacatttccattttgtaaatcttgtttttgcagcatgccgatggagcgaatgtagagctggttcctgcaatgcaacttcagctttcacttacgattgcaaatgtccagccggttattcgaatcttttgaacatctctagtttcccctgcttccaatcatgtaagaacacattctcattatactctctaaactgtgtttagttatgttagttatgtttgagtaatagaaaaatgctgcatatcaggtgaacttggaatggactgctcaaacctcgggttattcccaacaaataattcttctccttcgacgccatcagccgctgacaatagcaagaatcaaggtaatgcggaaaaagaaaaaatagaacagcaatgattcaatagatgattgttattttcttggtgtccttaatcctcatttgttctatgataccatttctttttccatgtttgtgtttttcagctagctcaatttctcaaggacattccctttggttaataatcactatggtgttcgtttcaatgattatgtcgaatcacaactagtaatgcactgaggattctggagcctattctgcattagcttatgtacaaatttcttataggtgcatcagtgcatacttttgattatccactccacccgatcacatctttatgattgatttttggttagctattacaacttaatgataaattatcagtattttataaataagtggatacagaaggagaggttatgtttggctgagcccttttttcctgagatattcagtcaaatatgttatttgttaatatgaaaatgaagatatcttgctctactgaaactattgatttttatattgttttatgggttaactttttctcctaattattatcatcatctgttgtgatttatatttattttttattaaactactaacgattttattttatgttaaaaataccacattttaaaactcaatttgagtattgattaatttgggcatttgcgtattattaagaatgttaaggtgttgtgtattagagcttgatagttagttaagtgagttgtaatgggttgtcattttctgttgagagattgttatataactacttttttggttctggtccgatccattgttttagcttgtatataaatgctctgatctcattcaatgaaatattaatgaacattttcactcattcattccatcttcgaattctatattctgttatggtattagagcca

SEQ ID NO: 15488 - DNA, 6495 bp, Cannabis sativa
atattctgcagaatcaaaattaacataaattgaatcaacaaacaattagcaataacaaaattaaccaaacatagttcaagaattggaagaataacatagacgataaaacaagaaataaacaatgcaagaaaactataaaatcaacaccaagaattatactagttcaattttgataaatcgacgtgatatgcggctctactccagttctagaacaccactgaaacttcttttaatgattgagcaagaacacaagtacagtacaactgagagtgattctttgtttggattctctcaaggtgttttttctctaacactcttccctgataaacttcttcatctatagaagcctcccttttacaaaacccaaaatccaatcctctcttttctctgtacatttctctctacctctcaatcaaaaaactctctcaaagcacttacgtactgttcttttattttctagtcacttgtaaaatgaagaggatggttgtatttatagatcgaggatatgaatcccaaaggcggtggcttcaaacatctaagtagttaatttgattaagacttaatcgacttcttacaatgagatctccaagttaactcttggcatcaagctctatgtagacatgtatcatgcttcttggacggacgtcccaaactgatgaagcgtaatctgaaaggacatcccagataggcacaaagccaactagaacaaactgtccggaaccccttcttgatatgaacaactagccttctggaactcctttctaaaggacgactagctttcctgaaccacttcctgaagggacgacaagatccacgagacttctttccggataaacaaactaaccttcttgaactccttttcagatgatgactaggtttccagaagacaactttcggatggacaagctagcttttcggatgacatatagctttcttgaagactcgacttgagatcttttcatttggaggaactataccacatatcattttttgttaaaggagtgatctgatattgtatttatttttggacgaaattgtttgtttttagatttttttttttaatttttttaaatatttttgctgaaacaaatacaattagcgacggtgcactagttttttgcttcggttatgaatcgaaacaaaaaccttttttgaattgaagcaaaaaatcaataagtgttggttcataaccgaagcaaaaataatagtatttacgtttacgactatagcagtggttataccacttgaattaaattctttatatttcagtgaagtaaaaagttttatgttgtagcaatgattcttgcttttgatcaaaagaagaaaaaaaaaaccatttacattatatcactattattttaatgttaccgtgcatcattataaaacatgtattcactaaaacaaagactaatacaaatcgtgcaagtacatcttccttaataaaacccgacatattatattaaagaatatagcgttgtctttgacttgttactatgaatatttgaatataatatatggtatttttagttaggtaaaaagtataaatattgccttgcatactttaactcatatggtattgttcaataatattaataacttcatcgaaccaacaatatcaacaaataataataaaaaaaaaaaaaaaaatcaaactttgtttcggtatctttgtacgtattacgtaagggtgtgtgtgtttctttttctttcttatgtaacgtctttcagtttcaaatataacaatggtaaactcagtcagactcactcttatcttacattgaaaaatctgaaaaaccatgcaaaaagaagcgaattcgctttatccatttccagtttctgcgttgcaaatgttcggtgaaaagtcttaaccaatttcgtaacgttcttccactcctaaaataaatattattattgtatatgtatattttgtcagcatattttattttattttttcgtattgactccaatgccaccttacttaccaattccaatttcattcatcaaaagacaacctttattctccaaaatatttcagacgcagggttccagacttttatgaaaggttgaatgatttaatgggtatgaattctttagctgtgctgggaaactgtgtatcccaattgggattgggaggtttcccatccaaatcatttggttgcctttccggttcatctggtagaactatagctttccatggtaatgcaaaaaagtcatttgagccaaagaaagaacagcagcagattgttagtcaggaggacgagcataatgtttcaaagagattgcataaggatttgagcttttttccaagtgcgtaatttttacatactttttttcttccacttaatttgtttaatgtggttaggtgtggtgtagtgggatataagaatttttccttccaactatgaaaaatgtcttgtttaatgtggttattaagtcttggccaaataaatacttaagattgtacttgtttaactatgccatcatgtaaatttgccaagatagccagaaaattacttttatatggtttattttggcaccacctcttggataggaatagtgttcccaaacagctgaaaccagataatagaggaatgctaggatgtttatgatgaagaattttgtgaagttctgaaaggtacagtcggatttaaatgagatgggatacaattttcaatgattaattctagtaaacctttaacttagaccttaaaaccaatagaagaatacatgggaaaaacaattggttctgttacaaatcgcaagctatagatcccaattcctgtatatccttcttatgtactagccttataatcttaaatcaaagatgagaagattactgtaattgctgcttaaaatttttaccttgacatattataatttcgtcatagctgattttgtgggattatatgctttttttgtcatttgtacttaattgcaggatcaataactgactctgttttgtctaataatcccaaggatgatcccaatatacgaatagcgtttaaggtattgcgttaccagatgaaatgatgtaagagaatgtcttattttttttctgcattctagatgttgaaacttaattgttgcagggcttaccaggatgttacagtgaggatgctgcactcaaaatgtacccaaaatgtcagtcagttccttgtgataggtttgaagatacgtttaaggtatggtatgattgtagttttagcagtatgtaagcaaaccaaaacggttttaaaacttctaatatcgtttgatatttatggagcaacatagaaatgtgatagattatcatagtttgtgaactctattatctatgaggcaatttcggttttagagttattgacattaacttatgatttttagccttttttttaggtgtgtaaaagaagtataggtaacaacatttttcacgaaactagtttgttcattctgcattttttattgcaggctgttgaattatggctggctgataaggcagttcttcctattgagaattctgctggtggaagcatctactggaactatgatttactactctgtcataggcttcacattgttggtgaggtgcagttggctgccaatctctgccttctcgctcttccaggaattagagaagagcagttaagacgagtttttagccatcatcaggtcaaccaaaaatcttcttgttcttcttctctttaaaggaattctgaacagtattgtataataagcttcctggtaatttaatagaaaatgcatacatatgtgtggcatataatttggcccttgcatttgccatatctgtaaacctctcactactgctgaagttttaaaatatattttgacaatccatgttttcaggcacttgcctcaagtgatgcttttctaagtaagttaggcacaatccaagaggatgttgatgatacagctggtgcagctcaggtaatttacttgtttttttggtaattcctcatgtcaggttgtctgatctaggacatactaatataagtatctcattcacaacatttcttagtacgtagcattggagggtttgagggatgctggagcaattgctagtgcaagagctgcagcaatgtatgggcttaacatacttgcagaaagaatccaggtgaagtctttcttccaattggtcaatcataggcttcttatttcttttcttttcatatatctacacaagttttaagggtttttgacagaaatagaaattcttaaaagggaaaaacttgctaatgcaagggtggtatgggtggttctcctatggtgacactatatattttaagtaaatgacatgcaacacttcttatacccatgttgtgctgcaagacagtaaaactattcattttgatatactgaaaggaaatatcatgtctaattacaatttagtatttatttcttcaacccacaaaaaaaaaaaaaaaaaaactgtgggattccaatgatcagcatagccagaaattttgtttactttgaaaagaaaagaaaattagtgaaaaggcatcagtggcagagcaaccaaatgacctggtttcattttatttgattgaaacctttctttctcttttcttgcttgcataagcttaaggaaaaactcagattagtgtttttgttaagaatgcttgatctgactcacacacacaagcacacatcttgaacagattaaacaacaagagcacaaagaaattacgtggttcagtcgattactcaacctaatccactgaaggcagaagtaacaagtcttcattgtgttaaagagtctcttagtacaagtggtatctcaatataagtcccttacaaatgattaggtagtgaccttataaaatggtcaaatatgcctaaggaaactaatagaaaaatggtcggtattgaccaaagaaacactaaatactctaaactaacttcttaaatgtatgaacagctataattggcatctacacctttataatgaacattagtatctagaaagagattatccttgatgaccaaaagaaatattacttagaaattgttatacttgcattgattttacatgtcatgataaacatataaatcagtcaaattaattgcattgtaattatcgagagtcaatacttcccaacttctatttgttcatattgaaaacatgtgatagacagtactttgtgaatttgtgttacagacgtcaattgttaccaatataattctccttgtaaaattttatcctcactttgcatcaattttccatgtggcgtatatatgcaggatgatgctgaaaatattactcgctttcttgtgcttgcaagggaaccaattattccaaaacttgacaaggcatacaaagtaagaaattttatttactcatgctggttgttttactttaaacaattttaacatattgtttttccctattccagacaagcattgtgtttactttacatgaaggccctggaattttgtttaaagcattggctgtatttgctctaagggagattaatttaataaaggtaacataagtctgatctttcatgatgctttacttaagtagaacttgatcatgaagttaatttcggtgcaattttagattgaaagtcgacctcaaataaagcagccagtaagagtggttgatgactccaacatggggaaagctaagtgagtatcattttcaagctactttaagaaataggccacaaatatatgtcacccatttaaatgcattatcaactgtaattttgatattctaaagtaggcaataatgcgaataattaacaagccacttactgtacctaggaaccactactatctttgaccttgatatcatgtgatccaggaaccaaaattatttaaactagcggtgtaatctatatgtctaggaagggtgtcagtggaattttaacatatctctggggtgaccctttctgcctctacggagaggtttctatgcttaagaatctcagtggtgactatctatcatatccatgatttaagtcttctgtgatatctttaaaatagtctattctgtccctgcactatgttcgttgtatatggtggtaaatctcaaatttggtgtaggtttattcttcagataaagtcagaagaagaactaaaagaaaatgaaacagttacacttattatgctacaaattcaattagtatataatgttcatgcagataatatctgattcttctaaaccagattgaaagtgtgaagtcatattttgaacacaacttgcagtgcctcagtacatgtaggcagacactcttatggcaagagagtagtgactgtaaaatgagcctttattttatgtattaactatattatgacacccaccttcaaaaacagcatagttttcccatcctgctaaagcatatgtataggtgtgtgtgtgtgtttaatgtgtgcagatatatcaaactatcaccagtccctcctagtttttcaaatatatgaagttcgaaacatatgtttaatactgaattgttatgctttgttaacatcttctttaagtgaaaataagag

SEQ ID NO: 15489 - DNA, 5479 bp, Cannabis sativa
  modified_base (5250)..(5250): a, c, t, g, unknown or other
tatatgtatacacatattgtaacaaggggcatttatactatataatgcactctttattatttactataatttaatatatatttttttttaaaataaaaacgttcataaattataaataatattttatggtataaatatttaagtttcgagtgaaatctcatttcgtaatattacaacccaaaaaaaaacaacagactatttgattaaacaattttatgattttcgagtgaaaaaatacattctcttataaaaaaaaaaaaaattcacgcacataataaatatttattttcttttaattttaaattttttatttccctatatttttcttatttttttcattccccaccaaaatctaacttctaaacatagccttaattttttttcctttcttattcttcttaatttatttgcttttccctatataattttgatttattaagggttgataccaattaagattagaaaaactttagacaataacattgcaaagaaagaaagaagaaagatacttttattcattggaaaatgtaaagaagagaataagcttaatctcatctaatccttatatatatatagcaacacatatcatagcctcttatcatattacaaatagttttatagttctgaaataaattaatcttaaattaaagatgtttaattattcttttttaaggcctaaaaggagcaaaaacaaccactgaattatgcccaccaaagccaaatgagtttgagatagctgcaaaggtaaaatcagaagaaattaaaattaattaatcatatataaacaattaactattttaaatggattgattaaggttaacccttttccttaattactttgacataccaatattaacttcatgtttcttcattacatttggaacagtgtcaattgtaacatcaggctccaaatcctgttaaagaaaaaaaaaaagattaaaaaaattcaactggggttagatcaaaaaaaccccattaaaataatccaaattggtagaattgaggcataaaattaggaaaaaaataaataaaaattaaatgggtatgatttatagtacatcttggttaatggttggatgaagccatcctgtgtttattgctttaatggttgctattgcttccaatccaccagcagccccaagaccatgtccaatcattgactggaacaacattatcaaaattataaaaaagtaaataaattttgtttgcatgtgctactgaaatataataataataagtaatatcggaaaagtctatagtacaccctcttaaataggtgtttcggtttcaagagaatttttaagtctaattttgtagttatttagcatcacctgtaaattttcaaaaaatttcgattagttatagtgccgagaataaagttcaaaaaccttgttgcttatgtgatgtttgaattttatattcggtaatgtatattatttaaaaatttctaaatttacaggtgattctaaatagctactaaaaatctctcctcaatgtcgaaacagataaaagatctaccgaaacatcacagatttttccattaatctttattctttaattgggtttttattattttaaggaaaaggtttaatcttgccttggttccattcatcttcatctcagatgtgtctttaaagacctttttgattgcattaacttcagccaaatctcctgctagtgttgatgttgcatgagcattcacatagttcacctgtaaaattataatcattattattgttaataatgctaatataataatgattaagaaatggtttaaggattaagggtgttttataaacctcttcaggagaaactccagcatcttgtaaactcttggttatgcatgatgagacacctaaaccatctgatcttggatcagtcatatgatgagcatcacatgttatggcaccacctaagtactcagctattatggttgctcctctattcattgcactttccaagctctccattacctactccaactcaaaaacaaaattcatgattagattagataagatcaaataaattttgttatgttattgttaagatcccaatatagggatttatcagtagtatataactacctagacactctagtctaagtcgtctcttaaactaacttttgagagtgatgataaagtgattcaagattggtaagcaagaaaatatttctacatttgatccacgtgagataatgttattgagaatgcaatttgctcacttgcggatgactaactatctgataggtatggatcgaaagcccgagaaatatgactttgatactatgctgagaatcatgagatttcatctcaaaaccaattagtgatgagtgaagtagaacatattcttatatatggctaaatattaaattcttcgaagttttgtctttttgatataatctaatgattctaatccaatctaatctaatctcgtactccaaacatgaccaaagtacacattgtaaagtgtatacacaagttgaattttaattcaaaacttagtaacatgtcatattatcaagaaagaggaaaacatgccaatgtaaatgaaaaaaacatcatgttaatcataacattaccagaacaccagagccttctcccatgacaaacccgtcgcggtttttatcccaaggcctcgaggctttctggggagaatcatttctctgagacaatgccctacaagcaatgaaaccaccaacaccagtaggcataactgcagcctcagtcccaccaaccaccattacatctgcttcacctcttctgatgtggtttgctgcagcatagaagcaatagttggctgtggcacaagcagtggaaatcgagtaattcggtcccattaaaccggtatctatggctaacaatgctgaccccatgttggtgattgagtaaggaatgaaaaaaggtgaaatctttttgtatcccttttggattagagcatcaactcctgtagtgaatgctgataaacctcccatacctgttccaaccaacactccaattcttgttctgtccatctgtgtgaaacaaacatatataataaaaaaaatataagtagttgaaaagatcaagtgagtattgagtacgtttggttgggaggaatgaaaatacgaaaaagtctatgctaaatgttaaaaaaggccgatgtaactaacagtttcaagtatttctggtccgagattagcattttcaagtgctcttttcccagcaaccaaacagtatctccaacaatcgtcaaggcgcctatcgttcttcccatcaatatagccttcagatgagaaaccacgaatctgtcccgcgaagcgaacagagaaattcgatgcatcaaatctgtctatggtacttattccactctgtccctcaagaagtttgttgtagaatgtatcaatgtcactgccaaaaaccgaaaccaaccccattcctgttatgacaattctctttttgggatctttttccctcttgggagctgatgccatagccttgattgctctgcattttttggctgagaatgaaaaactaaatcaaatgcttacaaaagatcccaattttttcattctcaaacatataaaatcattttaacaaacagcttctcttcatataaggattatgaaataaaacatagtaatttaccaaaaggaacattccattcatttgggtgaatttcatataaggattatgaataaaaaaaagtaaatcaaagcttacaatcccattaaacaaaatcccattttttttccttctaacatttaatatctccctacatttcaatgcagaagaactaaacaagtaaaaatcattttaacaaattccttaagggattcaaacacacataatgatccataaccaaaacaacagcaattcaaatgaaacattatgtgaatcactacatgaatcacataagaaaccttttattcatataatcattatgaagataatcttattctccaataaatcattttgacaaacaccttctcttcaaaaaaaaggattatatgaataaaaaaagttcctcaagtgatacaaacaatagtaattttaatgaaaatgtagcttttgggtaccaaaacaatattatcatacaaaaaaagaacattccacacaattgggtaatttccaaaatcaaaacattgatcataatcataatcataatcattatacctgaaatagaaagatgcccacttgggttatttccaaaatgaaacaaatgggcaatattatcaccatgcctaagaccattatattgaccccaaaaggctccattcccaccaacttctttacctctaaaaaccacaccagaagaacaacaagaaccagcaacacctgccatttctctttctctctatattccttttccccttctaaaaaaaccaaatttttagtccatatatatataaataaagatataaatgtaataaaagattaaaactttgttaagtcagagctaacaaagaaaagattttgtaatattgggaaccaaagttggtcactccgctacctattaatattgattattattattattataaatattatgatacattgtgaatgtaatatacaacaaagtcttggtttttaggcgataattgcaaaaaaaaaaaaataaataaataaaaaaaaaatgaaaggaaaaattgaatcattttgttttgattgcttaactaccaaaaacaaacacttgaatttgatgaggtgattccttctttccttgattatcttacctgttttggttgtacaaataaatatgtattcatttattgcttatttatttttttattttttttaacaaagtacttcaatttataattttagttgaaagtaagcactaaatgatatgatcaaacatataacttgataataattgtgtggtaaattatggtacatatagaattatattggtgtaaaattaaagtgtccttttgtattattggaaaatatgacatattgttttattggtatattttgatttaaatgtcacattggtacagtaaagagcatattaccaaatactaaattcttcttctttcaaataaaaaaataccaaattcttattacaaacaaacaacttcacgttataattcaaaaaaagcacacaaaaaaaaaaaaaaagtttgtgaggaatttttaacattttttttttcagatatttagattttacttacataaaatataaaatatgatttttttattgattttttgttatttgtatattattttttttttcatataattgttttgttatttttataaaatactgtanaaatataaaaaaaaattaaaaatataaagtataaaaaattattagttttctaccattattatttttgtttaataccaagtaattaaaacatgtcatttatgatataattcgattatttattatatttatatgctttgttgtatgaatacacttacttattttttttattttgtatatggaacaaataatgttcttactgtgtaagagaaattctcataaattatatgct

SEQ ID NO: 15490 - DNA, 2343 bp, Cannabis sativa
atactagtacctttcgcagtctcctgaatttaatctcttctggatgttcaatcacattgctgccagcagttaacaaccttttagtaaaactatattatatcataaatgtgtaacaatatatgtacaagctaagatacggaaaagttaccttattatcttaaatagagtttggagaactatagtagcctgtgattggcctatctcagcccgcagacccttaatggccttctgcaaacgaccacaaagagctgcaacagggtcttgaattctttgtaattcttcatcgtctggatctggttcgtcaatttgcattattgacggttccactgattgcaccaaattatcatcaggatcaggttctgtgagcatcgtactatcttcctgagactcacttggatcatcttttatataatctatgttccgatcattactaattaaggatacattatcctcaggtctcctaacgtttccatgttcaaaattatccatcttcacttccaaatcatcaggatcaggttcatgaatattcttctgtccttgtacattcatttccttagagtgaaatgttccaggttcagctacaatacaatgcttcaaactagtttccgattcatcaggatcaggctcaaacttgttctcatggccagaataatcaggatcaggctcaaacttgttctgatagctagaatcatcaggatctggctcaaactcgttttgatagccagaatcatctggatctggttcaaacttgttatgaaggccagaatcatcaggatcaggctcagacttgttcacaaagccaaaatcgtcaagatcaagctcttgataaggttttgaacaaacctcattcaaactacaagaattcacttcttctaccccaacattcattctagtgggcaagccagaatcatcaggatctggctcttcgtggacttcagatattcccagactataggtggaagcattttccatacggcgataagcagcagccactgaagccatgcgagcattttccaactgatccgaaacatttcctccaagcttttgggaaaaatgactacctttttcatcataaaactcttcttcttcttcaaaatggtcagaatgcctcactccactcaaggtgtgacttctagatcttgtccaatctaaactatcagcttcttgggtaagctacaaaaagaacaaggatagatttagagtaatccttgatgaagcctgtaatggaatttagaattgtataccttgaaagaaacgatgcaacaaatcacaaccatacctgtctatttagattaaaaaagtttgcatcatgttcggagtacaccatgtgagcctgaaataaagataggaacagttaagcaaattccaaaacagcaggtgatgcatagacagcataaccttttgcctgcatgtaccagaacatgtgcaatttgaaatgcacacaatcacaatttgattaaattatccttgcaagttgttttctatttgtgtgtgttaacaaaaactgagcttacaagttcatggagaagagttttcttgatactcccatactttctgaaacccttcaggtcatcagttcgaagacgtaaagatatttcctctccattattctgcaacagcaacaaccaagaaaacatggagcaaaatgcaaaaaaatgtaacataatatttttttaaaaaaaacaagtcaggattataccttgttaaagccaagtacgcattttggacttatgcccacatagccaactggagccatttcagtcataatccccacacgccaacgatgctacgaaaaagagtatcatcagatttgacaggcaacattataaaccccccattatatttgtttatatttgtttatgttacatttattcttagaatgcccttttgttacaaaaatatggtctcaactatataatgagttttgggtttcttgggtgctgccctggagtgtagaacaggtcttaacacacaagctgattgtaggcaagagaagagttattttatggaggacatccatcttggcattgttatgggcagtatggctggaaagaaacagtagaatcttcgaggggaagatcagctcagctgagatactttgggaaaatcagattgtggactgcgacttgggtctatagaacaaaacattttgaggatctctctttcctagatctgtgtcgagagttttttttttgtatgtattatattgatatggtgtttctttgtgtcgccttttagtttttgtttactacagtttttcctccaccacaagtgagggtattaaataacatagcggggggaggtcggtctaggacaagcgacctctttctctttttcaaaaaa

SEQ ID NO: 15491 - DNA, 5680 bp, Cannabis sativa
  modified_base (886)..(887): a, c, t, g, unknown or other
  modified_base (5645)..(5654): a, c, t, g, unknown or other
gtgtataatttgatatccaaataaaaaattgattcaatccaattagtaattggatcagattatattgaattttgaattctaattgtattagataggatgatgatttttcaaatctaattactaattagattggatcggatgaggagaaaaatattagattggatcggatgtctagccctaatttcaacttctattaaaaaataaacaatggtttcaactgataatttgataaaaaaaaaaaaaaaacatggtttggcttcaatagaagcattgttacaagcactaatgtatccaatattatattacactaataacgacaaatatattaggcattatggttaccctttcatatttctcattaattagaatactgttgatcaaaaatataattgaatatcaaacaaataataaataaatagtcgaatattttctaaaaaagcaaaatagtctcacaaaacactatctttcacggcaaaatactcaagcagagttgagattgaggactaggattcattgattaaaggcatatgccaaaatatgatttcccgactctcggctatggcagcttaagtccgtgccttgggcccacccaaacttaaagtccaaaaatattgtacccacatatgaatgagaaatttacacaaagtattatttttggtaaaaaaaaaaaattacacttttacgttcaaatatatttttctttaatatttttacggtgttttatagaaataacaagaaaatcacatgaaaacaacataaaaataatatacaaataacaaaataacaagagtacaacataaaaatatcaaaagaccgtattttctataacaaaattcataaaaaccataaaaatatttaaaattctatacaaccgtatttttataanntttttgttatttttgtgtattttttttaaataatctcttgttattcgtattctcggaggaagtgtatgtggcaatgacggaagagtgctacatcagattatgcatggttagtatataccctccgctcctcagcatcatagaaggtgttatataccaaaagcaacccagagttttttcttgttagtaaaggtagtggaaaggactccgggagtctcattaataaaactgttataaagaaggatcagaagtcaaaagtgctctaggatggtagcatgttagcctgttccgggaaagccttcgccaaatgttcttggaactcacttgagtttgtcttatctggagctaaacgcgacgattgcataccttctgacaccaaatcagattttccccctacatcagaccttggtagtgcgcatacgtgctctgcagctcttttttgtccaacaattggtctagacaccaactttgcaaggtgaaacctttgggtgacacgtgtccttagtccctcgagttaggttgcaacagtcatgcaccacacgatgaggaggctccctacctaccaaaggtcaaatcgccatgttgtaaacaccaattattgtaacgtgctgagtaagaaaccctaggtgggcaaaaggtatgccctcgcccatacatgtggttataaaaacacccctatttatcatgtgtaaagggtgaacaatttttacttacagaacctctgctaaaattcctatgagctttcttcttctctaagagaaacaaaaggaatacagaattaatactcatattgtaaacacttgtaatacttaaacacttactagtaaggctaattcaacagactcgtggaataggaattattaaagcccggaccacatgaaaaactacttgtctattattatcgttttatatttttcttaagctctaattaattggttttcgaaaatctcagtaaatattttggtgctttcattgagagctaagaaaagtttgccagtcgttcaatcactccaaccatggtgaatatccaaaagaatgtaagcaagaaaactccattggacaccattgtggaggaagcagactccctcgcctttggcccctaaataggcgggataaaagaagaaggtacgaccaatgccgagaaccgcagggaggatgtcaagaatgtgttcgatggcctcaacgaaaactagctaccagaagatggggaagaataggacgatggcaatgactatgtgagagatgggtactacaaagatggttattattatgaccacgactcgaacctactacgagtgaccaaagagtaagaagctactcagacagagttaacaaaacagaggaagctcactgcaaagatgaaaataatgatggaacgccttcaaagcaagtttgacgacttaggtgagtccgacgacgaacctttggttgaggtgatggccaaaaagcatgctcacaaataaacagaagttgaaaccttcattccttgcaaggataaaggtaaaggcaaggtgggtgagccccacaaaaatctactcctaaacctcctcggaaagatacaaatccagctggccagccctcgaggatgcagaaggccactggtgcttttgagcctgtatgcccttctgaccctagaggcagaaccgtgccaaggggagaatgtacaaaagtacctaagcccaaatggcggaggaaccaccctagcgcttctgtcaatcaggacggaaggacaacctgggacattctgaggacagctggtccaccgcagacctccgacagcaattagacgccaagtatgagaagtacaagagtgaaaaggcaaggtcacgtgggggtgaccttaggaaccacttgagcgataagatgaggggacgtgatcttctcgagagtgacataaagaggttggaggagtagataactactctaaccaagttggtcaaaaaacaaagcagagctctcttaaactcaaaagacggagactcagagccttgtgtaaggaggatagcaaaaaccccaattctagaaaactttaaaatgccacatattgagttatatgagggaaggattgatctacgagcacatttggcgaagtacgataaaatgatgcaagtttctcgagttagtgacgacgctaaatgcttacgcttttccttaaccttgaccaagtatgcggaatattggtcgaaacaactagctccaggatcaattgatagctgtaaggacttaaagctggctttctgcaaacaagttattgctacacgtgacaaagacatggaagttggttctcttaccaatgttaaacagtaacataatgaaagcttgaaggcttttatttaaaggatgatggagatagatgccaagaccaaggttagcgatgacatgaacctaatggccctccaatttggatttgttgttgggtctttgctatgggaagagatacaaaaaaagagagccaaaactttgagtgattttatggcaaaggcccaaggcatcatcaaccttgaggacgcctacatacatgcttttggagtccctttggctccaactccttccacgaccgctcttaacttcacacctcaagttctggctctagccctaactctcccaggagctcaattttccccaattatttacggacctactacttctagtctagcccctacgcagacccattattccgggtacatgggcagcacagaacggatgtagtacaactcttggacaagtgaaaactgaggtcccaaagtctactataagccattcctagaacaaaagagtgggtaaaagccacaatggcagtgattcttcaaagaagcttaggaaggagtatgacccaaagtacaccgagtatacatgtaaaatgtcaaaaaatataataatatttagttggacatattttattaaatatgtaattatatgggtattagagtaggattataatcttacttaagctaattaagagttaattagtgaaatattgagtaaataaataaataaagcgtaatttattaattacagagatttcatcaaattgtgtgggaattttatataccatttttaaaataaaatattttcaggttcgacgatcgtagaaactcgacggattggtcagaaatatcatgacgataaatgatgagttttattggaattgtaccggattagtttagaatgttgagttgtcagtttaatcgagatagttagtttgaccaaaatacacctaagttaataaataacttaagtatttgaatgggggtaggatagtctttgaccaagatttattctaattttgtcttttgtggtttctagtaagtttttaggctgaattaaggtttagttaatagatttataatgttaggttagattataagttgaggattaatattcaaagagagaaaaaaatcaatcacaaaatcccttttctctttctttccccttcgagccctagaaactagctaaagcaaaggagttttcttcatcaaatccacaattttctagctgaattagctaaccctaggtgatgttcaagctttgaggtaagttcttcctccttttctcattgatttcttaggttttaggttaggttttgttgagtttttatatagttttgggtctgtggtgttaattgggttttgagattgtttctaagtttaaattaagattgtttgtgtatgtattgggtgattcttaggcttttaagtgtaaggtttttattagttctatttttaggttaattttagtgtgtttttaattaaattttgctcttgtttggtgcaatttatgctttttggcatcttttatttgacaagtttaaaataaaagaaaaatggaaaatattgaagaaatatgaaaaaaaatagtcaaataaattaattctcggggcaagagctcctagaaattaatttgagaaaaaaatccaaaagttatggtgcaattggagctttagaggcgaagaaaatataaaatttggaggagcgcctcaacattaaaaactcatgtcagggcatgaaaggcttaaaatttgtctaataatgtcgtattggactaaggaatgggcgtgcctaggcatagaaatccaatgcttatgcatagaaatccaatgcctatgcataaattagtagaatgctcactgcccaaataaagggggtactgcctaggcccgtgtttgcaagcagcgtagagacgtgaggatttagaaacacggatcatggcataggacctacatgtcgcgacccgtccctttgaatttcaagtagactatattttttagttatttttttaaaatttttggctataaaaggagtgggacttcgatattttttagcaagcaatctaggagtacgaaaattagagagcaaaatcaatcgcgaaggctttttcaacggcgttttcaacattactttcttcttttattctgaattaatatgtgtgaagttgctacaatgaacaagactagctaaacagtttattagggtttagatggatattgtttgatatacatttatggttctaatatgatttaattttctctcaattttttatgtattctatttcagtcgtacttaattacttttaattgcctaatcatcaattaaatgtttatgattttgatgtaaattttgagaagtgagtatcaattatgctatagagaaataaaaacaaattttgatataggacgagagtacctatgtggtttggattgcttataggattttctgtgtttaatgccttttatatgtttaatttatcacgatagtagaaaannnnnnnnnnattgagatttatatatctgagaagac

SEQ ID NO: 15492 - DNA, 4873 bp, Cannabis sativa
tcagctgaaatcccttcagcagtttcatctgaactcccttccgataatgcaaatcatcattccttcttcagctcttgaagatccaatgattaacctcttgcaacacaaacatgaacaagaaaaaggtttgccctagcagagcaagaatcacaaaaggattataataaagacgaagagagttaattagaaaaagcttaacaagctatttataaacttatttttagtaataatcaacttattcaattgtaaaaaaagctcattacaactggcaataaactgtaccaactaaaatagtgaaactcgaagctaacctgagaatctataaaaaattccctgaaaaatagatgcacctaaagcattagataaacaattgtaaagaccagaccaccagatgcatctaagagatcaaaagacaacaattcaaataacataattttccacaataaaatatggcacttacaatctctcccttgacaaattatggtcaataaataaaccaaagtacatgaatgataaccaacagaatttgaattaaaaaaatgatatacactgagtatgaccatatgatataccaatgggacatacattatttgccacacacaaagatatgattcctacaaatattttttcttattttgtattattttattaatattttagtggacctccttgcctataaaatgagagcctggctagctcacttttcacatttagaaaagtccctacaaggtcagagcatctttatctagttttactctttagaaatttgagcttttactttagtcaattctcttgtaattctcgtgattaataaaaaattgaagtagacgtagctccattaccgtcgtgacataggcaatgaactactatagatcttgtgtgtctctcttattaattactaactcatatttcatcttgccaatctaccgagcaagtgttggctaattttctacgtcaaaattttttaattatactttttgtgggatcaactcgtactgcaccactatactaaagtagttggttagtttttttttttttttgaataaaaaggaattttattcaaaatagaacaagatacaaacaagctgaaaacaacacagaacaacagctcaaagagccaacaagaggttactaaaaaccagcagcaaaaaatagactaccaagaccgaactacattaattaaatactactcatttttcctcagggtactacaagtcatgctcaagattctagcttgagcaaccttcttaacttccatgctcaatttacaaggagagacacaagcctaatcaaatatacaaccatttctgttcttccaaatcatataaatggcagcaacaaaaactgtatttattatacgattttggatgccaagagaaccccgtaagcaccattgctggacgttaatgatatctattagccacatcacatgtcccagccatctaccaatttcagcaaaggctttcttggagtaaacatagtcaatgaagaggctattatgcatttctgtaacacattcgcacaccaggcaaagatccgaggggatgctcatgaatttgcataaaagatctcgagtaaggagctgagaattgcaaacctgccaaaagatgaatctatgttttggaataataagtttatgccaaataactccactatacttcacatcttgagcttcaaaaagcgagttatagaaatgtttagcatgaaatttacctcccttttcagcttgaaacaaggttgtctcattagtacttgatcgaagtttcaaaagttttttgaagtaccagctcatgtcttgtttgataggaaggctccacaaacgatgctcctttagataaattgaatttatccacttcacccaaagactatcttgcttgctagcaatggcccaaaggaacttggtcatcaatgctttattccactatttaccctctcggaaaccaactcccctaaactttttgggaagacaaaccttttcctaggatgcaagatggagcttggtccggttccctgtagtctaccataaaaactctctatatctcttatcaatggctactgttattttatttgaaagcgtaaagatactcagccaaaagcttctaactctgaggagaagcgagagagtcaattgggcatgaccatcaaacaagaggttcctactagcccaacaatttagattcttgtttatcttgtccgagatcactccacaatcttcagtcttccattttgttggtcggagcttaacccctaagtatttcagagggaatgagccatcctccattttgactaagtccaggatctgagctttacctccttctttaaccccaccaaagtaaatatgggactttaacttattcgtaaagctcaaaaaggcatcatttaggtggctaactgatttggggttcctcttccaaaaaatgataagatcatctgcaaaacacatagtaagtttgatattaaaatttgttaaatttgttatgacatacgacacgcatcaaaaatcccatcaaccctaattaggtttattatatgtattacatattacaaatctcataccaaataagatgtttagtggtttcatttaattagatcatttatttagtccaatataaaatattagctcaagtatgtttgcttaatttgtaagccatacacattgggatattaaaaataattcaacaatctcttacttggactaaaaattaattacaaggacaattatatttgataactgtttactcagaaatttgacctgatgacatggacaccacttttgacacatggcaagaaggaaacaatcttgggccctacctccaaaaagactagggtggtcaacttaggcattggtaactgtgttggtaccctagttgacatcagagggcgccaatcgagattcaacgaagtcatttctgggtgctatcctttgacaaagtttaagcgaacatgtcctagtgaccctaaaacgatgaaccatggagttggggatgtgatgtggacatcctagagctcaacctgggtccaatactagtattgggaacccaggttgacatcatatgcgtcgtctcgcattaattttggttcttaacaacttcatatgggcgatttgctcagtcattggcctagaatacatgagagacatgccagagccaagtttcatactttcaagagaagtctacgagaaacgacactcgtgcactttaaagccctaatgggcgcccaagttgacttctaatcgataagtttcgagtagctcttgggctgtgcataccgagtgagtacactcgtagctaactttgaaggctaatctcgctaatctcctggattaatcattaactaaccctgcggattagctatgctaaattttggggttaacaacatttggattcatcactaaggagtgatgtgggaaccgaactaaccatttggttttgtttgttctagatagaattgagtgatttatccacttttagtttaagtaataggcctctgtgggggccccacgtttcctatttgaaattacaaattagacaacaatgaaatttttttaatatcgactattattattattatttttcaaataagaaaataatatttgaattagataattaaatcgatgtgatctctcttatagtgcgatctcattaaaaaaataactaagcacataatgtgccaatcactattcaatcgaaaaaggaagagtttggtgttactcatttttatgcttgtacaaaggttagaaattaaaaacattatcggtggaatatactaattcaattcagctttgaattctaatatattaataataagtccctcatttacagcctgcttttgttttgtttagtttatgtaagttttattggtagtgtctagctataaattaatatttaaatattatttatgaatttctaaattattaaattaattatcatcattaatgtttgattatattttccttttattatattgatttagtttactattcttttagttatatttttgtataaataggattcaccttattggaataaagaactaaaaaaattttattcagtttctctttctctcttcatcttcttttttttttttttttcttttattcttatctattttatattattctatattattttataacacgttatcagtataagtctctgtccaagctctaaggtaagtattttattaaagttcttgaattgtttgaaagtcacgatacactaaatatatatttatatgtattttcatctgactgaaataattttaagatttttttttttttttttatctatatgtctatattatttatgtatgtgtatatgtttttattctcatatagttatttttaaattcatgtatatatattatatgctcttattatttatctatgatatgatagaaaattcagaatatatataaattatgcatatatcttgaaaaatatacgtcttcgataaaattttacatatatcctgaaaattatgcaaacataacattcatcatatataattgacagaaaaagatgtatatatattcattgtacatttaaaatatttaaatatcattcactgaagagaatgaatagatatgaaattatactttaaaaatatagattttacatatattagtaatgctagaagcaaattaatatatacatatattattatttctcgaaatcaatagtttcaaactattgttattacaagatatgtatatatacatttattatttaattcagttttcatattcctagaagtgagtatataatttactaatattatagtaaaatttgtatgtgatccaatataatctaatataatcatagtgataaaaaaatcacaaaatgattatgtaaaaagtttcctgaagaagtctt

SEQ ID NO: 15493 - DNA, 6012 bp, Cannabis sativa
cccatagtatttttgtatgtatttttttttccttttttgtatatttttgttttgttcccttagataaatatggtagtttttttttttaattatttcatggtttttatttattttatttttatttttttataactcacaaagatttgtattacctcaaaatagtatttacaaccaatacaacacctttttcaagtaaaagcctccgaaatctatttgcaaactttcaattcatcttacatcttctttagtggcttttctaggcagaaaagattttttacctcttctttcaatttctttattagaacagccactgtccaacaagttctattccataatacttcatttttgttttgccaaattcaatatactactgctgttgctgcaagagtagcagccaacaccattttctgatttttagaaatttttgctctagccaaccacctaataaaatcctgttatttccttggccttggttctcaatgataaccaagcctttaattcattcaagcacctgtaactatattgacaattaaagaaaaggtactcacaagtttcatcataatcacataccatacatttcgcatctatagagttgttgaatcaccaaaatctagccttcgtcagaagcctctttagaattaccaacctcaaaataaaattatgtttagacacatttaatctgctcttacaacagtatcccagtaaacactatcacgttgtgttgctagcattttatattattgaggaatcttgtaaacacatgctgtaagaagctgaaaattggcactagttttaaattgcttcttagttgccgcaattttcctccagtaccaactttcatttgatgattttttataatttcaccaatctactcttttcaaataaacactatgattccacttaaatcaaagggtatcttgttttgtggcaactgcccaaacatatttacgaatggtatatgtgttctatagtgtagttcttctacacccgagcccccttccttttttagtttacacatttcttcccgtgaaacataaccaggacctgcatagtatgctaccctaaccaaaggaaaactctacaaatgcaattaatccatttcaataatttttttccgtaatgacatgatttgagcccagtatgaatgtactgaaatcaggacaaagtaaatcaaaattaacctcccagcgaaagaacgatttcgagagctccatacattaattcttgtagtcatattctcaatcagtatctcactttcaaatcttgtaagtctatgagaaccaatgagaattccaagatacatgaactgtaagtacttttagcaaagccaaaaacatctaaaactctctggatttccctttcttccatcttgcaaaagtagaaggctgacttggcttcacttagttgaaggccacaagttttggagaataagttgagacattgcagcatcaagtatacgggcttgaaatcgtcaagacaaaagagaaacacatcatccgcaaaacaaagatgattacgctctacttcattgtatttaccaagatttttagaaaactaaatatttgaaaactaaaaaaataataaaatgcagaaattaataagatagagatttttacgtggttcaagtgttaattaacgttagtccatgagtaggtctattagcctctaagggcgtatttgaagtgtttagattatttttgcaagaaactctaactctgtactctaagtttcttctaaagacaaagagggatattggcagaactttggctatgtaaggcttcgatccccccttcgtatgaaaatagaagggtatatataggctaagtagcaggcatggacatgcccatgacccacctagggattctgctcaaagcccactaacagggtaaatgcatgttgcagctggacaattacggaccatttgtacattgtggacacgtgtcagctaaagggtttaacctttaaaagtaaaggagacgtgtcactcaaaggtgtcacctcaaaaagtaagggtctgatatacctgtctagcaaaaaggtggatgaggtgtgcacactaccatgctcagacataggggataatatatctatcctatgtctcaaaaaaaaagcataaccgtcactgtgcaactcggtttacaccaaagatagatgcctgcgacacttgtgggcggtcgatatccgcaatagggtcttcgagtacccttctgggtatcaggtaggtaagcttccatgtgtggaccactcgaggtccaggagagacattatgtctttcgtggctgggaagctaggataagccagggtggacttcctcttatccattggtcttaatttattctcggtactgtgaggcttctccacgataggattgtaacaggggattttgattagcgagactatgaggttaatcccttcgttcatatgccatgtgtcacatgctcaaaaatacagatgacatttacccccaagcttttgtgactcttcaaggtttgggagcttaaagttatcattcctctctcggagataaatgcttcacacttggtgattgataggattacgaatgtatcccttgagttgtccccgagtaaaggaccataataagcgtggcacacatgcaacacctttaatgctgttattgacgacacatgtgtgttaggggcacgtttcttggaagatcttgtgatggtgccaagaggattgaaatgacctctcgtttaatatgtatgggactcgaggtgtgtaatgatgaataataaatgccaagagtgagttttaaatgccatgtttcaacttcccatccatcggataaaagtgtggttttcggaagaagggatctaggtcgtccaattcaaatcgtgtggatcttggtttaagtataaatggatttgccgaatttttcatcaccttagactttcaaatacccattttcaaaattcagaccagaacttcctttgtaacaacctactatgttaggcgcgttatcgtattttcttaattgttgtgcagtcctttgctacccaaagtgtttattgaaaaatgtggatgattaaaattttcatagttaaacaataatcttaaatatatagtaaaattatataatctaggatcgtgtttaaaaagttacataagttagcaatatattaatactacaaaagttgtcatctagtgactatcaaaagtgagcctaaactgtcccaaagaccctgaatgttcctagtctaaatgtcttgatatgtacaatctcacctttagctttaaactcatcatggttcggttctagctcttacttgcacatacatacaataattgtgagtcgacagactcagtaagattagcataataataaacatacacataaactagattataactaggcggccatacaccaaattacaatcctatcctgcatcccacgcatatactgagtctagaacgtttgtatgacaaagcctagcatatatctattgatatctaagtgcaactctatgtacactttaccaatatcctgatatgctaatctaatggctactgatttgcctaacatatatctgttggcatctcggtgcaactttatgtacacctcactcataccttgatatattattctaacataaactaacaagcacactaaacatgtatacatatatgcaactattatactaatcttcccttaattctgaatgcaagtgtgctagtaactttgagtgaaaactactgcttgacgatttaaggccttaagtcacaatttacctaaaactggtaagtgatccgctaaatcacttttggggacttaaacttgaaactaaaaatttccctatcgataaatagtgtgacgaaaccctaaatatcgagaaaacactaaaaaatgacattttgggaaatgtatcctaaaaaacgttaggccatttccataaaaatgggaagctatttttttagggttttctgcctagaaaaacggtagatcgtttaccaaaaatagtctaccgtattcatagaaaattttcccctaaatctcaaaactaacacaaatcgaaaccaattcagcctaagccttccataacacttatttggagtttaacgaacacatttaacaataaagtccatcatcaagtttgtaaaatgaaatcaccattaaaggggtcaagcttaatcttacaggctcaacttaactcacaacctgcaaaatccaagcaaaagactatatagcagcttaaataactcaaaaacaacccaagaaaacattatctaaaataccaaaatgaaaaattctaaaatttctatgaattgcatgaaaacttaaactttcaactatgaaaatcaaggtagaaaggttactagaattacctttgatcctccccaaccaacctagctgaaaagaacctggattggtctgtaattggtggtgcaaaacttggtttccccttgggttcttgcttggtggaaactagaaggagagagaaggccaagaggttgattttgcattatttggttttatgattaatcttaattataaatctaagttttattctatttcatttcaacttataacttagggataattctaaaaactccactaacataaccaagataacacttaggaaaaagactaaattgccccttgcttcactatgaagtaaccttactttctaagagtaaagtagtcaaagaacctagccccaaataaatctcaacattccaaatatataactatcatgttttaataattctaaggtactcaactgtatctaagtgactttaatggccaaatcgtcccattccactgttaccgagcataaaacatgaaaatcataaaaattctcatataacatatataaggcatctagaattcaaatatatctctgtaattgaaaaaatatcttcctaaggcctatttctgacaataagccataattttctactatgaaagacgtaaatcataaaataactaattctcttatttatctgataattctcatgatttaactatgcggtcgttacgattatcccctgttaaaaggattttgtccttgaaatctaatttgaataacttttgacattgagccctcaaattggattctaattcccaagtggtgtcctccaccttattatttacccaaaccaatacaataatcttgttctgaaggacttgtcctaaacatcgagatatactctgattgttcctcatcaaataggtatgactgaagttctagggcattgtaactcaaaatataagccaggtctaaaacataaaataccttgtgtactacagataatgttggaggcatgccactaacctaaccttctcaaagaaacattggaaatccagggcatatcttgcatttcatgccaacgtatctcattctttttattggtgatatccataagaagatatgattccctacttgggatttctgtatttttgaacttcagatctacatatcttttactgtctattttgagaagcaagcaccttggccatagtcttctctaaagtcttacaggtctgctgatttgactttagattaaggtatttttctgttccgagtttaaaaaaattacacttcatactatttgttattccaatttttcttctcgtgacatggcatgcttacgtggacagaacaagtgccacgtggcagtacagctcactaaaaggaaggtgaagtcaacacctaagcaaacaggagctggtcggccacccctagccagccagccttgggacaacaccctggccagccaccctgactagcccccctgatcggccaccctggccatcaccccggcggggcaccgtggtcatcacaggggcctagccagacaaggagatcactgcaggctttgttggacagctctgcacctggacaacagatacgtgttgcaaattaggctttaaaagcccaacaaaaaagttgtataatatctagattcaagggcactttagtcttttgtaattatctaacaaactatgtaaatatcaaggatttaaacttgtaatttagggtttaggcctcc

SEQ ID NO: 15494 - DNA, 4045 bp, Cannabis sativa
ataattttcataattaatcataaacactgctaatttccaaattaactaagcgggctttacaagcaaaatatctcaacataatctccaattaattccagacaatagaggtatattttagttgacggttctcaaacactgaacacaatttttattatttattctaattaaaactcaattaattaattaaaataattataataaatacctacagtgatcaataaattttagatcatattccacatcaaagcatacacaataaaagtactacaaaaataatttttttccagtttttacatcaactaagcatttttttcataattaatttaagcattgacccaataaattcatgaaaactataaaattgacttgaaatctaattttataatagtttataacccataaacagtcatataaaagaccaaccaaatggagattggaggattgtggcataatattaaagaaagtgaaactagaactccattcttaggcgaacatacacctctcttttgctggtaaaattcagctgattcaccccactttgattggcttaaggaattattggatgaatatttttcttttgtcttacaaaaataatttttttctgtttttacatcaactaagcatttttttcataattgatttaagcattgactaaataaattcatgaaaactataaaatcgactaaaaatctaattttgtaatagtttatacatcaactaagcatttttttcataattaatttaagcattgaccaaataaattcatgaaaactataaaatcgactaaaaatctaattttgtaatagtttataacccataaacagtcatataaaagaccaaccaaatggagattggaggattgtggcataatattacaaaaaatgaaaccaaaactccattcttaggcgaacatacacctctcttttgctggttgaattcaacttattcactccactttgattggcttaaggaattattggatgaatatttttttttttgcctcgaagtgtgataaaagaaattgagaaactgtggtgtggcttcctctggggtttgaaaggaattcgtaaccgagttcatatgacagcttgggacaaggtgtgcctgcttaaagcctatggtggccttggctttaaagacggaacgaaatggaacaaggcggttcttgcaaggtttatttgggctctcatgaataaaaaaaaaacttgctatgggtgaagtggatcaatgttatctatctaaaagggacggatttctggagttacaacctaagaaccgactcaagttggtattggaaaaagatttgtcgattgagaaatatgtatactaaacaggatattaactcaacaggcagcggaggaaagtttagagcttgtaagctctataactcagctttaaatcaggctcttgctccattttctaaagtaatttggtgtggcctcaatatcctaaaacatagcttcatagtttagcaatctatcaacttcaatctactcacaagggatactttgagtaggttcaatatagtactggactccttggactgcctagtttgtgggactgctgaagagagccataaacatttgttcttcagctgctggttttcgcagaaagtgttggaagaattatttagatggctaggtttcaagggatggtcagtaagcgtcgaaagttagttttcttggttgtatttaaacaactcgagtttaatcaaaaggataagtgtggtaatcttagcagctgctatctaccacatttggagaaatagaaacaattgcttatttgtcaactttttttacacaattacttgtatagttaataaaattaaaaaagatgtttaatataaattgtacataatcaagaatagaaagtggtctatagttgaaaatgctttattacaaagattgatatgtaattaattgtgtggtggtgaggttgtttggtgctctctgtttagtttgaagagtccctttgagggtgtaattggttgttttgattattgaaattcttcttcttgataaaaaaaaaacagtcatagaaaataaatttagatttttctgagtgacctaggtatttttcatagttaatttaagtattaatcgaataaattcatgaaaagtataaaatcgaccaaaaattcaatctatcaatcttataacagtttatatcccataaaccgtcatataaaataaattttgatttttctgagcgacttaagtatgtttcataattaatttaataaatatattaaataattctaaataaattctaataattatcaaacttcactaagtaccctaaaataatatagagaatcgaaatttagagagagagagagagagaaacacctcagaactttccaaaacatggtcgccacagttacgtcgtcgaagtcgtattctccggaggcgacaaagtccaaagccccttcttgcatgctttcgacgcctcctttcaattggaaattattcccactgtgatcagcaactcaaaacgatccaaaatcatccaagaaaacaagtaaaacacattggaatagaattgtctgccttggctctggtgtaccgcgtttaatggtgattctcgtgacaagcctttaaacttcatttctccacgtccaaagtgatcctttggttctttagaactcatacaaatgcctaaacgaacccaaaaataattgaaatcctctcaatcgattcttaatgaaaaacctacgatgaacgtcctaagaacatggttcgttttgagataatgggttctggaatatatgccaacgtccaacctccttctaagatgattatgaattcaaagaaaatctcaataacactcaaatcgtgcccaacttgtagaaagaaagaaacaaaaaaaaaccttaattgttcgacccattctctttgtctctctctctctcttgcacaaattctaaacctaaaaatcgatctctaacatgtttaaacccaaataaaattgatcgctttgaacagaaaatagaatgactcactcccataaattttggccatatcgtaacaatataatcctacgtgtatacattaggtatactatttctactctttaaatagaataaataaataataatattaataataataaaatgtgtgaaataagtcatttagtatgatacactacatcatataacaatattcattaacattattaatattacaataccaaaataataataatcaccaataatcataggaaaattttatttttaatgtttaaaaaaataccctctaacaaaatttagactcttaaataatttatacaatttaatgctattgtttttaatttctacccaaaaaactctccctttcatttttcttctctctttgtctctttctcttcctcactctctcttcctctttctcgcaccactgagacactcaaactcaagcacagagaccaccaaccaccaccactaaatctcttctcctccaccaccgaacctcctcatctacccaaaacttaatccaacaacctccaaatctcacctacccaaatctttctctcttcctcctcctcgacttctctcaaccacatcgccattcgtcaccgcccacctatttctcccccaaccagaaactcattaaattcgtatttgtttgagacattagatggtggtggagggtatgattttctggccaaaataggattatcgatgggttatcgatactttatcgatggttttgtctgcgcactgcttttttgtgtgcaaatagaaatcatcgataacctatcgacaacttatcgataaatgtcatcgatatactatcgataacctatcgataaatgccatcaataaactatcgataaatctaataaaaaaataaacacaaagatgaagatgaagacggagatagaggttcggggcctctgggttttttgatgcttgagtgctatggaggtccgaccagtcttgggcctttaggtttcgtttgggtttttgggtagatgaggaggttcgatggtggaggaaaggaggttcggtggtggtggttgggtggtctcggtggtgcgaggaaga

SEQ ID NO: 15495 - DNA, 10849 bp, Cannabis sativa
  modified_base (3836)..(3839): a, c, t, g, unknown or other
tttcagttttctagattttatgctcacccctacctatgctgaagcaatagggttaattgataaacacaagtggagtgctgtaatggatgatgaaattatatctctcaagaaaaacaagacctggattctaattaagaagctgctaggacaaagagtgataggctgcaagtgggtatacaagcacaaggactctgttccaagaggtgaaaagggtagaaacgaggctaggttggtggcaaaggggtatacacagagagaaagggtagattatacagaaatcttctctctagtggtaaagcatacctcaataaggttaatcttggccatgatagcaatctatgagttagagcttgaatagatgaatgtcaagacaacctttttacatagagaactagaggagcaaattctgatgcaggaactagagggctatgttgaaaaaggaatggaggacatggtgtgcttacttaaaaggtccttgtatgacctcaagcaatcacctagacaatggtacaaataatttgatgattatacttaagacaggcttcaaaaggagtgttttgacagttgtgtctatgtaaaatcataaaaaatcagagccaatgtttacctacttttgtatgttgatgatatgctaattgctagcaatgatactcaagagattaatcaagtcaagaagatgctcaatgaggaatttgatatgaaggatctaggctctgtaagaaagatccttggcaaggaaatattcagagataggaggtctaagactttgaaactatctcaagctgattatatttctaaagtattgagaaattttggattctcagatgctaagcagttagcacaccaattgcataacatttaaaattgtctagcaaacagtccctcaccataaaacaagaaatcaaggaaatagaaggaattccctatactaatctagttgggagcatcatgtacattatggtgtgcacaagacctaatttgagccatgctatttgcatagtcagcaggtatataagaaacccaagcatggaacattggaaggttgtgaagtggttaatgaggtatctcaaaggtacaacggatactggttcactatatggccctaatggaaatgaacctgctgtaaatggctttgtagactctgactatgctggtgatattgacaccagaagatcacaatcaggctgggttttcagaatcagcaactacactataagttggaaagcaaatctccaatctatagtggcactctcaaaaactgagacaaagtacatctcttgcacaaaagctgtcaaagaagctatttggctcaagaaaattactagggaattagggataaaccaaaccactatcatgatacaatgtgacagtcaaagtgctctgcacagcaaaaatcaaatgtatcattaaagaactaaacatattgatgtaagactacactttatcaaggatgtcctagctgaagagaaggtcaaactggtgaaaatgtccacagaagagaatgcctcagacatgttgaccaaggcctttccaactgtaaagttcaaatattgtctgaatcttctcgggattatcaatgaatcacagtaatccttgacaatgtctgttgtctagtttgacattctttcttcttgtgtctattgtttgtaatcttgaatggccttaacaagtatttcaaccaaggtaaaaattgttagttgtggtcggtatttctgttaagtttctcttaacaacctgttaggttagttagttacttattagacacttaggacaaagctataaataactttgtctcattccttgtaataggacaacatagttttagacaccaaaactgtaaatactactactataatcaataaaagagcaagactgctcaagatttcttttcattctttattcaagcatggtttttagtgttcttgaatcaaggtatttactatttgattgcataggaatcaatcgttccttacagtggtataattggaaaacttgaggttttatgcttaatgactaatgaggggtcataattaaaaaaataatcccttacttttctttacttttctcaaaatacaatctcataatttttttcatttctttcttcttaaattttcttatacatgttatagtcttattatttttgggtttaatgcgttgagccgaaaacaacacatttaataaacatcttaagacgtatcaacacgactttgacacgaaaatttacgtgtcactccaaacctatttatttcatgttgttttaagttctcatcatgtcgtgtcacaacatgacattgcaagactagcaaaagtaagaggcatctcttattcttatttttgtattttcattcttccaaactaacgtattcctaaatatttagtattgtatcatcagaagcgacattcacacgaaattgaggggggaaagaagacagggaagcaggtccaagagcaacctggaaaatccgacctatgaatctcaccaccaccaccaccaacaccacgaccatgaccatcactcggagcaagagaaaggacaccttcccggttttcgttcccttgtttcatttcttttgttgatttcttattaatagttgtgagattgcgagtattggctaaggttaatgatgatgagataatgagaataataaccaagtatataattaaattaatattattcaaactcatttctttttttacaaaaattaagaggagcaatatattatggtttttattaatttgtgtcttaatgctactatctatgcaattatatatggtgtagaaatttattaagtaagaatttaaggatagagacattcatttatgtccattcaattattgtgatttgttttgtttgtttgtttcattacattcgaagttattattttattgttcatgttttgaaatattttatcatttattgtttatgtttgaaatattcttagtactatttttatattattcttcacagattgacactaacaacttctcataaagaaatttgtttctcaacaactaaacttcttatgctatgtccatttagggtaaaagaaattgtgtgtctttactaattatgttaaaattttatttggtgacattatttttttaagaaaacaaaatctgaacaaacatttgaaatagccctttgtttttcaatgcgaaatgttaatagtaattttttaattttatttttaatttgagtgtttttttctaaaaaatatgagtgtatttgataaacataattaggatatttattatatctaccactagaaaataattttccttttaagttcttcttccttttttttttctttatcacaaaacacattaaacgaattttcttctacaataatcaaattaaattgtgatatatatatttttttttgaaagggaaatcttcattaataacgtaatcaaacaggattaggcatgtcaagatagatttcttgacttgcacacaagggatcaaccccaatctacatggcgctagctttgttagtcaaagcataattggctaaaacatgagctactctattggcctcacgaaatacaaacgagataccatcaacactatcatataataatagagttctaatttgatctagcaaacaatcaacatcatgacagccttcatcctatttttggattaattgaatggcttgtacacagtccgattctatgctaaatcgatggagtttaacgctatccttttttttgtgatattttttttaaaaaaagttctaatgtcaactttttatagtctaattttttttaatattcatgtacgttataactatttaagatatcttataaaattttaagaaattcgaaataatttnnnntataaaaaataatgttcaaacagtttattttacacgcgtataaaataaaatagtcacgtgtgtaacacactgcttgaacgtaatttttggcgttttaaattgttttgaatctcttaaaattttacaggatgtcttaaataagtataatttacataactatgagaaaaattttagctaaaaaattatttcggatactaaaatcgataaagatatattggtacatctttttggggtgcataatagaatttttctttaattttttagatgaaataatttagttgaaagacacttataagttataagcccttcgtatttagtttatttacaatttgggtcatgggaaagggacttacatgtaaaatcattgaatttaaatttgatgggaggcccctattattgctggatgaatttctgatgagtttctctttctctggagaatttggaagaaaagaatgaaagggaagttagtgaaaacagtgcaagaaaaacacaaacacaccaaaattccttataaatatgtacatatatagatacacaaacacaaacactcctatactaatactactatactattcctaaatcaattaaagttcaaatttttagttcaacccagaaaacaaacaatgggtcaagaacaacaacaacaacaacaacaaaacccttctctttcttcttctgcggcggcgccctttcaccctgactcttctgaaattcaaactcaacctcttcctcttcctcctccgcccttcgatcccagtagaagtattttctctttctatctctttttctctaatatttgttgttttttttttcttttttcgaattttgggcatctgggtcacaattttatttgattaattatgcttctatatggtttcaaagatttacactttttgaagtttggtcatctgggtcgtcgttatattgtttcaattttggttatagcgtcttatgttttatgtttttcgaaattttggcatctgggttgtctttcattcgtgtagaattgtatctgttgaagtgattgatttgagtatgtttttggtattggatcagttaattcttctttccattaactttttcttttcctgttatttctgtcattattgggtttacgttaataacttgttaattttgatttcgaagcaaattttgtttaactctgcaacaatcacacaattagatatctttgcttttgcctcaaagcttttccctttggactctttgtttgtgcattgagttggagaatgagttgtattggaatctggaaagtaggaagaagtttctgatttcattatattagaagttaattatatgtaaagatagatcaccactctatagacctatagttgtttaattagttagtaacctttattttttgagctcgaagattgaatgaatttcaagctatgttgcaaaagagatttataaacaactaactatgataaactaaggtaataactaagttcaacttccagtggtcactcttttgttatggttgagagtgactcctcgtcgttttaattttgttgctcacaatgtcgctcattgggcgttgtctaaaaacattgttgggtcctttgaggtttcctcaatcccggtttcctcaacttctgaaaccttgaactactagatgttggtttagtaaacccatctgccaattgagctttgcaagtgtacatgtctgacatctagtagttcatatgcatcaccttatctcagacaatgtagaggtcaagttcaatctgtttagttctagcatgtcacattggattggctgagagcctaaaaagtaaaagatgtttttaacaaatggttgctcttaaccataagtataataaatgtgcttttgtcttaccatctaagtttctgatttgtatttgctttgatttttctttgcagtgattggcatcatcaaaaggaaggctttgataaaggaattagctgctgtataccatgccgattgccttacatactgtcaagagctgttagagctccaaagaaagtggaatgaggttagatataataccatattctgcatctcttaattcatgctttctttctcggtctttgactagcttaaagagtaattgttatgtacgtacttaggagggactcgaatatcagaccttgtatctttttcacaccccatttattggctccaaacgccttagcagaaatggactctcttttgatgttgcattatgtgaaggggggcttttttattttcggaacaaataacattgatctactagtttagaagactgaaaaactttatatgatatcaaataatagttaaattctgctgctgatttttatttcataactttgttattctatgccatgtgaaaaggatcatgagcagtgacataatatttgcacttgtcttgaatgtgtagagattttttttcgattttattgagataagttgtttatgtcttctcactgtaactggttctcgaaatgcctgcagccatttattgacttgaaaattccagaagatacaaggaaagacacaatgcgacctccaaagcgtctaaagaaaggccgctaagcaagcattgatctttttgaaagatttgccttttgaaaaacattgtttctgttagtaatatttagtcagatgtagaaacattcttcatgtttctttccttactgacaattttattcctgatttttcatttcaatgggcctactgcaatagcaatttgtattcttcaatgaaagaagttaactgactatattgtgttttacatgtatatgtggttaattgaaaggtcatcatattggaataacccccatgagaggtctggttattattgctgcttcattttgcttaatcattcttgtcttttcaattgtgtacttacttgaactgtatggagctgtattcataatgattactttacattttaaatccaggttttccccttagcaatgttgaaatgaaagatgttaatggtaaaatgcaaatcatgatatgctttttcaatttttgataagctctaaaaaacttacaaaatataggtgtttacaaaaatgttaaacatacttatacatgttcttattgtttttctcttctataataatgttgttttgtttccccttcctcaaaaacccaactagttagcttagcctaatctgcaaatatcaatgcccaaatccttttcaatcgacaattgttgtttgtaggagcatttacagaagaccacaacctttgtaatggacaacttggtgcaggtccttcaaataatgaaccccatattctttgcaatgggcaatttggtgtagtgggtgctgaaatctgccctttcatggtaatttcagctgatgttcctacttcatggacgaattttaccgattcggatagtcgattgagtaggttcatcagggcaataacttcattcctttgaaactgcagctgaagaccaataacaataatattaagataagtgatatgatgatggtttttaatatgtcaaatggtgagtagtaagacattctaagagaattcatgaaaatggcttggtttgagatgagctatataagttgtaagtgggaacaacagtatcattttaacttggttgagaattattggtaaattttgcaactttttagagtccacactttcttccttttccactagtggaatcaatgtaaatgttcagaccacatttctttctttttcttctttcaattaagcgagaaacttagaggttgtatgactgtttttagtttccaaaattatgttttcaaaagtgagaataaaaaataattttttgtcattttaaaaatttaatgatttttggctcaggtttttaaaaactatttttaaattttgttttactaaaactctaaaaatagttttgggttcgggtttggggtttggttaaagttcgggtctggggttaaggtctgttgttcgggtatgggatcagggttcgattcaggggccgaatccagtccagggtccggtaagtgagcaaaaatgtaaactagacaaaaaaaaattgttatagaaaatatcattttgatatttttgatataatctgttttctagcattttaaaacttaatttttaaaaaatttggccaaacaccactcctactagtttttaagagctatttttctatttttaaaaactgaaatcaatttttaagttatgaagccaaaaaaccctttaccgtttgatcgatgttctcgtggccatcaacggagaagagaatctttaacgcagtaccaagaccaagaacctgaagctttccccaaagtcgacacttctcacatcctacgcaatccatcaacgaactgcaatggcaagaaatgaacccaagattattatgtttcagaaaaataaataaagaagttcaaaatgagcattcaacttctaagtgtagctaatacaaaaagataaccacattttctaatcaaatttctatggaattacacgtcgatacaatacctaatgtttctgaactgcttctgtatgttttgctttagttcgggacccctttgccctttccacaatttagcttcatcaaagggaacagggcaagcagcttgtagttttggactaaagagcagctgtttcattaatgattgtgttttcagatcctcaacagggttaccggtttcatactcagcatgttccaagtaaggtgcggcctaatacattaaaggggagaaaatagaacttcatcaatggcaaattagttcttaatgataaacaatgaatagttcataagagtaaaaatatcaaatatcaatacattcatacatagatttacaaaaagagtgtgttacatctacataaaaactgaaagttgaatacacaccttagtcacagctctgagaacaaagagatatgtgaagtacaagtttctcacacggtccggatatcttaggactcgatcatgtagtaatgagatattttgaccccactgaaatgaaaaattgacagagaataacaagtcaaaaaacttcaaaatttcttgtactaattgtgcacttaagaaagatgtaatgggcaagtgtgcacgcagaattccttgtcctatcctaaaatgcattaaaagcaactcaaatcaaacaatgttcaggtgctaacatgaacactatctcagtgaaatataaacaagaaatataccaatttatactgtaaagagtaaaatggcaagcctagaattataaataaaacaaatctgtaccagatttttagcttcatcaagtagataatcagaagctatgtggaccgaaatagaagagtgaagaccagatatcaacttgtacaaaattctttcttcctggcatacttcttcagaaggatctggacaagttgaaaaatcacataaaaaaactgtaaagaaagcctattatccgtcacaaatttatcttaaagaaagaactagaaaagtaattatatatacataaaaaaaaggaacaaacagctcacatttgggacagttctctgcgtaaatggcatcccaaatccttctagcagatggccccgtgtagccagtatatcgttcaggattaagttgtagattcacatatgtcatctcggctgcaaatttatatgagcaaaagttataaatcaaagcttcaagatcaaaatttgataaactataagttccaattttattccctaaactattaaaagagaaaaaaaaacaaacaattagttcaacaagaaagcagtaatgcgtactattgtcggtctcatcatcattcgtccaaggattgtccgtttctgtccagcctctaaaggcgttactatccagagtgcggtccacagcagcctgtggctttccctcttgacaaacaaggtcatcagctgaaaggctcctttggtaattcttgaatgattcagggaactcattctctggacattcacatacactgcaatcccgcaggcgacacataccatcatcaggccagaaagggcagtcacaccacaacttggcctacgaaaatcgcaccaaccaagtttcagaaaccgaatctcatgccatatagagttcaaggctggaaataattccaagtagagtataatcctatttgttttaactaaattggttttgagaaataaattacttaatgtaatagttgatatcctaacaaaacataagcctataacattctgattactattactgtatatctccattctatcaatacaacttctttatctacatacatgctgattaaatcagtcctaataaactaaatgaataaagataacaaaacattttcaccatacaaattcagctaactcgtaaaagatcaactaaccttgaaatagcgaaaaaatggagtcttcacaagctcttgtagtgatggattaagaacttcctcgttcagatgatccacagtttcatagtcacaacaacaatcctccacaatcccactaaacttatgttgatcctaaattcaatgaaatgaaaaacatacaagaatttagtatcacattcataataatccaccacattttccaggtaaccaaacagaattgacccaaaatgaagaaacatacccgatcacagagacaaggcttattagtccgtccaaagagagaaattcttggacaaggcctagtagtcatagctacagcaacgaaaatggcaattagagctccaattacccaaccccatcgtttcatctgacccttcatttcaaagattaattatgcaacagcagcaaatgacataaaactatcgaaaactcaaattgtccacgcgtttggttgccgggaaagttaaagaaaagtttgaagatttagttgaaaagaaaacgaatgagaaaaatcaaagttaaagggttaatatatataggggtgaaatgaattgggtttgttcaaaaaactgattttgattggagctatgatctaagcaagaaagtccgggaaaatcaacggcgaactatgggcaaagtgggaaattgggaatagtcttggaaattctgtggaaccgacattaggaaatggtcccatggtatttactactgtttaatgg

SEQ ID NO: 15496 - DNA, 8966 bp, Cannabis sativa
  modified_base (1120)..(1120): a, c, t, g, unknown or other
ttttacatcattctagaataattcctccaccctagagtaaccaccatcattaactctaactactgagttggtgtagatataaagattctaatatacactcctatcatataacatataggccactttcagagattcctttttgattgtcttcttatgttccttatttgattacatctttgatagctcccactcaacagtaggagtctggttaaattcatacacaagtgtgcatttaacctcttactattgatacttagggacctcttgttgtgatattttatcttaatctagaacatcaagttccttctagactaagtcatcaacataacattctagtattaatattaatataaaatacttgcttaagattgagtaatcaatataattaccataaaacttctcataaggattaggaattttgcctaagtcttttgaatcgacattgcaaaaatttcttatcttatccttataattcttattgtgtaccaattttctatcccatatgagtggttagatttactttttttagttttattctaaagttcctatcttgatcataacatagtaggctatcactagtgtcatccaaataataatgggctagagttttaaaattctcccacaagactgtgatactatgttccaaaaactttattggtatcaatttctacagtgggaaacactggaacatctacaggatcaagaataacttctactggtttgccacttcatttattatattatatccatgtctaatcaaaatatgtgtgtcatagagattctgtggtatattgagtatagtctagagttcaaagagttgaactacatatatcaataacttcatccaccctaaatgttatagggattctgtgaagtttcaaatataatttagagttcaatagatataaaagatatttgaactgcatatattgcttcttaacatcttccacccctattagatcaaaagatctttttattaaacaaaatcttaaataattgtttaagaaatgacaattattcataaatattgaatttaaattttaagtatttatgtggtattatctctttggagaaattaaaatattatagattttgtatcaataataaatacaaaacacanaaacacatgataaacatataaatataatttggtattggcatacaagtttaagaatataaagctcaatttcataatagcaattcataatgaaatcctcttaaagaaaaaattttattagtaacgtaaaaaatgtcataatgaattgtctacaataatatgaaataggaaataaaatcctaaactaataattgaaactaaattgtttaataaccaaaagaactaattcaaaaattaaagaaattaaagacgagcttcatcttcgacttggacaatctccactcttctgtccaaccatctgacataactcgctaggatagcaatccaagtttaagcagctagagctgaaataagaaaaaaaataaatatggttagtagatccagaattaataacccaaaggggtaataactctctaaaacacatgagtttataacaaaaataaaaataccttgtttcttagccaaaaacttagaacacatggtcctttttgctgcaatagaagtacttttttttttttggttttgaattagtagcctttttcttattagccgtgttaacaactttaacaggcttcttacttaatgacaagcaaaacttcatctacccaactcaataatcagctatttatagtaggataataaaggagtaggccaaaatataattttctatcaccaatactgttaggtttatgcatcatctacctgtttttattttaatttatttatcatgtatatatatcactaatttgttgaaaatcttatttatttttctaatttttttttttgtaattaaaaaattcttataatattgtaatcaaggattattgatatttgttgaaaatcttatttcttattttaaattcacctttgtatatgatatatcaagaattcttaacaatattgttatatcatggattattcatatatctcaccatcaattaaaaaagaaagaaagaggttcaatatcacattattgaattctctttatttgtgtattttcatctaatattaactaattctttaaattcaaaaacaaaaaataataaataaataattgtatatggccaccctcatgtcaactcacttttcactttattgtttatttcttactcatacccttttgtagtcttatttccataatgcatggttgatgattttagagaatatagagggagtgttttggttagaagatccaaagtttcggattcaacaaagtttatggtaagaattgatcataaagagtttatcgagaatgatcatatttacattagtttttatttagttatatttttatgtgtacagtcatgatatgactatgtttgaaatgcttaaatcagaatctcttgaataatacattataccaaacacttagaaatacgcaagtaatgactttataatagaatgattcacatttaaaaattgagtagctaactcattgtttaatttattttatgtacatagcaaacttaatgggaaaaatagtgataacgacaagtgagagacggtgataacatcgactttcaatatagtgacgactattataagtgaaatacgatgataacatctactttgaatatagtggcgactactacaaatgagatacggtaatgaaaacagttttcatatgatgagttttctaatgatttatcaattatctttttagatctcgagaattctttaattatattttttaatttattgtagtgtttgaaggtatctctttgtttgtttttttagataaaaaattgtataatagttactcttattatgaaaggaaaaattacaccaaaaatatcaaaatttaaaatttgatatataattctaatcattatgttaaagggagttggttagttataacagtttgttaacactgttagctaacctacactgttagcggagtgttttcaattagagttagttgagtagttattgtttgttcattgtatatatactcttcttataactctactcaattcaataatagaatactatcttctttccatctttctctctgttcttaaacatcacatggtatcagagctctctctggtttgttaatggagattccttgtacctccaatggtggagcaagattgaataatgctcaaacagagaacaatcatcaaaccttactccctaaatcttacactgtttcttttactcattctctcccaatcaagcttgatgagcataactatcttccatggcgacatcaagttctggcttcgatcaaaggaagtcgactattgaattaccttgatcctgacagagctccaccaaagtttctcagtactacagatgaaagatcccacactgtcaatcctgaatttgaagattgggaacaacaggacaatcttctagtctcttggcttctttcgtccatgtctgaaaagaccactcattgtatgataggttgtgacaccactgctcagatctgataggctctcaatgagtactatacatctcttaatgcagaaaatatagggttgtataagactcaattttgaaacaccaaaatgagaggttcgcttaacgattatctgctcatgatcaaagggatcgttgatcttcttaccacaattggtcataaaaaaacacctcaagatcatattgaatctatcttcaatggattattaattgagtatgatgtgtttgtcacgactattactacgagaaaacatgtttacacagtagcagagattgaagctttgttaatggctcaatcggctcgtattgacaaacacaccaagaatcttgatattttaaaagctaaagctaatctttctcactcaagattcaatggtttcaatccatataatcgctcaccatactcagctccagctattccacctggattcagtcgaggtggtcccaatcgttttgatggttttacagggtatgctatgtcttgaggtggtcgaacaccaaataaaagtggtccccctggccagcgtggtggccattcaaaccctggacgtggtttgaattaccagattaatcaacaagcttagtgccaattgtgtcacaaattcagtcatctagttaagtagtgcttctatcgattccttcactggtcctgagtcgtttgccaatttccctgccactgctcatgttgcaaagcttcctgcaatgcatgctaaaccagaaattattcttgaagacaactggtaccctgactcgggtgccactcatcatcttacacctgacgctaccaatcttggatctagtacattatacaggtaatgagcaagttcttgttggtaatggtgttggcctaaatattgaaagtgttggtaagtctctcgtatactctcccttctcatttcaacaattagctcttaacaatcttttacatgtcccttccataacaaaaaaattacttagtgtatctaagtttgctcaagataacaatgtttttttgagtttcaccccttttcttgttgtgttaaggatcctgctacccagaggactttgttggttgggaatcttaaaaatggtcaatacaagtttgactctacacaactgagtattctctctccttcatctgttcatgagaaagcatctcaacctccacctcaatgtcatagtcatcatctttttaattaaagttttgatttttctttatggcacaacagacttggccaccttgctgccaaagttgtaaaaatggctatataaaagtataatataccattgtctaataaaaacttttctgatgtgtgcaaatcttgttgtcttggtaaatctcacaaactgctctttcatcattctactaccacttatacagaaccattgcattcttcactcagatctatggggccctgtacccattaattcattcaatggctatagatactacattagttttgtaaatgctcattcaagatatacctggttatatcttcttggaacccgtgatgaagccttgtctaccttcacaaaatttaagacacaagttgaattacagctgagattcaagattaaaacactccagtcagattggggggtgagtttagagccttcactaatttttttgaaagctctggtataatgcataggttagcttatcctcacactcatgaacaaaatggtgtggttgagaggcagcataaacatgttgttgaaagttgtttaaccatgctttctcaagataaccttcctctcaaatattgggatgagtcttttagaactgttacttagctaattaacagaatgccaaatcctatcctaatgaagacatctccttttgaggtgttgttcaaaactgttccagatgacactaatctcagagtttttgggtgcctttgctgctacccaaatctctggccatacaacaaaaataagttgcagcataggtctatgccttgcatttttctaggatacaacatagcgcacaaaggattcaagtgtttgtctaaagatagcagactctatattttgagagatgttaccgttgatgaaaatacattcacttatgtcagcatcaaatgaatcagccaaatcacattgaatttttctcacaatcaaccttagcagctcctccccttgtgtcctttcttaatgtcaacaatccaccaatttctcttattgtcattcgccttgacactaccactatcactacaccagcagcacatatccctaatcttgctattacacaatttccacagtcttcatctactgaacctccactagcaataaatgtcaaagctactgcccttgtgtcaacaataacttagcctctccatacaatataactgacacacttgttgacatacctgttcactagtccaccatagccaatccacacttgtctaccaccaacactgtcaataatactatgcccactgttactaacagctcacctacagatataacattgccatcgacttccactcatcctatgacaacaagactcaaggcagagatcaggataccaaaggccttgcttgctgtgtatgaaccaaagtctgttaaaacaacattggaagaacctcactagtttgaagcaatgtccacaaagatgtttgccttaaagaaaaacaagacatgggtgctggttcccttacctgaaaatcaaacatgtataggctgcaagtgggtttcgagaataatacaaaatacagatgactcattcaacagatgcaaagcaaggttcatggccaaaggctttcatcaacaggctgggtttgatttttcagagacatttagtcttgtggtaaagccaataaccatcagaatgtgctcaacataattttcaccaaaggctagacaataagacagctagatgtcaacattgccttcattaatgatgacctaaaggaagatatttatatgcaacaaccaccagggtttgttgattgagaccatccaaactatgtatgcaaactcaataaggccctctatggcctcaaacaggcaccaagtgcctggtttgagaagctttctacaacgttggttcggcatgtgtatcaattttcaaaagttgatcaatatctgttcatatgggtcacacctcaatcatgtatctacattctagtctatgtagatgacattcttatcatgggcagtgatattgacacccgggttgaacaactcattcatgacttaagttcaacattctccctcaaagatcttggccttgttgactattttttgggcattttggttactaaaacaccagctagtatcttgcttactcaaactaagtatcttcgagatcttctcaccaaagctgatatgcagaatgtgaacacacaaaatacttccatgaactgtggtcttaagctatcaaactataaaagtgaacctagcaaagatgctaccctgtacaagtccattgttgatggcctataatatgctacaattacaaggccagagctaactttttgtgtaaataaagtgtgtcaaattatgcaaaatccattgcgcacaaactggactactgtgaaaagaatactaagatatattgctggcactctcaatcatggtctgctacttagatcagtttcaaatttttctcttgatgtcttatgtgatgcagattgggcatctgatctagatgacagatgctcaaccttaggccattgcatctaccttggtggcaatcttgttgcctggaaatctcagaagcaagacaccatcagcaggtcctcttttgaagtagaattttgaagccttgccaatgctgttgctgaagttacttgggtccagtctttgcttatgaattgcacattcctcaagctgttattccctctatgtggtgtgacaatcaaaggacagttcttcttgctgcgaatcatgtacttcatgcacgcacgaagcacatagagtttgacctatacattgttcgagacaaagttctacagcagcacattcatgtataacatgtcccaactactgctcagattgcagactgcctaacaaaatcaatctcaagcaccaagttttcagagcttagaaccaaactgtatgtagtttctaaaaccacactaagtttgaagggggttttctagggagttggttaatcataacagttactgttaactaacctacactattagctgagtgttttcggttagagttagttaagtagtttcagtttgttcattgtatatatactcttcttgtaactctactcaatttaataataaaacactctcttctttctatctctctctctctctctcactattcttaaacatcacaattattaaatatcacacacctattagtaaagttaaaatttattacagtttttattatttatttatcattttataaaatcataaattattttatatatatcattgaaaagaatttaaatatccgttgcgaaacgcaaacttattagtttaagtatataattcattttgtgaaaattaaaggataaacaaagtcattttctggttctctatctctctaaccgatcccctctccctttttgcatttctttttgagagaatcttaaagtattgaatccatttctttggaggattttgaaattgtactccatattctaataggctgcaccattttcccacagaacttcacaatatcaacagctaagatacatttagcacaaatacaaaaacccaaatatcaaaaaggcatctcacttttgctaaaacctgaattgaactgttaattgcttataaagcaactaaacgtacaataaatttcaagataaacactctgccatattcctcttctcttgacccaactaataaaacatcaaaattagtgagtttaattaataattattattgagagattatacagcttctcaataacaagacatgacattcaagaacaagtcactaattcatgaacatttttaatattagagacattaataactaaaaatacaaatcagaattctgtcttgattagtattaaaaatcttctattatcatgaaattatttcaacgaaattataatattggtctttcatgttggtcaaattatattataataaagatgactgctctagaataggtcaatttaacatttatacatcctagacttggtcgtgataattatgatgtagccaaccacttctggaacaatctctatcaatacgtattagtagttcataaaacataaatcattaatttggagaaaacgattgatcaatatataatatataatacatatatattcattatctctttcatttttaatgcattgaatttatatatataatacattatccaattaattaggtctcccaactgagattgctatcgctctcgccaacaacgatcggaaccaacttaagatctatccctagttgactaaacctagctagctaatgggaaaaatcatttatttatatatattatacgtatat

SEQ ID NO: 15497 - DNA, 7450 bp, Cannabis sativa
tagagtcctaatacaatctaatatatttagttctttgaaaattgatatatataagatattaaaacaccataaaaaataatgtattactatttgtgtaatttaatatcaaatttcacatattttaatttaataaataatataaaaaatcaaacacttaaataacaatatttttgtactcaaatctacttcaaaaccccaactcacttcaataacataaccatgtttaaattttttaattatattgttgtttctctgaaaaagggaaaaaaaacacacacacaaacacatacaaattttatatttgtgatggtgatgttgtaatatgtgatcatgatgtgaattgtcctggtctagctggatgtggattgagctgagtcatcaaaaatattaaagcatgaagttattttcatgattttttttaataataaataaaaaaacaatgaattttatttaaaataaaattgaattaatatgaggatgatggttatacttgtcaagtaaatattgaaagcagtactttcatttattcaatgcttttgttttcttctcaactacttattctctctttctccatctccccctctattctagccatccattatttttatttttaataaaaagaaaaaaaaatctttgaattataaatattggtagattacaaatcaacttaatagatatatatatatatatatttatacactggtcctagtactatatatgtatatatatatccattattgaagagaaatctcaaagtctgattatgtatagtactccatcaatgtattgttaatatagagtatgtccacttgttgacataactcatgatatcttgctaagatttattataatcaagtacattaatttgtactaaaaagatatgatgatatatcaacaagttcatccaattcattattaatatcactaatttctaatctccaaataaaatctacttcaggaaagatatggcatataacagatcctgtgaattgtgtttgctaaaagttgttagttggttcttggtttttgtattggctgtaacaaactctctgtttctataaataaaaaaaatggtctaattgtttgattagcttttgcaaagctaatttcaataagcatttttattctcttgtgtctttacatgatatcaattgcttttgattcacgtctatgtcgtcctcaacatttgatcctgcacctacaacaatggcgaatgcctcttcttctactgctctgcaaatttaacatggaaatggaatccattttccaacttgctcacctcatctcttacacttaaaactaaatcgattaaattttttgtcttggaaattttaagtggttccaaacataattggccaagatcttgatgacattttgtttactggagtccctccacctcagaatcttatcataggggtccaaaatccagagtatgcttaatggcggagaaaggatcaactcctactttcatggcctcgatcatcaatgacaaaaagtattcttgccttagtcgcgaattacaacacctcagctattgtttggtgtgctttagaacaaaaattttccagtcaaacaacagctttgcggcttcaactcaagggttagctctccaatgttcaaaaaagaaatctctccatctctgagtatgttgacaaggctcaatccatttctgatgccctaagtgttgctgctggttcctttgtcaatgatcaagatctagttctttagctccttaatggccttagaagttgactcagagttgtatctgatattacatcaagaagtgatgccttcaccgttgaaaaagtgcaggccctacttgagagtaggttggaatatcaccagaacatgtttgatattgctgttaaaatgcaagttaatcttgcatttgaaaatgggagatctagtggtcttcaactatttcccacttttaagaattcacaatatcaccttcctcaatcctcatttggccgtgggaggggctatccatgatacaatcaataacgagtcatctatcggtttgacaaaaattgggttgttccaagatttaccattattcttgtaacccttcaatgttgatagtggacgatcaaacatctctgagacgagcttgcttgacagagatgtaaccctatttttgagtgagctccgagatcaaatctctttgtgtatttgtgtttatctctaaccaacaaagatctttgttgttgtttagctgtgtttgtgtttgggttttgcaagttggtgaggttaggattcaaagcttagaagaagacaaagactccttggctaaggttattgggttttgttcaaattataaaaaagtattttcgattaaatggatggacacaagggtgaaattcacattttcaatctaatcggcatatggttataaggaatcttctgtaaaaattggattgaaaataacagatgtggggcaaaaaagagattagaacgacaataattgttaagtgaagcaatagaataaaagcatgcaaaagttacatatataatgcaacctatccacatttataaatatcttttaaaagactcgctgattgacaacttttataagcagataagatctaaaatcttaaaccatgtctttaattatgatatatatatattttttaagaataaaacatcataatcaacttataagatagaaactattattgcataagactctcaaaacagacatttgaataatgataattcatagttgaacatgtgaataaagtgggatagaacttggaaagttgaataatttaatatatataggaacctttgattaattatactttaatattattcaatataaaaatattcttgtattattgtatatacactttgtctaacacacaaaaagacattcactttagtggtttagaaacctttcaaaaccatgtttaataatgaagatacaacattacaataattcataaaatttacaagacaagaagaaacactatggttaaaatctacaaagaacccaacatatgtttctatatgatctgtctctctctatttctctccccatttataggtgtaaaaaatcaatctttgaataatggaggaatctaaagcttcaaaaacatgtctgtcttcttcagttaattatctcaagaccccagaaatgattcctcaatatgcacaaaaataagtcccaaaaatagtagaaatggtcattttttgtttttttacttgttgtgactattatttgggtaaaaacagaaagaaacatgtgatgatgaacaaatgtgagaaactagtacttgggtgagctgcagatgtgggtggtggtgggggaccagatggtactgcaccaaacactgttgagccacttgaatttgttgtgtttaacactgaagaactagtgctgcaattccaacattttaataaacaagtcattttcttttcttactcacatcacatgattggtattaggtaaaattataaccaagtgttacctagtggatgggaattgacatgttcctgtacctggtcaacaggaaaaacataagaaaaaaaggtgttataataagaagaaaagagtgttgaaattgggtatagggatctctacattataaacatataggaaccttgactttttatgccactctcaagtggataatttctggcatcatggttgaatttttcaaatgtcactttttttttgttctatttcacactattatagtataattaattagacacatcctctaattccggaaaaatggactgaatgacagatgaaaataataactagacatcatctcataattttgttttctattttttttaggtaaatactattttagatcgtgttatataaaagttaacaattagatcttctattttgttaaatgataaattaggctatgtattttttaaaattttacaaaatagtacttaagctaattttttattaaaataaaatttaacaataagtcgatctagggatattacgacaaatttgttcatgaatagataccgtcttcaaattagttatatttaaaaaaaaatggttaaaaattgaacacaatactattttgtactatttaaaaaatacagagtcaaatttattatttaataaaatagaaaacctgattagtaatttttgtaaaacacatgatccaaaatggtattaacccttgtggaaaacatatcatggatttatcccaaacaagtttttctttttaagactaggacaaaaaataaaaagcatagcatagtagagtagagtataagaagaaatctcacttggattagtgctagtgataacagcagttccagcaaaattacagctatttggaactgggttcttctggtaataactattgaatgcataagaagcatgatctcgaatattattcgggttataacaacttccaccaggctgaattgcagagcaatcagcaccaccaaatccacaagcatagtccaaagcaacttgtaatgaagtttgtgacacacttggacttgaaacacaccaacttgcacctgaagaaccaggggttgcagcagtggtagtagtagtggtacttggattcagtgtaggtgtcatggtaacaggagagctcgaatctggattcgaattcgggttcataattggtatggaagaagttgtgggattgattggagttaatgttggaacagttgtgattggtgttgtaatgtccttttgagtatttgatatttgggaagtaaattttgaatctttgatgtgttcaataccttccttgacacttacccttgaacctgtacttcaaagcaaattaaagttagctttaatcttaacatgttttgttgtttttttttgggcaaacagagttaacatgtgaagaaagtaatggtgccaaaatctgaatagggatcatgaaatcaaattattaccaatatctcttcttttgacaaaagaaaattaataaataaataaaagggttctgattgaacttgtctttatgctgtagcataaaacaaaatacaaaatagtattttgtttcttttataagagactggaaatgtcatacatctatatagttctattcacattagttaaaaatcaacacttaacaaacaaaatgtttttgttttttcttgctaaaggtcaccacacacaaattgggttctttttttttttttttttttaccattttggatagttaggtgacctaagtttaatccatgtgaagtatgcaaataccaaatagtaggtggaaaagtttctttttggaatttgagaaaaatatacataaaatatcttgaaaaaaagtttattggggagtgttcaatttgggtatcttcgaggtaaaaaaaaaaaaataagagtactaattcaagatgtccttatttatctacatgaacaaactggttcaatgaaaaagctttaaagaaaggtttgaaaatagaatttttttcagcaattattgcaagtttgaaaaaaataaaaataaaagctttaaagaagattcctattcttatagattgaatagtcttttttaagagaactatgctcattggtatcagattcagcagagaaattctatacccaaaacagtaagaacccacccttgaaatttgcatactttagattagatatagaacattgaatacccatctctcattgcacattatcatagaaataaataaaaatgaagaaaaaaaaatataagaagctgttggaagaatcttaagaagctatcaacaagttaaataataaagggttggagcatcaatttcaacagtcaaaaagagagaaaagatgcaaaggaaaataaagagaaagcaagaaaaagaagttgggacttaactgaagattgaacaaaataaaaaactaaacttgatataaaaatcaaatctttatttttttgaacaaaaaaaaataaaaatcaaatctttattggaatagagtaaggggaaaaacaaccaaacacaacccaaaacacaaaattaattttttataacaataatgataataaaaaattataaaattgaaaccaaagtacaaaacaagacaaagcaagtcacctgaacaaaggaaaggacccaataggaaaatcactacatgacaataatgaagtcttgttcttcttccttctctcttgcccattgtttagctcttcttcttttgaaatcaagaattgttttttcttcttcttcttcttctttggtataaaaagagaacagagaaagagaaaggttatattacaagggagagaagaaagtagtcatcaatggagtttgtgggagaaaagaagaggtatttatagctcttctcttgtacttaaatatagaaatcttgttgaataagaagacccttttgaaagagaaaggaggagacatggatgggggtggggtgtatgagggttcaagcaagagagggtgcaattgcaaaaaggagggaaaaggtggggaagaagaagagttgaataaaagttggagagagagagagagaaagaaagagagaattgtttgtaatttaggtttggtatgtggggtggtagtaagtaagtgatgattgtaatgatggtgatgatgtgtgcatttgctttttctcttttattgtgtttgcattcttcttttttctgttttggtgatattgactcactcacattatatattcattgattcttagtagtagtaggagtagtcattacccaaaccaaaccataataaaggagcttctttcatagtttgagaaaatagtttggtttggtcttctataccttccatttaaaggggtgagccctacactaaaaacatgtgatgattctgatattgacactgccaaatagtagtaaggactatgaaaagaaaaaaaagtagagagtggtctttatacttttttctacttcatgtttaattttgttagttagaattatttgatctattcaattaggggccggaagaagatgggtgacagacaataacaaaaattgcattaaataaaaagatttggatttttgttaaatgagttggggttattattgaattaaaaatcacacaacaacttatttacaaatatataatatctgtattaagttagttagattagtgcaataaatatgttataaaaagattgtggatatgttaaatttgttgtaaatatgttaataaattgataaattaacgaaaaatcaagcaaaaatctttatataaataaattatattggtcggatagagctaagtgacagatcaacacgtttataaacaggttgaattaaagttttaatttttgacaaacgtatagataagtcaaatttaaatatgatatttgcttgtaatacttattttgatacaacttattaacacaaaataccacccgtaccttcaatgttaaatgttagtacatgtgagtttcaaatttcagttatattaagttatagagtttaagatatatatatatatatagggaccggattttgtcccgttactgtacggacacgga

SEQ ID NO: 15498 - DNA, 13382 bp, Cannabis sativa
tcagaatgatttagagtgtatttggaaacccaccttataatttagaatacgaaatttttaatcaaacacaagcatccaaaattaaaaaacaaaaaacaaaatgaaacccttgttaagggacacttgcataaatagagtgtataggtggtcttacacttgcttttataacaacaaaatcactacagttgtgaactaaatttacatcaaactgaccccataagcaaaaacaaactaaaaaataatgctctaatccaatggggccaatccaaagactcatctctatcacttttgtataagagagagagagagagagagagagagagagagcacaatcaacactcactccagcatagtagactgcacttccaacaatctaagctcttttcaattcaatgctctgacaggggagaataaaccatacaccaccacctatatatacactcttgttctatagctctatgcaggtctcaccggaagcaccatcagaataaacaagaaagaactgtagccccttttttcgggtaaccattaaccaagtactcctattctttactttttacctttttcctcttggtaacaaatataatattcttgtttctcaattcagtcatgaatacaaaataggcacaagtatctaatcgatttctccctcctctacatcatttagagccttaggaacacaaggtggctcaacttcctcctcttcttcatgatcctctttcatgaacaagccaagttgttccaaggcattactgcccccgaacttgaaccctcctaagccgtcgtgtgaatgatctgggctagtttcgtctacagagctaggtaactgctctgcaggggcagttctaagcatttccaaatcttctaaaaaccgtgaattctcattaatttcaacagtcttttcgatctgcgcaaacatcatgtgttccaataaaaacccaaacaggattccagactgaacaacaatatatagtgcaagcagtaatttttacctgtagcaatgcctgtcgggctgcttctctctcaagctccctcttccgcttagcttcagcagcagcttctgcttctgctcttctccgagcatcttcagcagcttttgcttcagcttgtaaccgtgctttttctagtgacacgatggcaaagttcaaaattaaaacataagtcactctacattttatttattgggaaaacattcattcatttcactttcctcacacaaaagtaaacataaacgaataataattttattgcaaccttttctctgttgtagttcaagctcctccctctcccgacgcaatttctcaggatccttatcgccctaatcccagccaaatcaaaattgcacagaaatcacatactgagtggaaagtcactcgataatagacaggtcgaaataggattagtattaaattgatacgcacctcattaagagttttttcacgagctcttaaaatggtatcggcgaaacgatttttcaatagagcagccctgtactgcttctcgggggatacctgcctcccacttggagcactatccgctaaatttttatatttttttaaggactgatcagtgagatgataccccaaaaccaaaagtagaacagttttcttttctaactcttgtgcttaccatcttggcggctctctgattcaacagaatctggcttttgctcaagaggttgttcaacttggtccaagcaactatcagactctgtacaacctcacaggaattagcaaattttataaatatgtaaataaaaccatgaacaaacttattttgagaaaatcggaagtacttaagcatttggaaacagtcaaactgttcttaaaatcaacaaccatggacacaaattaagaaataaagatcaaggcacacaagcacttacgatttatttcatgtaaatcactaagagttgccattttgtctaattcagctccagagtccaatgtttctggcacctttaaggacacaaccaaccatttactatcaccccagaactcattgagtaggaaaataaaagaattaatgaaaccattgcttgtgtcagaagtaaaaactatctaagatacctttgaggcatcgaccaaagttgaggctattgcaccaccacactcactttctaaaggacagctggattctgaatctgtggatcatacacaagatacagtgaccaagttttctccatattttgataaacttgaaggcttttttctcacatttaaatcatatattttttacactttacaaaagagagattacaattaaattggaagttcaggtatcgaattggagaaatacaagaaaaataaataaataaaaaaccactaaacaagctaaatttaccactggagccggctgaactgataccatggcctgtgtccttttctatttccataggggcgcagctcgatataggagggtcatttgcaccaatgtcaacatactcatcagcaggctcacttcctaaaaatatgcagaacatttgacaagaagttacaaaaatatgtcagtttcattaaacaagcaaaaacagtgcgcagaaatgtgaaacatccaaaaagagactaaaacaaggaatatacaacaagacgaccgagcatcacctttgaaatgttgcatggatgaattgctcaaagctgggtcgtgcaaaagctacaagagataatatcaaaatgattagcccattttataaaaggaaaagaatgtcttgtatataagtaggtaagaaagctatagttgatacctctatttcacaaggttcagcctgtgaatgacctttctgcttctcttccaagtattcatcaacaagcttacgcaatgtgaacaaggtttcatcactgagatcatcaatatcaatctcaatctcatcctccccagagtccttgctttctgaactattatccctcaagaaatcaattatatgtacaggcatctcattctcacccagcaaggattctaattccttgcccaacctatgtttctcttcgtcattcattactcttttcacaggctctggccttacctctggttgggtaggaatcactttcctctttttcgaaggggggtttggctcagctatttccaagtccacaacagaacctgatttttcaggtaatggttgagaatgaacttttggcagctttttctcaatagatttccacctcacttcaaaaaatttattaagggtatcagccatagcatggacatcatttccggggggattgtaggtcattgcgtttgtgaaagtaagtctcacatcagcataaaattccatgggatttgagtatgatcctgaagctaacttgctctttacagttcccaaatccatcggatgcttgataacagtaaaataatctggaatattcaacttcactacatcaaccggggtattaaacacccatccaaactgatgagtcatcaatcgctttaacaacgcctcgcattgtttcaacaacatcacatttgtagtgttcggagctgaagtccgatttgttgattcaaacttcccagaagaattcctactcgtttcagctttcttacctccaggattcaaatttttaacaggaccagaagttatcattgaggatttcttggactttccaatggctggcacattcggtccactactatagctgagcataccactggaagcagacctcgcaagaccattaggcatctgcgattcaactctcttcagaattacccgagtttgtccaagatactttctcaatctatgcagcagatcctttctctcagatggtgacaaattcgacatgttaatcacttgcttcgggaaacagaaatcggcattcatatcagaattcatacttgtgcacttccttgtcaaagcacttgaggcctcagaagcagcaatttccatgtctattcgtcctgagatacctgaaccttcagactctccagctgtatgaatggcattaccataatagcttcccgggtacctacttgccttggtaacagtcatatcaaaaatcacagcaaatttgctccttcccaattgttatggactttgtatggtttataacgataaaatccccacaaaaagatttcgaatttctgcatacgtatcaatcatggagctaaacattaccatatcagcttatccaaacaaaaaccccccaactcaacactgataatcacaaagagttcaactggtttatgaggatgaaagatctaggttaacaaaaattggggaaaatgaagggaaagctaaaaaaaacagtcctcggtcatcaatttcaccaactgtatataaagatgtagaatttcaaacgaaaaacaaccccccaaaatagaagaagagcaaaaattttatattatgcaatgctcgagtcaaatttctcgatataccaaaaaactgaaacactgaaagcacataaatttctttaattccaaaactgttgcagtgaaaactgcccagaaattctaaaaggggaaaatccctaattgaattgaagaaatgtttagacttggagctgtgttgaacagcaaaattgaatgtttaagatcgtgaaaaaaaaaaataataaagaaaaaccctaaactattgattaccggtgagtgggagatatcagaagaactgaattgaaagcttcgatccgcgagtgtgacgaaaattggcgacgaagaagagattttagggcctgagagtgagattcaaagccaaaacgaatgaaatcgaacgagagagagagaaccctaagccttttcttagatcgcgaaaaaaagtcggttgacgctgttttgggtgttatttaattttactttttatcatattaacacgtgccacacatgtgaatgtgtagaccttatctaatctaaatctattgtcaatgttttctttttttttagaaaaaaaaaaatatggttttttgtatgaattttttgtacactttcctgttttggaaatagtaagaaacatacatgtactaagttttatgaagtttttgttgtgggtattaattcaagtcttacctctaaaaattaagtaggagttaacttgaatacaagtgtttcacttaatctattagtatgagatatttttgaattgtgtttaaaaataaaactatgaaggagttaagatgaggtggcagctcaacaaggtggaagaacaaggctcaacagttttgtgatggagaccatgtttcatgctctttaggggtgtttaagcttgtaggctattatttcgtctttcatgtgctcggaggtagttgtttcttttcttccctcccattgatttttattcttttctttgtgattgtggtgacagtttgcataaagaagaattagaggtcttattggtggtggtttggagggtttggtttcattgtaataaggtggtgcatgaaaatagggtgttaaatgaggaaggggtccttgggtggtcaatgaacttctaccattgatctattgaagtgaatgtttcttctccctcctccacgggttgcttcggccttggtcttacctccaattggtggcctgaaacttaatgtggatgttggcctttcagtggagaatttgaaggtcgagtgtggggtagcggttcatgatttctttggtcattgtcttgcctccacattcattcttttgatttctgcaatgatacctccgattacagaagctatggttgtgcttcaatgtttagaacttaaaggtggcgtttgattgatctcgggtacgtgaggctatttctaatcagactcttcttattgtgaaatttggtaatgttattgtgaaaatcttttggatgtgttaatgtgttaagtttctctcattgtaatcggctttctaattctatagcttataattggctaaattgaccctctctcttgatgttcttatatctctagttgtatttgagattttgctctgcttgaaagagcattttaatgatatccttattttactcaaaaaaatgtaccaattcgtagtgtttatttattttttaaagtttcctttttctttaagggtaatatagagtaatattttttgagttacacaaattgagattcgatcccaagataccccatcacacacactccaagatgcagtgagctagctagcttaagtggtaaatggtaatatagtaatctgcagctcaagttctattcttctaatatttttaacaaaaatgtaaattggtgatgtattgttaaaataatttacaaaaaaattattccaataaaccaagtaaaaaacacaagatttacatatatcatctatgtaaaaataacaatattaaattatttcttatgaaatttgccaccctaagaaggcattggaaataaaattaaatggattgaagctaaatctttcattatttgtaatcgataaacatataactttattaataagataaaatttcgtcttatgagcaaatacaatctagtaatacgagtaagttgaagtctttttgaaactaagaagaaacacgttgagagaaatataagtttttctaattgcaacaagtatatatttatatatatataaatataatcataataaataggtgaactttcatatgaaagctaggtcttcatattattacatgggcacacccctaaccatttgtgcgataacccttcataatttgtaattttatgtcaatcgatacatgaatgctcgacatgcacttgctaaatttgcaggcgtttcatttgcaaataaagcatttaatacatttataattaatgtgtaattgattaaataatgatctagattgtgaaaataaatacttgctttgtgggtggctagcaatattctcaacttctctgactctcttattggagaagtggcgacttgtcttctagccctagaatcaacgattcgtgggaatcatttttttgtgatcatagagagcgactctgagacagtgatcaatactctgaagggaacttttactgtttggggtattactatttatttatttcaatgtaaaatgctcttaaatcttttgactagctgtaattttttcgtttatttctagattatgtaactttgctactcataatgtggctaaatgtgtttttagcggtcatgtgactggtatagtagatctatcctccatactgggtagcttaatttgtaatgactgcgaaatctaacttctttggttcttaatataattacacaattattcaaaaagacacattcaaattatggacctaatcacaattctttaaatagtggagtaggcaaataaagctttactgaacaactataatccattgtgtcattacaattttttgttatattatttactagttattgagtactcactaagtacatgtattttgtttctttaggtgtttttagtttccttaaatactcgtaatattgtctaaattcctctaaacaaattataataaaaaaaaaagttatagcactatttttggccgaactcaataaaataaatagagtattattattagatacttgttggacagatacctagtaccttctaaaagtgaccccctgcaatttaatcaccataattccactatatctttgggaatgtcataaactattttcaaacttcaagacatttgtacaagtttgtgtataagcgagttaaacttaaagttcacctaacctagagatccaaaaaaaaatttacctttttcaatttatacattttttaaaaaaatactaagtgctaaaaaatttatttttttcctatgaatatatgtaaatatatattaaatgttgaacgtgtttctttgataaaggaagaaaaaagaatttgaagcatcgagaagaaagaagacagaaaaaaatagtttttaatattttataattttattatttatttttttaattgattaggtatattttaaacaaataattatataacacatgacacaaacaatcacttttttctttattaaagtaatgtaataattgcaaatgataagaaaaattgaccacaaatcaccctagaaatggccaaaaaaaaacaaaatagcataagagcaaacatattttccattaaaaaaaaatgtgcaagcaaaaaattgacccaatgaagagaatcaaagaacacctgtcctttcacatctaaattcttttctttttttcttttctatttgataaaaattgtcttcttcactttcaccatacctagtacttttgcataataaggactaattaagacaagaacaaaatgtaaagagagaaggaaaatataaacactttctcttttttttttctagtactttttttttagttcccataacacatttgctggctttgcttacctcctctactactgaaactgagatccaaaattggtaataaaggtcaaaaacataagcccagaagaaagactccacactaagatagtgtactccccaacttctaagctttccacaagaataattcaataaataaaccaagtactatatgtacactctcccttctaataaggtttgcttctcatgtcttcataagatgctcacaatctcaaccaacttaaccgactcggtaccaaatatatgttcttgtgtttcagttcagtcaatatacctaatcaatttctccctcttccatacagtctatggtactaggaacacaagctaggtcgccttcttcttcctcgtcatccactttcatgaacaacccaagttgttccaatgcattactgctcccgaacttgaagctacctaagccatcctgtgaattatctgggctggtttcgtctgctgagctaggtaagaactctacaggggcagtcctaagcatttctaaatcttgaaggaaccgagaattctcattgatttcattttcaacagttttttcgatctgcacaaatgtcaaatgttagaacacggagtaagaacatgaccctactctatgcagcaatgtttgaataactacctgtagcaatgcttgccgtgctgcctctctctcaagttctctctttcgtttagcctcagctgcagcttccacttcagctcgtcttcgagcatcttcagcagcctgagcttcagctcgtaaccttgctttttctggtcagacattaagtaaataaatacatacatacatcattctccacttatttgatgacgaaacacatacatctcacttagtttttgcatgaagctaaatacaacatatcaatccactcatctctaatgcatacaaagcacaaaactacaaagaaattagataagtagtagcaacctcttctctgctgcagttcaagttcttccctctcccgccgcaatttctcaggatctcctttatcaccctgatctcagccaataaccaaatacatgatcatgcccagttagccatgagatggacaggtaaaactagaataaatataaaagagccgaaattgaaacccacatcattcagagttttctctcgtgctcttaaaatggtatcagcgaaccgattctttagtagagctgctctgtattgcttgtcaggggagacccgtctcccagttggaacaccatccactatattttgtaaggactgatcagtgaaataataccccaaaaccaatagcagaacagctttctttctaaatcccatgcttaccatcttggcagctgtctgattcaacagagccgggttttcgctcagaaggttgttcaacttggtccaagccactatcagtctctgcataaccgaaagattttaaaatttaataaatatgcaatctgaattccaaaataaaaatcttttagtcacatgagatgaaactacataaaacaacatgaaacaaagccaaactatacttaaaatcaaccatgaaggcaacaaatcattctgatgctatgatatttaataagtagaaatacaacatttttattctatcaaatctcatcctagcgtttatcagaaacagaaaccaagatcaaaattatcttgatgtgattaaaaacatgaacaaaaaacaaacttaccatgcctttcattatgatcactaatagttgtcttttcgtctaattcagttgtagagtccaacatttctggaacctgaagaacaaagcaaaacaaaacattcactatagccccacacagctcattgagttgccaaaaaaataaaaataaaagataaaagcctaatcattcaccaactgtccatcgtgagaactaaataactttaacttgaaatatgaaacaaatccattgccaaataccttagagtcgttaactaaagttgaggccttagtaccatcacagtcactctcagaacgacagctggactctgaatctgtgaatcatcaatcatacacatggaactcagtcactaagttttgatgtgaatatattgacaaatttgaatggtttttcaaaaccaaatcaaagaccaaatggtagaagtcacataagcaaccacttaaattaaagaaagattaagagtaaggttgaaactttctgctcaaaatagggaggtctgaatacataagagaaaacaaaaaccaccagagtagataaataacagaacatgacaagcacaattaccactagagctgtttgaactcatagatttactgatcatatggtctgtatccttttcgatctccatgggaggataactcgagacaggaggctcatttccaccaatatccacatcctcatcaattgggtcattttctgaaagtatatatcacaatacatgtgaaaaacaagtatagaaagattcaaggccgtacaacccagctatgaaactaatttcaggggactttgatccgagaccattgatagaataaatccaattaacttattaataattagaagattttgagtataatcagaaattatttggcacaaacaaaataagcagagactaccttcgaagtatcagaagtttaaaataaaagtatacaattagatagcgaagcatcacctttgcatggttgcatagatgaattgctcaaccctgagccgtgcaaaagctacagaagatgacatcgaaacaataagtttccttggtacattttataaaagggtattaatgtttagtagtttagcaggtacaaagaaacgtgtatttacctctatttcacaaggttcggcttgtgattgccctttctgcttctcttccaaatattcatcaacaagcttacgcaatgtgaacaatgtatcatcactgagatcatctatatcaatctcaatctcatcctctccagagtccttgctctctgaactattatccttcaagaaattaattatatttacaggcatctcattttcaccacccagcaaagattctaattgcttgcccagcctatgcttctcctcgtcattcattactctttttgctggctctggccttagctcaggttgtgtaggaataactttcctcttttttgaaggaggtgctggctcagctagttctaagttcaccctagaacctgatttttccggtaatggtttgggatgagcttttggcagctttttttcaatggccttccacctcacttcaaaaaatttattaagggtatcggccatggcatggacatcatttccacgaggattgtaggtcattgcgtttgtgaaggtaagtctcacatcagcataaaactccatgggatttgagtatgaacctgaagctaacttgctcttaacagtccccaaatccattggatgcttgataacagtaaaataatccggaatattcaacttcactacatcaacaggggaattaaatacccatccaaactgatgagtcatcaatcgttttaacaatacctcacattgtttcaacaacatcacaattgtagcacttggggctgaagttgaagtccgattagctgattcaaacttcccagaaaaactcctattcatttcagctttcttaactccagcattcaagttcttaacttggccagaagttagcattgagggtttcttggatttaccattggttggcaaattctgcccgctgctacagctaagaatgccgctcgaagaagaccttgcaagaccattaggcttaaacaactcagctttcttcataacaactctagtctgtccaagattctttctcaatctatgcaacagattctttctctcagatcgtgacaaagtagacaagttcacaacttgcttgggaatacagaaaccagcactcttgtccgaattcatgcttatgcaattcctcttcaaggcgcttgaagcctcagaggcagcaatttccatgtccattcttcctgagctaccagaaccctcagactcaccagctgtttgaatggcattaccgtaatagcttcccgggtacctacttgccttcgttacagtcatatccgaactcaaagcaaagcactagtttgcccctttccaatctctatggactttgtatggtgccaacagatttcaaacgtctgcatatgcatcaatcatgaagccaacattaccatatctgcttatcccaaccaatactcgtcaattcaacacttttaaccacaaagggtttgactaatttttgaggatgaaaaacctaggttaaaaatttggggacaaagaaaaaccaaacacacacatacacactgttgtcaccattaatttcatcaactatatacaaaaatatatatactttttaatgttaaaaacaacaaaaatgctgatttatgatttgcatgggtctaatttcttcaaacactgaaaaaaaaaaaaaaaacggcgagagtaatctaaaacattaaaaccacataaatttctcaaatttcaaaatgttgccatgaaaactgaaacttttcagccagaaatttcaaaaaagggaagtgaattcaaaaaagaaagtaatttagagttgaagctgagttgaaaaaacgaaatcgaaagctttacgcagcgaaaaaaagaaagtgaaaactgaaagaataactgaatcaaaaaacctaaaccatattgattattaccggtgagaagagatatcagaggaatcaaattgaaccttcgctccgcgagaatcagaagcaaagattatgactttgattttgattttgattttgaggggctgagatttgcagctaaaacgaagagagaagagagagagccctagctttgttagatcgcgaaaagtcggttgatttttttgatttagggttattatttttaaattttacttgacacgtgcgacgcatgtgaagaaaaccctatcttattagactcattaccttttttactacatcatttacattacctcataaaaatttcttttttttttttaatttttacctctcatattaaaatgttaattccaatcttttaatcaatttatgcacattctgtcaatttttgaataataactacattgaaaaatagagtttttgatattttagttcaatacgcctatttaagaaaacttcaaacctgttttcaatactataaacttttcgaaatttgta

SEQ ID NO: 15499 - DNA, 4984 bp, Cannabis sativa
acccgtctggtcccggggctttcatggggtggaggctccagactgcatttttaatctcctgaggtgttggaatccgactaatctcaaggttgtcatgatctcgcaccttcttctcaaataggccatcaaattcagcatcaaacacaggttgagagctctgaaataaatctttgaaatgctcctggaagtaaaggccaatcccgtgtctgcttcttctccaattttcattgtcatcaagtatagcccacacatgactccgtcttcttctaacaattgttgatgtgtggaaaaatttggaattgcaatcgcctgcgtaatccacaattcacgagacttttgtttccaaatacgctccattttcaattctttatccaaaatgtccagctgaatctgtctctcctcatcactgcagaatcccatctgagattggatgaaagaaagacgttcacggagtcgatgtaactctctatcacaaaaaccaaagtgttgccaattccacctcttcaaagcctttgtagtcttactaagcttcctagtaactctgtacttttggtggtctgcactggcttcattccaaacccccccaattacctccccacacgtggggtccgatgtccaaacctcaagaaatctgaaaggaggctttactctttgctgttgcatattggtgtccaagataaccggggcatgattcgagcttataataggatgatgagtgagacctgccaacaaaaattggaggcaccaatcagcacttccaatagctctatcaagccgtttgcagacgcgatctccgaggtttttgcaattagaccaagtgaaagtcgctccaatgaatcccacatcaatgccccccgtgtctagcatgaaatcctgaagaaagcgcccttcgttccttccaaatttcttgcctccccatttttccttatcattgataatagcattcaaatctccaagcaaagcccaaattgtgctactactctgaacaagtccagttaagttcttccaaaagtcgactttgagtcttgcataaggcgtgccatatatgcaaaagagattccaatcttgtaacccatagccagaatgaattagcaacttaaaaccagtgtcataagaatcctgaattgtgatatttagccccattcgtcaggccacgcagaaaccacctgccagccccactgctgggatacaacaagagttaataaatcccagtcgattcagaattgtgaccatgctttccttatccaccttagtctccgccagaaaaatcaaatccacacttcctctttgagtaagacctcatagggtcctctcagtcgtcggccgtcgaaggccacgacaattccacgaaaggcacctcatgatgatgctgggggcatgcttgtgaccgcctcctcgccatccccaaaattttgaacaaacgtgattggaacatcaacacattgagaaagtatttgatcaagattacccgaaaaatccttctttccatttccttcacgagctctgcttcttctagttttcactccacttgatcgatttgtgatgagttttcctcctctatgtcatatccgcttggtgctagtctcagccttattcggatcactatgtcccagattaaacttctcaactttattcaaaggaatgacaattgagctctcccctttctcttgtacgtgcttttcatcatcattagtgtcttttgcaaagatagatccctggtattcatctggagtggggtggtaccatgtatgagccttgcgcttccttgaccccaataagtggtttatcatctcagaaacattcggggggtttgagattaaggagggttgggctttgtaaaggtctattatgtccggccctaataattggacatagatttattgaaggtttggatcattgctaggccaccttatgttaatgggctcagggaaatgatggggtctttggaattgacaagtccaaatgtgtggaatctccaaactttggataagagtgggcccaatatcaggtagggtatcttctctattattaggcccattaggataggcaaaatcaagtattgaaatttcagaatttgaaagggagggaatattcaaatttaccatatttggcatagtacttgggaccacatcgtcattggccaaaagttgttttttcctgacatccgtattaggcaaaacacctcgttcctttccactacgctgcatggcaggagcagtaccatgcagggtacgatcatcaccaggtggcacctctgaggccactgtcttgccctttctcaacgacggtgaagttccctccagttcattccattctgttcccgtcgagaagaaagctgcctccacctgttcttcgaatgatgccttccaaagagcgataccccttcatcaacggtgatcatcccacgactgaagcctgctgcattgaaacaactccccctaggcccttcagtcttaatccatggaccatacatcttgaccgccggtctcgagacaggattaacccaagcagtaggttgaagacattctctgtcctcgtgggcaaacctcccgcaattaaaacaaaggaacggtaacttctcgtatttgaactgcacccaagagcttggttcagctgttgttttgaaaaagaaccccgctggtattgggtagctgatccaaacatctatccagcaacgaaggaaaccacgcccgaccacctcttctttcttcttcccatccggtttgatcagttgccctaccttctttgccaaaatagggatgtttgaatctgagaggaaacgggttgggagcccatgaaattcaacccaaaacctagccacatcaaattctgacatacgaacttccccttctagaggccatggtttcaagtaaataaagcttgaatactagagtttgacgtttagttggaggtaataaaataaaatggaatagaaaaaaaaataattttaattctatttctttattttattgcattttaaagtattaaaatgttattctaatataatgtttttttttactatttcagtagaatgattattctattttgaaataaaaaaaaaattattttaatgtaacatgagaaaaaaaattctatttttttatcaattattttatatattttaaattttatttcattctatttttatattttcattcatcctaacaatactttacttagtattagtggcaaggaaattgcataataaatcattacaatcccactttggttgccttaagatctatatcatcattgttcaacttatacttttattttaggtctccaattctagttatcaaatttaactttaaatttttagcaaaaacctcaaaatactctaatcctcttattaaattttattttatttttagaaaacataaaaaaaaaataaaaataaagagacttatgtgtgataagttaagagaaattgagatagaataataaataatttaacttatttattctcttctaatcctcttattaattattattacaaatgtggattttcctttatttaatagctaggttagttgccaactactcttatggttatggagggagaggagataaggaaatatcgtgagaataaagtgtgcataatatcgtgataaattgagttagttcagaaatgtcattattgaccgacagtaatggggcatgcccaattgtacggaaagataagcttacccattaaagaaagaaaaaggttgtgccacaaaattatataccaaaatttaatttttacttttcacatcccatgttgtttcttgttttgtgggttattcaaattcaaccaataattctcatatatttttgttttttattttgaaaaacttccaaaaaaaaaaaaaaaaaaaatactagaatttaaattaattattataaaaataccatcacataaatttttttaaaaaaatattatgtttttataaaataacaatggaatacaaaatagaacaactaaaaacaatagtgaaacaactaaaaaacaaccgtaaaacaactgttaaaatttaatacagtacacagtataaaacttatacagtattttttgaaaaaatttcacctcacagtaaaataaataaaaaaaaaattaaaaatttcagtatgtaatgtaaataatctttttattttttctttaagaatctaactcgttaataataaatgaaattataaatattatgggtttttaattttattaatagaagaaaattctttattgtttgcataatgttattacttttgttattttaatttggattggcttacctctaaaaaaataataaatgaaattataattttaaaaatataattttttattttatgagaaaattaaataaaaattaaaatagtaaaactaatcatgcaccttcataataatcagaagagtgatcagtgatcatatataagggtaactaggtactttatactaattttttcatttttttttaattttctcataaaataaatttattgagaaaaagtcatatatttacaaatttatactgtaaaacctataaaatgaaaatatatcatcctcttttaattaggtcatcagtgtacttcgaagattctcattccattaagaatgacattatcacagtatgctagccccttaaagcgccaaacataaatccttctataaaaagttgtagtaagattcgaacctttgaccaaaataataaatgatgccaacaaatacatccctaatacttttaaaagaccattgttattgggcattagtggtgcttagcacctctagacatgtcgttttatgattgactaacgatattccctaaaagttattatattaagagtaatttgcgacataaattaggggtgttcacggattggtttggtccgaattttcatagtttttgaaccaaaccagtatagcgggtttttcaatattagaaaccaaatcagaccaaaaaatttctcaaaccaaaccaaacaaaaccattaagaacggtttggtttggtt

SEQ ID NO: 15500 - DNA, 4726 bp, Cannabis sativa
aaaaaaaaaaaggttttatgaaatctgacaatggtgaattacatttgaactattaagtgtgtgtggtcgggttttgtagttttgggtgttctgagacgattctgagactactaccactgatttcttgctttttctttgatttctcggggctgattgtttgaaattggagttagaaattgatatttttgagtttcgcacacaagatgtttgttaaaatgtctaaatgaaatttcagcattgttttttgagattttattggtttaattgctttgttaacaggactaaggattgctaaattgaatgtgtatcttagagtctattatggtgataaatgatagttgatattgaagagtttttgtttgtgtatttgattatgtatttttgttaatggattcttggatttgtggcttaatttagaagaatttcaatgcttttcctatgaagagaggaggctggaggaaattaatgctcctttgctttagctaatctgttgcagaggtactctctcattcctcatttctcccgttctctctctctctctgatcgacggcattggatgccccatgacatcggggacgaactccgggcttgggatgttctttctctgttctttgttttcatctcagttctctatcattctatatttacaggggaaaggggacggggactgaaaaccaacagcgcaggtatttttttattttactccattcaacatatttgtttactgctttactctaggagattgtaaaccttgttaagatttttagtatttcttagtcaattgtcttgtggtcatatttggttatgttcaactttttgtcatctagaagaatactgtatctttctgtttctttgagaattctcaactttcttttcaacattattcttctggaatggtgtgagttcactgagttgtgatgtagatttgaggattaagaatttccagttaatgagatagaatgagaaataaggcatgtgtaggtcagtttctatgaacaagattaagcccacacactagtttcctttactgttagccttcactccacattctgttcaggtccagccgggcggacagcaactctgtcaacaatggaagaggattatctctcatcaaacgctaacaatggtggaaatccttctgatgctttagaacaagcccgccaaaggaaacatgccgccatgctcgagcgccttgcaaatcgtcaacacactcgtagatcagcagagtccgatgactcctccacctctcctgctttcgagtccacttcttccttccttactcgcttttctgattccaaacggtccattgaggcccaaattgcgcaatcccgactcaccccgatgcccgagacaactcagctcaaaccccaacttgacgccatttcagcctctatctccagtcttgaaaagcttgtcgccgagaattcatactttttgccttcttatgaggttcggtcatccctaaaagcagtttccgatttgaaacagagtctcgagagtttgagcgctgatctagttcccaaaaagaaattctctttcaagaacaaagctccaaagaaagatcctgctcttgattcaaacagagagaagaaagagactgaaattgtaaaaccagagaaaatgtcctacacggttccggattcgccaggatttcgaaacaagactagagaggtcttggtgatgaaattcagtggttctgagattggcgagttcacaatttcggaccttgattcgtgcgaggtgagattgataggttgtgttagggcattatttgttcacagacttcggaattgtcgagtctatggtggtcctgttatgaattcaattctgtttgagcaagttgaggggtgtgttttcgtaatggcatctcatcagattcgaattcatcatgccaaagccactgatttttatctcagagtcagaagcaggcccataatcgaggacagtagtggtgtgaggtttgcgccatactgtttgaggtatgaagggattcataaagatcttcaggaagccagccttgctgaagagactggaaattgggccaatgtggatgattttcgatggttaagagcagttcagtctcccaattggtcgattttgccagagaatgaaagaattggtttaatcgacatttcaaattcaaatttggataccagatctgaagaaatttagattgttgaaatcttccaaatttaatcgatccacattttgtgtttcttatgagtgcttcattgagttatgagagttcaggtaacaaacattccttgctgtatttagtggagaccatattcattatttagatagttgggttttttccgttatatttggttgattattgttaatgagaatgatataatacctaagtttaatttttggctgtaataatattttaagttataattttagaatttctgtaagtaccttattacaaattgttaaaaaattacttcataacaatttttgattggtccagcttattaattttttttttttaaaagaattaggttaaatataccaataagaaaatgatacgtgaataacacttaagtattattactgccaaaaattaaaattaagtatttatttgcaagttaaacttaagtatttatgctataaatttctctttaatatataagaatccatgagggtgcctttgtaatcattgttctgagatgagatgaggttacatatggttcacataagtttcaagagaaagtgaaaaggaaaagaaactgttttacctctttctgttattaaataacttattttcaagaatgctcaaggattgtctaaagaaattgagatgtgttaaattattgttattgcagaaagactaggaaatcctatgctatatttcctcttcttttggtattaatatattattaagtgcttccaattttccctcaggtttcagtattttgcttctgataaattgaaccgattcctctgaagtctgaacccaaggagttcttcaactccaagctaattttcttgggacatttatttaattgcttatcgattgataatttataagatagaggggcctgtattatattgtgttgtatcctgttatatgttataaaaatatggtatacaatataggcaatggattggattttgatccctttttgtaaaagatggaatctaatcccattatctgcaaattttgttttaatgtattatgatcaaagtttaatatactagaaatttagtttgatgcactatggatacccaaatgagatatacatacaatataactcaatgttgtagcatatttatatatatacagctagagtttaattgtacaaaaatggaggagatgatgtcgtttagtgaactgagaaaaattaaatttaattgttagaatgccaaatcttatacactgagcaaatcttgtcaataacaagaaactgagcatcaatataggcagatgaagacacaacaagcaaatcacgttaaatataagaaggaacctttttgttattttatttatttttattacttttacatgtttattaaataaaactaaaaaaaaaataaaggaatattatgtctaatgatttttaacaagacccagtttggtattgttctcaaatcagatattctatatattctctgatccatttcatctctctccatctggatcttgctaggctgtccatacaacaacaatcgtattttaggtgttgataaaaaaaagaaaaaaagaaaaaaagaaaaaaacaatcatattttaggtgattagaagatcttgaccattgtttagcacattcacactgactttgacttcaccttaatttgtgtcacctattcatttcaataaacaattatacaagtacagctgatttgtttgaaaaattaaaataaaaccattatggttttgtttggggtcaatatttaataactaaattatagttttaatttctcaaaagaaagaaaagcagaacttttttcttctgaaaagccaatttaaagtatcaatattttatacaaaggtcatgtgagaaatctgcatttggttttaatttgtaaaagtgattcctctttcagcaatttcaaagtattggttttgtcattttgttttgttatttccatattatccaaaccaagagttctacaatgaattctgtgaaaactcttttctattcataaaaagtaacttttgttacaaaaagggatctcctttatatgatagataagatatagattgctttgaaactatacttatatgagttcagttaaattttccatttttccataatagtgctttgagtcatatatttatgattttttttttatcaacttgcagttaatcttctatatttaaattttaatgataaaattttctaaaatatactaaactgttaacaaatttaaagtgtcatttatttttttaaagttaattaccaatagacggtttatgtgtacactcttgtacacgttatacatttatattgacacacttaatttattatttaaaaattataaaaaattaattcaaaatttataatattttttattttaaatattttattttttatttttataatttttattatattagatgtatcaatataaaagtatacaatcattcaaaaaaatataaaagtatacaaaagtgtataaaccatagttgccagggtttagaggctaaaaactctatatttagaaaatataaaataatccccacaatatatatttgtttttgttttgtgagatatggggc

SEQ ID NO: 15501 - DNA, 8382 bp, Cannabis sativa
gcaaggccatccaccacttcctacgacctttcctccctttggctatatcgctggttcgaattaggaacagtaggccctttgccacgttcaaggtcatgaataggcaaattcaagttgagcccatttgggttgttttcagctgagggttccctatgattacaaagaatattagtacagtcattatgacgcctagtgctgttagttacctgatcatctgtgcaacgttaagttgggacttgtggtggatgtcagatccgaatctggatccttcatgtgatttctacctataatgcatgcatctgtttctacattatagtgtattatgcagttaccagtttaatgataccctcgacggcgtgggtaggtgttattggtggaaaatggcccacagccatcggcattgaggtttctatagtgtggcctaaaaatataagaaatagattgaggggggtcgtggtagtactccctactcctccaacagaagggtcaactagagtggttcttttcctagtaatcggaacactgatagtgccaatgttgatagtttcattgttattgttgttcgtgtttatctgttttgtagccatttcaattctcctccaaaatctgagaaatgttataaaagtgattcccacaaacggcgccaaatattgtcaggagaatttaaacaacaccaaaaagtgcaagtattcaagcaaagcaagagcactcaccaacaattatgcgagtagacaaaattcaggctacgaaatgggcagtaacaagaatagaaatataaagtagacaagagaattatagtggttcagtcagagcttggtttgcttagtccactttgtgagatatacatgccttgtttatttgatttattatttgattttgatcacccttttatatagaaagcatgtgtttattaatattacataattgatcaaattgaactgttattacaataattgcacaaattaattaagataaacatttaaaggcataattataagaagatattcatatgttcttgtcttgattacagcaatgtctgtaacttgcgaagtcgcacatcgtctatccatattccaaacaagcaagcttgaaggctcgatggtgttggactcgcataatgggcctttaggcctacttggtttaaggaatgtcaacaatcagccttgattgcatatttggacatcctacgttgataacttaaaaaatgtgagttcattatgagtcgtcgaatactagtcattcgaaccaaacctatgtaaagaagcgatctttacttgtcgcatgagagatatacatgctaatcgaatataagatatatgcgtgaccagtattaacttctcttgatcctgcttatcttttgactatgtcagcaatggcggacttaagatttaaagtgaggggagcgtaattttttttggtaaggcaagggtaaaagtaaacttgaaaaggagaaaaaaaatattcttagtgggatttaaacccttgtcctctaacatatatgctatctaccttaaccattaaaccaaagctaatattatacttataaatattatcttttattataagtatatatcgtaactaactaaaatacatacattttttccctaatttttttagggggcgactgtcccgcctcgcttctatacgggtccgcccttgatattggacatagtatgcgactagaccttatcttggtcacatcctcccataagtttaaattatgtgaagttggctctacaagagctatatcattgacacattatcattttctattgggaactggatccacatgtcaatttcttacgaggttgtaacttgtatttttaggtaaaaaattcgtactataacacaaaatttaagaaaaaaattaagtaacatataatatatatatatataaatataaataaactctacctttagtgacaaccttttaggcataatataggaatatggtgatttataattagttacaatttttttacttttagtctaaaataatattttttatactgaaatatatatatgaatgattattcaataattagattaaaaatgtaactatgatggttatatttttttatgatataccataacaagtaactaataggtaaaaattatccttacaaaatgaaaaaaaaaaaaaaaagtaaaaattctattttaaaatttaaactaattataattatatatatttaataaaatatttttaaactaaaaatattttataaggcgattttaatatttataaatatttttcttttttatcaaaaaaatttataaaaaaaataaaataatatagatacaattagattataaataatttattaattatttttaattaattataatagtttaataataatccaacaattaaaaactcgtcagatggttacataaatgtaactattcaaatttctctcattggatataggatggacaatatagaagatatataaagtaataaaaccagttaatatataggcactaagtcatgatcacaaaatcaatcaagattcagttattaataatagggccccaaatttggatatgatcatgtgcatggagcaaaaatgttattttattttgataatataatttagtagtggtgaaaataacaggctataattaatttataatatctttagtgttatatgatgataataataaaaagcttaaaagtgttagatgaagttttagttgaagtagttaggtagaaaagaaagtgagacatgacaatgcaaaataagtgaatagatatatagatagataggtgtttaggagtttttttatttttatattttaaaacagttttttttgtatttgtacaaggttttatgtagcaattcacatggtaaccaacagagcaatttaaatcacattctaaatctacatagcaattattggagcaagttaaatggtacaaattaaaatatatatatatataatatatgaagtgattctccaaatttgtattcaactaaacagaattcgtgggattgtaatgggtggggtcccttactcttagtttgttctatattaaaaatttagagtatatcctgggattattctggcaaacattcacaaacggagtaacgatgcacatacatttgcacacaaacttgacatatatttgtgtgaaatataatttcaaccaattatttttatttaaaggggtctcacatatcaaaagtatcttgttacatgtgtgtcatgtttgtgtgtgatttatatgtgcatatattactcttttaagttatatatatcactagtttcaatgtccccagtaccatgatgtaacatattactattaaaatacatgagatttgtgttaatatctaataataccaataacaagacaaaacactattgacattctttagcttttatcgtatatgttaaaaggcacctacatcacaaaaagtgacatatcgctattggtacaatttaatattaaatttttacaatttcatttaaataataatatagagaaccattaaccactactaatgcgccacattagtataagacaccttaaggtgctcaccaataacaatgctcataaacaaaagggtacagatctctccactatgcatgattttcataagcaatcttatgattgcacgcttgtaatctttacatgttcattttggttttttttttatattagtagtactagtagttgattcgtcactaaaaaagagaagagagagcttattatatttattaatctcaagaaaaagctataaagttgagataattacatgaatcgaccttcgtatcatatcatgtacttgattcatattcatatttgtaaccatacaatttgattgctatttgtaattgaccatatttattaatttacttgagattttgtacaagttttcctacttttgtcgagcataataaggagggagaaaattttgaaaaagaattaaaggaaatgaaaaaaaaaaaaaaaaaagtaaaaagtattctttttaaatttcaaaatatgctttgactaattaaagtttttcatatattgcttaacacgattttttgttgagaatcttataagtatttcaaagagtactaaagatcaccacagcactaagagtacgattgtgtgtgagtgatacatggatggaattaataattgtttactgttttgtcttaatatgcaacacgagaaacaaaaggaatgtaacaacatcgtgagttgttgtggaagacctatacatgaagacaaatcccaattatttaccaataattattaaaattaatctcacattactaatgtgtggagataaaatatcatatacaaaatgaataaactactccttccattgtcaattaattttagagtaatttacggtcaaactccctgaactttcaagtttggtgcagtttaactctcaaactgaaaaaattatagctaaaatttctaacctccacaatcattttggtcaaaacttcttccgttggtctagctttgttatgtgccagatggctcctacgtagtgccaagttaacttttccatgtcatataaaacccttcacatcaaatttgagtataagattaaaaccaattattaaaaatgacaaatgaaaaataaaacaaaaaatccacgccagttataattaatccagaactaaattattctgtgagtaaaattaaaaacaaattaaaagcaaagtaattaaaatgaaagaaattaaaaggaaagaaaccattcggacgagtgaagggaaaaaggaaacccattctgagaaagtaaaaagtagaaagtgattttggtcagaaaggagatcgatcattgatggtggcaaaacgatatctcaagtgatctattggtaatcccccacctaattatggtaagtttctttggttcatagtcatttttagggtttctggatgggtttcttatttgtagagggttggtaggatttttaagtaaaaaaaaagttggctttatagttggatttttgttagaggtttgaggaacgatttagttggaatggtagatgtggtcttaattgtgctttgaatattgattaaagtataaaagaatctttctgtttgtttgtcttcgttaatggggtacatatgcacatgctacttttgttttttatgtaatctttttcatggggtctaaatatttgggagttttgcccaactgctccaataatatgtggttttgcctagattagatcagggcccttattgttctttcattttttccattgaagggggtaaggttgatcagttcacactgaagctatttcacgggggtatatgtttaccccttatgaaaacagaaggtatgaaggtggggtgtatgatttgtttgacaattgcaaggctgaatcttcctcaagggaggacttggaggatatggctagagaattagaatacaaattttcatttggatttctgttcaagccttatgggaagcacttgaattttgattttagggtggtacaacagaaagatattgacttaatgttggtggatttgagaagtaaaaattatgtagaagcttctatttacttggtcttaccaaatcaactacttccactggagtggagagaagatgtggatgttatcaaacatgttctaaagcctccttaaacattgaaaaagtgcacaattgaggagatttcaaaagggagtaggaggctagctgatgtagttgtgaaccccccagaccagaagaacaaatatgactacttttaaggtgcagtgatgaggttttgttagatgaaattcaagaaccaattgtgattaattcaacatcatcttctgagtcagagacagatgcatctttgatgtttgagccacaacctgcaccacagcctataccaaatcaaaatgaaggcaatgattagagctatgattgggaccatgaaaaggaggaatttgtagaaaatttagaatacttcaatggtcctagagatgaagattacgttaaatttgctgaacaacttgaagatattggtgaaaatttaagtgttgtaattgtgtgtatctaatttttcagtttttgttagggtattgctaccttgaatgttaacttatggttgcctttttattaggaatttgatgatgagatcatctctgcttaagcatttgatgatgaacctcgagatggagtagtggatgttgaacatgattcccctaaagtcatggatggtggacataattctcatgaagatatggatgatgaacctaattccccttaagtaatggaagttgaaataactggattcactgaggaaacacctaggttaaagagattaaaattgaggaggttgataaaggctcaacaacaaaatacagtgaatgttgatcatgcaccaggaacccctcctttggcagattttttacctgatcaacaaccttatacacaacctgaaagccaacaagaggccccacttgttgaaacacaacctgaaccacttgctgaaacacaacttgaaccacaacctgaggcccaacctgaggcctaacctgaagcacaacccgaggcccaacctaaaatgcaccaacttgaggccaacctaaaaatcaacctaaggcccaacccctaagacatggtgattttgattttgttgaagaagagttcaatgaagcactatttggggagatgtatgattatggtccagcagaaccacaagcttggtgggatcaagtttctagcttagttggggatgttgaggtagatgaagctgatgggactgaatatgcagatgacctggccagcaaccacagtgaagatgaagctgctaaaatagatccaaaaatggaatacaattcacatacaaaaatagttgacttcaagtttgacattgacatagaatttggtagtgtggacattctatgaaatatgatgatggaacaattcatctatattgacaaggagaaaggtttagggtaaagtgcagagcagaaggatgtacatggaaagtatatgcatccattaaagaagatggaaagacttttagagtcaagactctcacctctaaatatgaatgtgggattgtgttgaacaataggtatttaaaattacttttatttttcaatacaacactgtaaacttatttgtgattttttatcttatggattgcatactttcattaatcttagaggcatatagatgttaactagctcggcaaatatactttatggaccagttcagactccacccaaataaaataatataataaaaaatatatttttagtataacttttagtattgtaattagaattagaaaaaaaaaaattaatgctaaagtagtattcttttagtgttgatttaacactaaatttaggtttctccattaaagtgccctaataagtccttttagtaattcccaattaatttataaatccaaatgttaattaaattggtaaagtatgttatgttacgcgccgcagaaattagttggaattaaaagtgtgtctgagttgtggattctttgactgttgagtgaatctaggcccgattcacatactcactccatggggaagagggttttgattcgttacacccgtaaatgtaatcagtttctagcaaactaatatcgaccgcccattctcgataagatcaagcactaacggacaagatcagactctcggggaaggaccgtacattttgactttccctattagagggtattttagtcattgcagtgaaattgatggtttctaattgggcagagaatcaaagaaacatcagatttcttaaaagattttgtagtaggtggtcccttcccttcatttgaaattgaatgttgttgttgtggtccttgttctccgacactccatccaattcaggatttgaaacattataataaatatcatgcgctaacacgtggcgttaccgtattagtgaagcatttaatggacctgataatactgcaccttttaacagtttaagctttgtttttttcgagtaatggatttttactctccaggagcgggccccatacccaaatctaacgctaattcttacgtcctcgtcttctcctcaaggtgaaaacaccctgtctaatccacacgcgcgcgttactcacatcctctatctcctaaatttacactaaatttattggagcattgctattggacattagtagtacccaacactttaaacatctccaataatagtatcttttaaggatgctaaaaatttatacatatttaaaaatataatattttattttatttctcttccaatcatttttggtacttttatttcaaaatacaattaaaaaaatactataattatgatctcaaaagtactaagtaccaaaaatacattttaacatttctctatttattgtctcatcattgtcgttaggtattgtagtgctcacattcatcctatgaatgattagttattt

SEQ ID NO: 15502 - DNA, 4454 bp, Cannabis sativa
ttccaacccatatgctcttgaggatccatgccttgttccttgagattcccagccaactcccgccatagctcatggcttctcaaagcaaggtcccatatatcactaccaggagtcttgtgtgccatccataagtaaccctgccctaaatcaatcgaaatgccaaaacaaaagattaaagagcccctacaacagccaatcaaacacagactacagtacaccttttctttcactaaattttctcagcaaccaaacaaacaaactagaaaatatacaaatttgagataaagaagaaaaatacgcaccagcaccagtggcacctgagcaaggaacggctttgtcgaccacggcgacagacaggtccgacccgagaaggaattgtcgggcgatggtcaacccgataactccagctccaactacgacgacatcaaaagtctgagctgatgcagatatcggattcagagcggggcgagaaaatgaatcgggtcgggttttgatggcggtgaatgagaggcatttcttggtcaatttggaggcaaacaaggttgattggtaaccgaaagtggaagaaggggttgaatgtggagaaaaaacgacgtagttttgaagtaagtaaggatttgaggtagtaaaggttgaagacatagccattgctacagtacttttctttggttgttttgaaatgaaaggtgacactgtgaaaccggtcaacgaccttttgatttgctttgcgtccctatttattgtttattacagtaattaattacagatttaagttttaaaaacgacaacatttataatacccggcgcaagcaaaggcgatataaaacgacaatgcttatttatatagaaagagaaaatgtgatctttaattaaaacgacaggaaacattgcagaagagagaataaataactaaaaacgacaggcagaatagctcaatcgaaagaaattcttaatttcaaatgtctattatggtctattacacatatttttcttttgaaaaagaaaatgtctactgcatattcctttggagctttcagtttcaccttttaaattttatgaacgtttattttattatttttttcccttcacatagataagcatcagtaattataaccaacaataattttaagtgatgtactagcaatcaaaatatgtatggtacctatactatctatccctctctaattacacaaacaagttaatgagttcttccgatttctttttaaatgaacaaatgctaatgattacaattttaattcttaattcaacagaaaacccttttgaaaaattaaaatggaatactcaaaatatcttctgaagaatcatatccccaaaaaaaggcatccttgtcttggtgattgtaacttcaaaataactattctatggactagttagttgaaatggtctcatattcaagaaatgaattatacttattagaggtcattgtaattaatcacagaatcactagagcaagatatttctatgggagttgattcaggagtagcttcaatgaggtactcagaatcttccaaggctctgtccaaagattctcccaagtttgcttcccatatatctaacttacaagctctcttgtaagtctcataagacgccgcccttagaccctcggacaccatctcccttaaagatccacttatcttttcgatgttgttcataacatcaagaaatttttcagccaaaccaggctgccagaaaacaatgacagcacagctcttatcaactaaacgaatatcaaattcttcggagaatatggaatgcgagttgtgcagcatggtcttcaactttccagcagtgttctcacttccgaatccccacaggtatactaattgctcacagttaacttttcttttactctttgtccacacactgatttcctcatcaattgactcttcaaaactggtagataatgcattgaaaatgtttgtagactctgtaagagctggagctgaaagtacttgactatcagatgtgttggaattggggtcaattttcagaatagagcatagcttagcaaacagatgactaatccttacagcgttgtgcccgtgaatcttgccttcgttatcagctgctgtgaacccgaaacatggcattacaagcaaatcaattacagtctcaatcaatgcaatcaagcaagcctgtgtttccactttcatacaattatgtgcatcaaatgaaaattaggaaagataactgacctttgtaaaggatttcaatatcaactggtgcaaagaaatgactattgaggagggaaatagccacaggaatattggtcactttcctcaaaggaccaataaatgtcatcagatgacttacatcaaggacacatgggaaaatcttacttaaggagcttgcaaactcgtctacggttggaggtaggggagcaatgaattttgagtgaataaatgtaagatctgcactgaaaaattgcaatataagataaagaatatcaagcaaataaaaaaaaagggtgatttggagacgattcaggcattagatatacaccattaagggaattgtaggaaacaacaggtttctgtgaagcagaaatcaaatcgatcacctctcgaaatccccgaaccttcttattttcttcttcttcaaggcgttgaagttcactctgtcaattgaaatcgaacatggttgtgagatggttttatgtatgctactcaaccaaacattgtcatcaagaattaaaagttgctcactacctcaaacaagtccttatcctcttgtgagcttgttaaaaccacacgaactgcctgtgttcctccactccttcccggtattagaacaggaactagctcatcggcgaagtctcttaacatctacatcaccagtcaagtaagcaatatgattcattcatgttattgacactatcaaactcaaatttcgatacgctacaatcaagagagacaacttcttcaagcaaaatccgaactttcactaatctatacctctagtgcaagcttcacttgacgttcagtgcagacatctatagtgatgcatggtctagacccataaaattcacttcccaaaataagttttcttaaagaattcatcagagcatctgtaattgaaatcagagaatacttctaaaatgaaacaaaagagataaagatatatattacacatgaaaaataacagcataatgcatcatcttccttaccatgtgtgttctcctttgtttttttacatgtctttttccattgaataactcttgatttaactctttcaataaataaggcatcagcaacactaggtgtagaagtagaatcaagtataagaggactgggtcttgggttcccaatccgaattttcgctttatcttcctgtgctctagacaagtatgatatgcctatcaaatttgaaaacatagaaacaacaatcaaggaaataaatcaaaccatacttatgttttcaaacttgaatatgcatattgatctcatctatacaaaattaagctacacacaataataagacttaccatcataaatgcaagcattaaagtcaaaaccttcacgagccatggatgtcaaatatgaagtttggcatgaaaaactgtaagatggcatccctaattttagttcatctctggggaataagagatagttatacctgtaacaaaaaccagaacataaccttacacttagtacttttctaacatccatggaaactagtaacaagctaggttcagctaaaatactattgacaaaatcactaaaaatatcatcttcacatataaacttatattggataacagttcttcatataaaataggtattaaagcttggatttttattttcattctttcaccattagaagctaaaacaagggaaaaatgaaatactcacgggtgagctacgagcttagaggcatttacagaaaatgggcaaacggcgaactgaaaaatctggaagcgttcagcggcgtacttggccttgtaataagaagtttcggccgtatcgaaggggtgagcacggtgccatggggcggagaaagagcctgtcttttggagggatactgccacgaagtcggaggtggagatgtcgtgcttgatttcctccatggactcggcgaaattggactttgtcacttgcttcactgcccatttctttgggacctcgctacagaagaaacgtttctgtaacagcggcgccattgttgcgcgctcgctcctcaggcgaagcttttttacatgtcgttttaaataaggctattattgagatggttaaaaatactttcttaattatgtaccaaatcatgtcggatgaacttctaatattgttaaaaatattttcgtaattattgagattgttgaatttaatgatttttttttttaattttagtaaaaaagtctaatatagatgaaaatttaggggctcgtttggaacgccgtattaagtggtattgtattgtattgtattatattgaat

SEQ ID NO: 15503 - DNA, 14977 bp, Cannabis sativa
tattttaataaaattgcactgaattagagtaataaatgtgtaaggacaacgtgcatccaaatattacaagaacatttttcaaaaaagtcaaaaattacacactaacatctttttaaaacatgcgagtagctcgaagattatgtgtagatgtagaattttaaatatctgcttaacttgtccatagacatattgtttggttgcttgtgttaaaataactttttaaagctacaagctgaaattccctagatacccaaagtgcaacaaaagtgcttttgaagttttaaaaatccaaaaataacggaccaacgagaatttaagtgacctcttaatcaataagattcaattaattatttaataatgttgaaatattccaaaactaatcgaactcttgatttgcaaattttgtacggatggaaggctacaaaaacacataaaagccctccaattcatcataaccagctcaaatattaatcgtgtaacagaaaatcaaatgtcgccttgaatatcataacttaaaaaacctttatttttttttaactttaatttggatccaagcaatagacgagtaagatcgtatcaaaccaaatggagaaaaaaaaatgaggcaaaatctctataaataacgaaactagctgttttcatataaaataagtaaataacataaaataaaataacacaaattcataatggtttcagtttccttaccgattgcactaaaatgcaggtttacatgctctcctttattttacagataaacctattcttcccagcttctaatattgacaatcaccattatttcacagcaaacaatatcaataatcacatcagagcaatgtatccaccagacgcaaacagatgctggatccactatgttttgggatattagaaaattggacatagcgagacaattgtacaaacttactagtagtaattgagtgttcttaattcacaagagagtgtcgagatatgtatagttcctgctgcggttgtactgaaggagactaccatatgtgcggtcccagacaccgatgaagagagcttctgtgtcagggctgaaggacacaccagagatctccccaaaaaaatcaatctcttgctccttctcaaatccattctttgcatcatagacatgaacaaagtccgctggctcagccattgccataaactgaccatctgatgtgaaacgaatcgaacgaatggctccaagattgcctttgagcacagcaacagactttgataaattccgagcatcccatatacgacaagttttgtcttggttccccgtggcaaatgtatggccattgggatgccatgcggatgcaaatgagaaatccaaatgtccacataaaggcattatagtctacgaaagaaaattatcaaattagcctagtttttgagattttatatatctatctttagaaaaaaaaaaaagaataagaaatctacctttcctgtttgtgagtcaactagcattccatcaggattgtcaccaacaatgactagaagcttgccatcaggactcaatgaggtatgctgcaaaataggacatggaatctatatattatacctatacaaggaactatatttaataatctcatttaactcaatcaagtcagcactctgctataaacttttccctagtgaagagggaccggaggagctcaatattcaaatatcaaattcccctaccatattgatcctctcaaataaaacctgacccctttcctaagccaaaacaaagaggcctcagcttagagaagcctggccttgtctctaatcagttaagagatgaaacacgaaaagatatcaaaacgaaattttagtccacggatttaagttgcaaaacaacataacagactgtttgacaaatttgaatggaaagtgttaatacagactggacaagacaaaatcaagttatatgcagtacaacagatgtaaggtacttacatttacaggccaaggataagaaaattgcttggaaagctgaaatctctccatatcaaagtccctcactccacaatcattatttgaagccatgaaatgaacagcaccactggtaaaagccaactttaggtaagcctcatgcaacgaatcaataaagctagtgcaataaacaaatttgtatgaaagacaacatgagaaagataaaaacctggggctatcataaatctcaattgcatttgtgattgcattttcatcatatgttgtcctggaacaaaagcttacaccaggtctatccagatactgcagatcaacaggaaaacaatgagttcccttgagttaatccatcatcaaaggcaaatcaaacccaaagtttagattattacaaataaaccactattgtaaccacttgatggcttgaccaaatacggaaagttattctccatttaaggaatcttgcacactttcttatcaaatctataagtaaaaaaatattataaatgcagacaaaatctaaatattcgtataacggtgaatagtgaaaccagtgatgagaacaaacacaaggtgtaacagtgaaatcgttaccttacaaataagttcaccctgaaaccctccagcaattaacaacttatcccttacagctagtgtactaacttgggtctgagtgaatccttccagaagacttccaggatgtttctacagatattaaaaaaataaagaaagaggaactttagaaaccccatttccaagtacataactggcgtagtttaccgagaaaatgaattattctagacaaagatatggcacctcatggggggctacgtgcccagaaacatcaagaacttcctttttcttcgtgctcaaagaggaccagtgaataactgagaagtttgacataagatatacatcatgctttgaagtagaccaaaccaagttcctcaactgcagttgcaaataatagtacataaatgaataacttcaaacatataaagtgagccaagtctgcaatgatgaaatctataaagataacaaagaatttgtaacatacaaacctagtatgtgtctactctataattaatcttaaaattgaggcatttatataataggtaagaaattttcatacatagatgtaaagtaggaaaaaaaaggataacacacaatatgcaaatgacaacatacttggaaatgaaggattgttgattttacagatctattgtttcgccagaactcataatattgtccccctttcttggtcggtgtgcattcctaaaaggacataacaaaccatttagtaaaaaagaaacacagaaagacactggtttaatattgatatgaccagagaattggtttatttgcattttaccttgactgaaccttctcctgattgtggaacattttcataattcttatactgttctactctagtttgcctatacttctcgcgagagatgctcaatctttcccaaggaattccttgaatatcctgccctctcctagcatccgcagcagatgtatctactattttattctcctgcagaagtaagtgaaatatgagtactaactcactaagtactaattcactaattataatttttccaataggtgtgtaaagatgagataactaggaccaaccaaattatcatattcttcatcatctgaatctgaatctgtatcaccattttctgaaccacgcaaatacatgatgtcatcaccttctgcaatttcattatcatctgcaacatggcccatctcttccccttcgtaatgagacatgctagcctaagtgcttatacctgagaaaaaattgatgtatcaaataaagaggggtaaagcatcataataaatataacctaaatataataaaaagaatctgctagtatagtgcaagtaagttctacgtcttactaaaaaaaataatagcaaacaaatccagttatgatgatgaaccttaccccaagggagtattttaactcacttattatcagtttatgcccaaatgcaaacacagagaactataacataataagatcaccataacgaaattatacaactttttgtgacttaataaactaatgcaggtcaataccttcatcatcaccatttacaattagaacgcacaacaaactccaaatatcagtgtctttatttactcatatctatagtgagggaagtaaaagagatgaaccatttgaagcataacccagataagaggccctctacacttatagagtatagacactataaatctatgtagttcagctgcaacataaagatagtattcaccatcttttatttatttattattatttttgaagtttaacaaaacagggtatgtgagctcgtgtccctgagaacaaactttcaacaatatgacttaagacactaatcaaagttcacttaagaaggtctagggtaatactaggttcaacaggcaaagatgaccaaggaactgatataacaaaatattttaggccaacatccatcagagcattaatatgctcttctcccatagttgacatatcatttaaacattcaataatcctcaatccaaacttaaagttacaaatatcaaacaagaaactttaaaaccctaaactacaataccacacacacacggaaatataaatgtaaattcttcaaagcatcggatgattaagaggaatacaaaaaaaaaaaggttcataattcccaccccaaacgaaaattgaaactctgaacaagttgctgttataattgaaagacgagaccgtcaatcaccacgcgatctgcatcaacaaaaatgaaaataaaaaaattatataaaaaaaaatgtttctttcagtgaaacctaattaaacataacaaaattgaagtttatggggttaagaaagtatacatgcaaacacaggtcgtatcgcgacggcgacaatactgtcgtctgagtcggctttactattgaccactgcttttggttcgattcaacatataataacagaaaaaaaaaaaaaaagagggcttttttcagtttacaatacgtttaatgtgtttggttgtttaagattgtttctgcaccgtcttcttctcttcggaagaggagagaagatgagatgagaaggagggacaggtgtagatgaagggtcaaatcagatttacgcttatgccccccacctatgtacgacaaacctcattcccttccgatctcgtaactgttcccattcctacttgttcatcacgatttctatatatagaggtgtcattatcactgatatcagatatgtttccgtttcatgtcgtttaaggtaaaaaaacgacttgtcgtttaatcagacaactgaagctacgcaccagcgcgtgaaaactctttcttcggattaaggcgaaaaccagagtcagtgtactccttcccttcccttctctctatctctttccctctctctatctctactttcagggtttcgttgaaattcccagtatgaatgcagtaacgctctctaatacattgcagcttaactatcccattttcaaaactcagcttcaatttccatcaagaccaatttttttgcaaccctcttcgacctgccggagaagcttcagacgcttgattcgacggtcgtctatggtggtcgagactggcgtggaagattcaagcggaactgtttctgaggaagacaacaaaccagaaaccccttcgtccccaactgagtctgtagctcgacgccttattctccttcgacacgccaagagctcatggcgagaccgttcgctacgaggtttgttcatctgagttacgttcttttctataactaaattatgtattgaatcgaaacttgatttgggtgctgaattttaatgtctttgagctaaaaaaataagttcttttaaattgtggcagatcatgatcggcctctgagtaaaacggggaaagctgatgctatcaacgtagctcataagctccaagaattgggttgggttcctcaacttattttgtgtaggtgagaatgtagagattagagaagtctgaaaagaaaaatttgaactttttttggttttttgattaggcaaaatgagatttagttggctttggagattgaaattttgtttgttttctgtttgtgatttttggtgtagtaatgcattgagaactagggagacgcttaaaattatgcaggaagaagttgaaggtttcttggaagcccaagtacgatatgtttcaagcttttattctgttgcagccatggatggacagactgctgagcaccttcaacaagttatatgtagatattcaagtgatgagatacttactgttatgtaagttctgtcaccattcattcaacttacttggccagttattcaagtgaacagaatgggcaaattaattttctaggacaagaattatattagttttattgtttttgcttatggtttacttaatatccactcaaatgtaagttaaactcaattaatatcatcaaaagcaactgaaagatataacattttcattgccatagtaatagagtatgacttttgcaggctgagtcttcaacccgccttgtgttgatagaattgttttctcttcgaactctttttcatctacttccttagttcaatttttcttcagtgtggatttttcaatctttcttatgctcttttagctttatggtgatgtttggcatttaactttacaggtgcatgggacacaataagggctgggaggaggcagcctcaatgttcactggtgcctccatagaactgaagacatgcaatgctgctctgcttgaaactactgggagttcatggactgaggttggttttcctttctttaggcaataacattgtccttgttaataaacaaacattttcttgtctttgaaacgagaaatcctacttggtcaaacaaaagtaagaaactatgccatttaactccaattttacactataatgattgttggctgcaatcgtccctttcatatttgcagccttacagagttcatttaagttattgatgtcagtattgcaataagattttgacagatattctgtattcactgaattggttcaattaattatcaaccttgtgagtaaattgattatacttttggtggcttttgaatcttgctgtccttaactaatgaattcattattttgcctcaggcatttgctttggcaggacttggtgggtggaagttgcagggtatagtgaaaccaagtagctagctagtactacttaaaattaactatataatctttaatactaaccaaaaccaaaaatcttgccccttaacacatctcaagcactaagaagttcagatcaatgctttgcatcttttgataattcttcttgctgatgataaattctccttcctgagagttgtgaaagtggcaagaatctagactcggggctagcaatctggatagatgggagcaggacggtgtcgtcgaaatctattcaaactcaccattggctcgtttgtattgactgttggtgaatttttccacctggaaatttgaagtgaaacttggtaagactggttgtaaaagtgcaagagctgaaactgtgtgctcgttctttgatctattctattttgatcgttgtaaaaagtatccaagctagccaagtgtaaaagatacaaagttatcattgagaattttatcttaatattatctgctaattatcgagattttccattgcttcaccagttccaaagatatattgaaattgatttccacaaaaataaaattaaagatatattgagattgttaacttattctcgaattagcatttacattgagattgacattggcatgatttatgaaaagataattcgaagatagaaccaaccaataatcatactcaatgaattcaatgtctcgctgaaacattaacaagaccccctttaattggaatatcaaactttccagcaaaaaaacaataaaaagggaaaaaaaaaatgttttaaaatatattattgtattttccgttggatttatttgaagtatttccacttttccttaacgtatgttacagttagatccgttaacctttaaataaaatgtcgaataattatgtcctttatgacattcatcactacattgtttttgtttttcttatttttaagtagtaaaatatcatcacaagggggacacgattgggccacggcagtgaattatagaagaaatggattatagattgtgaaaatatgaccataacaataggtagattaaaatagaattttgtattgttttgttctattccaaaaaaaatactcaaaaacttcggaatttggacttaggtactcaaaagcagaggaagtcaaatattttcttttttcttttctcatttttctttttaaggagaagggaaaaatagatattggttaggacaagtggggtgctgtgccgtgagctgtgttgtgtgtaccagtggctgcggttttatcttccttcactcagctacctaaaatttcttagcttttttctcctttgccaatttctctgacccctgtacggagaagaaggcactacccctcttctttttcttcctctcagtaatgactttttctgggtttggtattgccattctttgtttttgctgtcttctacgctaaaggtcacactttgttttggtcccttttaagtcctcctgtaaaccaaaattcctgcacctacgtttttttttttttttctttcaaaggtcccatttttctgttttctctgaaaatggagaaggaaacccagaatcaagaaattagctgtgaaagttttggagatctgggaaattttggatatgcaagtagtggtagtgggggccacctgttttgagttctaaaggtcttctcttctctataattttcttcttaaaaaagggttgcagctttttagtatggtccttttcagggtattggatcttgcttgtagacctacacaaaaatttccactttttttctatgtatggtgttgctaactcaagctcaaagctaaaagcttttcttggtgttttactgttggaaatttggactggggataaaaaaaaggttcctaatttgtgaaaatggcagataattggagttgaaacagaagatttttctggaatttcttttttcttccttttcttcttattaaaattttcatgagacgaatttctaaagaaaaatgatcgatcaattcatcaactttgtgattcgcccgcccaggtacccattttgttctgctcttttattcttccacttcttctatgtactttttttttcaagccaaaagtaaattttcataagagattaatcgttttcatataatttggatgtttttaagtatttattttatgtgcttagcatcaaatgatttttagagttgtgacagagaaatacttaagagttatctagttttacccaattcggattgcaaatattactactgtttttccacgcgtaatattgaatgataatttcactcagaaagagaaaataaggaaatttagttccccactaaagcatttcccataaaaggcaagattttaatttttttcttaaggcaattgtaattgttctttaatgcacactaattaatttaaaagtctcaactatgaaccatgtaaaggacaattagtcaattatttggcctctaacattaagttatattttttcttaacaatttaaacttttctttggtgatttggatgttaattttaacttcatccgggttgtttatgtacagggcagagtataatccagatcagtatctttgggaaaataatttttctcttgcaggaagaacatataaacggcaagacttggaggcaagtatggactagttgccattgttttggagtcttttgttgtctttgttgaatttcatcaatgtgcatttctattgtagtatgttctgagcgtaaaaggttatttatttttcgaaatttgcagctcaggaatgcaaggggccatgtgttgcgatgtagtcattatttgcctttggatttacctgaagatgcttctcttccttgtgttatatactgccatggaaacaggtgtgtttttaggcagctttttgtaaaagaaatcaaacttctatttgttgtgaactgtttaatcattgtcttatatagacaatttagaaccttattatgtttctcataaacaatgcagtggatgccgggcagatgcaaatgaggctgctgtaattcttcttccttcaaatatcactgttttcactcttgatttttcgggttcaggcttatcggatggtgattatgtcagcctcggttggcatgaggtataaaactttcttcctttttggttgttttttcatttctcagtttcttgtctattgattatctaaattttcactactctctgcagagagatgatctcaaaattgttgtatcgcatttaagaagcaacaaacaaatttcacgaataggtctatgggggcgatccatgggtgcagttacctggtactttattctcaacatcgtgttttttaggcgaacttacggaaattcacaaaaaagaaaaataataattggtttctgacagcctgacatgtaccatttcatttgtttcccatcttggtatatagaattgatttttaagtaatatatttttacttgcttgttcttggttttcaagattgatggtcaaatatctctagatatatttctttttcagaaattatcttcattttactcattgattaataattatttttcccattttaaaccatctattttttattttttgaggtgtgataattggtttttatggaatgtgatgcagccttctttatggagcagaagacccttccattgctggaatggtgttggatagtgcattttcaaatttatacaatctgatgatggaacttgtagatgtgtacaaaatccggcttcctaaatttactgtaaatatctcttcctctcacctcaaaattctaaaactatttatttgcagctgtttattcatatcttctcaatatattaagctagcaagcaagacacggattttgtgtcttggaaaattgttcaatttctgttcatgttccaatccttgttaatctgctttttcttttctcctttattagattaaaatggcagtgcagtacatgaggcgggtaattgagaagaaggcaaagtttgatattatggatcttaattgcttacaggtatgtctatgcgaaatgcctcctaaaaacatgaaatccctgaatttaattcattataatttaattaaactagataactaattgtggttatttgttgcggctagcaggtggcaccgaagacgttcattcctgcattatttggacatgcaaaggatgacaaattcatccaatcccgacattcgactatcatacataattcatattcggtactccgttaatttgaatcctttaatttttcattaagtgaacactttcagttggaataatttggaagatttaattgtatttctgatattatgcagggtgataaaaacgttatttactttgatggtgatcacaactcctctcgacctcagttcttctatgattcagtatccatttttttttacaatgttcttcacccaccacaaataccttctgttacatgtaagcctgagaaatattacgatttgggggatttgaaagttggtgttggtatggatgaggtaattcccattttatgtcatttgttactaaaataatttgaactgcttctgcttgtcaattatgtttaatgtgagttgttagctaatatttctcttcataaagttccacaataatacttgaaaaccctcagttgggaaactctggtatctatttgtgtgtcatattttgagggtgggcacagtgaccacaaatgttgaatttcatgtgtggaagttttggattattgcatgattgttcttccctttgctttcagggtttgctatacgagataatcactggtgttcgttcagttggtactgatgcagccagttcttcttctgctcctcccatcatatcaactgtagaatcggtggataaacttctttctaatatcgctccagtgtctactgtatgaatcttctcttctggttcatttactatatgccattatggttacattatgctgaaatatcatgctatcatgattcatacaggactctgcacttgatgagattaatgctcttagtagacatgaatcatcacaatcgcaggttatattacgttcttttcaccctccaaatccaaatgttcatggattcaatattgttcagttcaagattcacagctctagagcttttcttttctttttctaacctaggaaattatgaattgtacttgagtaaagctaaaaataagctgtgtataattagtttcatgtaaatattaattcctctaaaatagggaatggttattggactcttgatgaccatggaaggaggctaatagtgagctgtaggtctcagtctcaccatgttattgcttcttatgatttccctcattatgaatttacaggaaaagatagactcccaaaatgaagaatgttgttcatatacgagctcaaatagagaaagttgggggagatgctcatcattgggaggcagtgatgaagaatcttctgcagattgcaccacaactgcagaaaatggtgatcaggtatttctcttctttctctgaatatattagctttttctcactttattggtttaattttctaatgaacttcttatactgttgaagaccgttaaggtttttgcaacgccacttcgaagtaccacgcagcagaagtcagtacctgcaaaagaggagaagaagaagaaagcaccaaccattccaaagaagcctaagagtgaaaaactcgagaaattagaggcacttagtagacgactacgtcattgcattcttaagagagttaaccatcggagacatcgttcttcatgattgtttgtgtagtagaagagtctttaacatgactgtttgtgtaggagaagagggttcttactttactaatgttttatcttctgtcttgtcaatgtcatcaatgtaattgtattgcccaccttgggtttaattatttcaaattggtcttgttttaaggtatatggatttggggttttaactcctgatgtcccatttagtatcagatgcagttctacaatcggctgagacgtgggtgcattcctccttcgtgtgcacaccttttagaataaatttaaaaggaaaaaaaaattgaatcagctgagatattattatggctggcaatcttctcttgagggttgtaaagcatagatgagatttttgagagaatctactgcaatgggatggccaacaatgacttaaattgagattgtaactcagcacagaaacagaaaactcaaacgtgtttcaaagtcaaacatcatccaccgaagaatatcaagaattttggacaacaattaagcataagatctaacgttatataatgttagtagataactgaactagttcttacccttgttcacagtaacaactctcccatgtaataaccttggttacattttatgaatgtgcattggttgaacctagttaacccaaaacatctatgattaacagcatcatttgatctgatcattgacatctctacataattaacacactcatacaaggcagcgctactcaggacagtggattacagattgccggctgtgacattttccagttgatcactattcccaacagtatttcttgatgattcaaactgctctccagccaggaaagcagattgtggttgctgataagaagaatttaaacttgactccaatatttggtgtgtaagcactaaatctggattagcaaacgctccacccatgctaaccctttgcttcttcactaatctctcaccttcagggctctcggctggggaaccatcatggcagccagaatctggggttgatggttcttggtgagatgatagggattcatcaacagaaagactcttagctggggtatgttccttgacagtcttgtctaggagttcgaggggtgtctcagatgttggagcaggggtcgctggttctgtcttgtcagattctgggccattatcacccacaccaggcccatctgaaagaactccacttagtctttgttgctcttcaataatctttttcaagtacttgccttgggcctctatacgtaactgaagctgtctctgtacctgttgttgtgcattgacataaacttatatgctttcatctgaggttgttataaatatttatataggcaataataataataaaaaaaaagccaataaatcaacaatttcagtgtactattgattaattgaaaagtgaaaacaaacctctaattgttcatgcaagcgcttctggacctccatctgcagcttcaatgcttcagtaatttgcatcccactgctaagaacagcaaatacattctcacgtaatcagtcaactgataatttggaaatatcaaacaatacattttcatcattcatggtttcatgttcctagctcagttacacgtcattatctgtgagaccaggcaatagcatgaccacatatttaatcagatgattcttcatcataaactctaaataaaaaggcaaggcttgatagatccataatatcgactagtaacagaaatattatatagcaaaaaataaaactacacttacgatgaaccctccatattagaaagagtatcccccggctccttcttgtcagcttttttcccttgcagtaatgcataaaaatttaggacatgatgtaataattaatagaatctatcagctaccagggatggggggaaataaaaggaaacaactgaataaaaaacacataccatcagatgacgactcaggtaagtattttgcaagccggtatttctggatgcatcacaaaagtgaaatgaaatcaaataaacaatgagaagaagacataaatgctaagtctaacaaatcaagtatttcacaaaaaacaatggctcacttgactatatttacctgtaaatggcttttgacatgataaattgtcaaaccctgtacacccattactctaagaaccccttttggagtggcacctggaaagaataaggaaaagagaga

SEQ ID NO: 15504 - DNA, 4345 bp, Cannabis sativa
cgggtcggggtatggttcggggtatggctctggaagtggttcgggctatggtagtgggggaggaaaagctggtggtggtggaggaggaggaggtggcggcggtggaggtggaggtggtggaggaggagctaatggctctgggtcgggtagtggatatggatccggatacggtagcgggtcgggttacggaagtgggggtgggaatggaggtggtggaggtggtggtggcggcagaggaggaggtggaggtggaggctcaggaataggaggtgggtctggttatggaagtgggagtggatatggaagtggaggcggtagaggtggtagcggcggtggaggtggtggtggaggcggcggcggaggtggtggtggtggtggtagatcaggaaatggttcgggctatggtagtggttcgggttatggtgaaggatatggttccggatatggtgaaggagacaatggtgatttttctccatgaaacacaaataataaaaccttatagtttgtctttctttttaggcatagctagccattattattattattattcaaatgttagtgaaaataaaggtgcagcaattgattaaatcaccatcaagtttatgcatgtggagcatataataatcttaggcggtgtaacaacgttgcttgcatggggtttgtatacgtgcatgtgttgtattttggtatattacaaattcttactctgctgtattattataatcatcgtacaaattattggaataaaatatatttgacaccgaaaaaagaagtcatgttttcgtttattctatttttttttgggacatatctcgttcaattaaatgataagaaaaatgataattataggcttatagcacacgttttcgatgtgtgctctttcgttcattaatttattcctcaaaggtaaaagatcagatggtaaagtcataattaaataatgaaagatggcatatcatgaactttaactaactagcattattatattatatataaataaactatgtcatataattaattgctattagtacttattctgatgcactttaaaaatacgccaaacaatagccattatattcttaatttcctcaaaaacacaaataaagttgtaccctcggcatttttctatttttctttcaactgggaattctgaggaaaacgtctcaacacaatctccaaaataatcataaccgccaaaagtattcatatcaccaaaaaaaatattaagtcaaaagaatcacatgtcccatatgaagtaagaaacacgttaaattttaaccattttttcctatatgtgaatgagtgcgttatctcgagtataaagctgaggtgatttttcgaatgtatattttcgtaaagtcaattaaccattttcatgcgagttcgtttccttccaagtaaaacaaagtgagcttaagcttaacaaactgtcactttcagaccaacaaaaaaagccctctgaagtaggtgcagtacagctgcagagcacgcacaaccaacactccacttacacgtttaagtaaaactaaacacatttcattttgttttttcttttttgaccaaaaaaaagctaaacacatttctaaccacaaagaagcgtgaactttcgtgctatcgaaaaaaggggaaaaaaaaagaagcattgaagacattgaatgtttcgaatatcaaaaggtcaatcgtgcaaagacccacaagatgatgattggtgcccaatatgctaagtacattaaagtgtatagatatcacaaaatcattattcaagtaaaagaatggtgaaaacaaaacttgttcctttagaatacccaaaatgttacgtcaatccaaaaaacaaattcaaccaacatcagatcaaacagtaccctgcttactttcaaagttacaactgtataaataaataaatcaaaacctaataattctatttggtcaactacaatgccctctctcttccaacatttcaagtcctgatctcatacaactctatataaggagaacaaaaatttccccgttctcgaccctacaaaagtatccggttgtttttatcaatttatcatcatgtaggtggacacatttttaaatgaccaactgtatataaatgttgaaatcaggtccaccaaaagattctcagaaagaatgaattgcattacttggaaaaatcattccactgctaccctctctgaggcataggaaactttctgcattatcatcgattcagctgtacggattgccctctgggacccggtgattgtcactttcctgcaacacaagaagacagtatgtcaggagtcaaaaacatttgaagtcatccaaggaagcagcatatttacttaaaataaacggatctatgtagtacctatcagttgttccagacaagaaatcgcctcggtctgagatctttatcctggcaccacttgcctacaaaaacacaaggctctaaattaataccacttgtgaaaaacacatatcagatgcaagttcagaaactggctatctacaaacctggctgatctccattatattccttccaccacgtccaacaacaaatccaatatgctcatcagaaacaccaatagttactgaattacttcggtcctcctggtaaaacaacacaaggatttttattagttcatcaaaatatatgacaaaaaaacaatataattgcaagttaataaacttaaggggtgaacagcatggactccttgatagaacagagtgcgttcagatctacgatacatcaattttcttatgcacaagcaccttccttacaagaaatggttttgacttttgattctaattggttccaatttaaaactaaaacgaactcgtaatgtgtacaatgagaagatgagaataaactattgctattcaagcatcttgtaattttaagtgttttagaatcggcttaaactattcccatcctcaaattcctcataactatagtgtttgttcgtatcaaattttccacctataaatcagtgaactcaaaggcattatgcttttaacccagatggaactgtggaaaagattacattgatttaccaataagaaagaatattaaaatgaacatcaatgatttaacagcgtgccttcttaaatggtcattttaatgtaaagatgattaaaatttaatgataaccaaactcttaaaatgtaaataagataaataaatcaattaagaatagttgaattgtgtgaaccttgttgttctgaaactttcctccgccgccatttggtccatagttcggtaagctgtaagatgctgttgcaacagaaggaagcacatgtgtatatggagtaccatgaaaacccgagaagaaaacacctaaaattcaagttgaacatatcttactggaaatcaaacacataggaaccctactacacattatatagttcaagtaaccataccgtgtgctgctactttctaatgatgaagaaacaaaaggccatgggcattttgtgacgggaagaaacagaaaagtgaagagagtataggaataaagaaggaacttggatagagaaataaaagaatagagagagagagagagagagggggggagagcattctggagaatggaaatctgaacaattctgttcacaccccggcctatacatagaatagaaaaaacatgttctatatcaactcattgactaaatttaggattctataacccaatagcactctggcaaataaattctaatccaaatgaataaaaaagttaaaagctaactagtactgtagcacttgagctctccttttgcacagtccaaaataacagatatttgagtagaaaagaaaatgaagaggagggggaatatgcatgagggagtgagaagaaaaaaagtgggtgaacaagaaaattggaaagggaaaaaaatgaaagtggacccaccatttatctgatagttatggaagagcaacttgttatacttgtcaaccaatctaactattttttccttaataattttactaaagtctcactttccttctttccccataccacgcaacataaaagaatttcattttttccttaataattgcatttttttcctttctttacttgctagtttctatttcccatacttatacctccccctacgattattatttcttgcctaccaaaggttgccaaaaaaagtgcaatttttaatcaaacctaactccacatttcatatttgtcaagactcaatataaactcgtgttcttaatttgtcatcgaaaacataaggcaacaatgtcaactaagtgttcaaaatatggttgcataaatgtactatataagatgatccacaatgtgaggaatacacatgattcaaagggtgcatgtgtgtatgagagagagagaga

SEQ ID NO: 15505 - DNA, 9024 bp, Cannabis sativa
  modified_base (7941)..(7945): a, c, t, g, unknown or other
tggctctaactattctggtaattggtacattgtccaattatgttgctcctttattggattgggggtagtttttaaatgcgaagatggggtgaagatatatgttgctttctttaattagcataatctaaatatttatttgctagaccctcctcaattgcttgtgcagtggaaaaaagtcagtttatggattgctttttttttttttaatcagcttttaattttcattttggtttaggatgaggaagatgtgaaggccattgctcggttatttgctgacatgggtgattcatatgttgaactgattgcaacaggtacctgattatttttttatttttgttttatatttttattcactatctgaaggtggctagcaagactcattatgtaatattataactgtgtgctctgatctcaggttctgatgaatcaatgttgattgtgcatgcattactggaagttgcttcacaccctgagtatgatattgcttcaatgactttcaatttttggcacagtcttcaggtgaacttgaccaaaaggtaagatttctgagactgctcattcgactgtcatatgcttaaaacagaatactaatatacctttccaactttgtagggattcatatgtttcatttggtaatgagtcatccattgaagctgagagaaatagaaggctgcaggttttccgtccagcttacgagtcccttgtatctctagtgagtctccttttttatgtcatcatctttaagtaatactctaatcatgtcacaagcttagccttcagcttctgcaatttgtaaatcattattgagatagtctgaaggtaatgatatgcattgctagcctctctttttccacaatttctttagcatgtcctcttatatttaacaatggtggttttagcattaggctggatatgattatactcttttctacatttatttttttcgataagaaatgaagctactaatgttgatagagttgggaataaagcatcgcaaaggccatgaattacaaacaaacctcaagtcttcgtcaaatctgaaaagaataaacctttgagtttgtttacattcaccagtcacaaagctactttaaaacttagttattccataccaaaatctccttcagtaatattaaaagttcttctatttctttccaaccaatttaaccaaaaaattgtccaacctagattgtgccttctcccttctcttgctaccatgttcacaagccaaattaaaaacatctgggcactctttgattgtagtcttaaatatccagaaatgttatttgttgttttattgttaaagagaaggcaatttagttttgtctgaagcaacctcttgctttagtatttcaaaattaaaaatagtaacgcctttatcaattgaaaaaatatatttaggatttaagttcgtcagttgtcttaaaaataatggattaaattcctgcattgaccttaaatagcagatgattcaatacatgctcatttcctgttttattttgtttatgtaaacaaccattatcaactataatttttctgtataggtaagcttccgagttcaatatcctcaagatgatcaggatctttcatatgaagacctcaaggaattcaaacaaacaagatatggtaatttctagaattttagtacatgtggttttattgttatttttttcattatgcttttattttttgtttttgtttgtgtagtgtgtaaaaaagcaactgaattcatcataggatactgctccttttctgtgtacatttcaacattcaaactggaatttaagttttgattttggatggtagatagatattaactctgtaattttcaagactaaagttttgttattaatgtcgtctacaaacttaagtttgtttacacatatatggctcttcttccaaagctgtgaatgactctgaactcttggatgttagccctttcttgggttttattctttctaatatatcattggctataagttataaaaagggagagacgaaaggaaatcagataaatgattgaaatttaagatcacagaagttaatggatgtgaaaagaaatgattgtgctactaaatattgacataataactacatattacacatatatacttgatttatatatatgtatcgatttgagatttgccaggtttttctatatgatgcagtgttctgtttcaattgatatcatagattttatacttgttttcaaatggctttgtaaagtttgcatcttttctctctctctctctctctctctctctccccccatattattctttttaacgagtgtttctctctgtatacatttctaactctaagtaaactacaatgttgccagccgtggctgatgtcttaattgatgcagcatcagttctaggtggtgatccaacacttaaaattctgtacacgaagctatttgaggtttgtatcatttgtttgttatgatcctcctttttatacaattgtttaatattattattttctttaaggcggtaggcagatatcagaatgctgaacacagtgaatggcgtccagcagaggctgctttattttgcatccgtgctatttcaaattacgtatcagttgttgaagctgaagtaatgccacaggtatttttaattttaaatgtcttgtgtattggtttcatccaggaaaagaaaaaccctgtttgcctaataacaaggtcaaagctacttaaaattcgttgtcattaaaatatatgatcttattactagtgcaattatttgttcttgataagtttccttcttccgtttctgattaactacaataatatatttgtatgtttataaaattgttacttctgtatgaatttccctgctgtatacttgccttttgccatcctaattgaggaactttttggcctacgagtcattatatagtttttgatgtggtcacgagaaggccaaatttatatatgaagatttcaatgtgatcaagccttcttgctttgtttgtggatctatgatgactgcaaattgtaatttcatatcgtgtatataagtatattttacattctttgtttgattttcacaggttatgaatttacttccgaaacttccacagcatccccagctactccaaacaggtaatatgcaattattaaatttcatatgtagattttgtttttcttttactactatttttagtttaatttaattttaattttaacaattgatgtgtataatatttcagtgtgcctaacaattggagcttattcaaaatggcttaatgctgcatctagtggaccatctatactgccttcagttatagaaatccttatgagtggcatgagcaaatctgaagattctgcagcagctgcagccttagcatttagacatatttgtgacggtacatggtctcttttgattacaatttattatctatcttgtaaatcagttaatgagctgtgttcttaaaagacgtggaagaaagaagactacaattattgctttgatttttttttttttttgaatggaattatagctttgatttaaataatgtagattgccggaaaaagctttgtggatttttggaaggcctcttccatatatatcacagggcagtgaatggtgaaggtagttttaaagtctcccctgaagactcattgcatcttgttgaggcattaaggtaaactgttactgataattttggggataagtgtatgtagcatgaaatacagttattatcctttgagtttgctttttttattgattattattattattatttttacagcactgttattacagagcttcctcctgagcaagctaagacagctttggggatgttatgcacgccagtcattactccgttacaagtgagttctacatgcggaacaatatagatcaatccattttttccattattttcatacccataatagtgtgaggatgggcattgatcttataataactgaaaaccaggaaattgtcaaccaaggtccagaagttttaaataaaaaacccgcacgagagttaacagttcatattgatcggtgtgcctacattttcaggtttgatctatatcctgttgaaaatgttcttgtttcctgtgacttggaatatttttaacatgcaagtaaaattattttagatatgtataccatcctgaagccgttgcagatgcaattcaaaggctatggccaatttttaaagccatctttgatctgtgagtatttaacatgctttgtaccaatatagcaccatttgattttataatatcattaagggatgaataaaattgcattgttctctaagaaatttaatttgtcccgcaaaatgactttggtgtagtcgtgcttgggatatgcggacaatggagtctctttgccgagcttgcaaatatgctgtgagtttgctgacctgtctcaactcctccaagataatatttaaaaattaaaagaacaataaaatgtcagtagtgatatacacatagattatatatacataatatatatactccgtgactagcttgtgagatgaatccatcgtgtcatatattgaagagactgcaattatcattttgttttttaatcgggtttgtaatgttaatctattgtgccttgagcactattcattttgtttgttagacaagtttgaaattttaaactatgacagggatattcctaaggtcattattcatgtctgtatgctcgtatattttattaatatgatcaaagacacttgaatctagctctcaaatggttgggtgtgtgttgcgtatgagtgttctggggctcaaatcaaaccagccaaactaattaaacacaatggatagctgtttcttatagaaaaaatgaagatgtattttattgataggattggatctgcatatcctttttattaatggttccagctaatttaatctttaggtgagaacctctggaaggctcatgggagtcacaattggcgctatgctggaagagatccaaggcctttatcaacaacatcaccaaccatgttttctgtatctttctagtgaggtcataaaggtaaatcttattttttttccctctcgttaattgtgagctactgattcaaacaaaacgttaattatttgaagtcatacattaacatttgatctttttatgcagatatttggttctgacccatcctgtgcaaattatttgaaaagtttaattgaagcactctttatgcatacaactcggattcttacaaatattcaggtaaagtgccgtacatttgttgactttaaatgctttcctcatctgatctgacactgcttgtactgatgtttgtcaatatgcataatttttttcaggaatttactgccagaccagatatagcagatgattgttttttgttagcatccagatgcattcgctattgtcctcaattatttattccatctccagtctttccatcaatagtagattgttcaatgatagggattacaatacagcaccggtatgtctgtttattgtaattgacaaggcattgtcattttccaaggagcaaatgcctttaaatcctgttttagcttgtcttgtggtctctgatgtcatattatcattactgcctactttgtctaattctaaacacggacttacataatttcttttctttggttttgcagagaagcctcaaattcaatattgacattcttatctgatatatttgatctggcaaactccaacaaaggggaacagtacttacctattagggattctgtaataatccctcgaggagccgtcatcacaagaattttgattgctgcattgactggagcactcccaagctctagactagaaacggtttgactattttctttttatttcagcttttatgacagaagcatgattgagataaaagtcccaacctctccttttgtctattgtttgtctggaacttcattgtgtctttctcccaggtaacatacacactattaacactgagtcgatcatatggggcgcaagcagtggagtgggccaaaaaaagtgtttcacttattcctttgacagctgtaacagagattgaacgttcaagatttttgaaagcattgtcagatgctgcatcagggggtgatattaatgctttggcggtcccaatagatgagttatcagatgtttgtcgccggaacagaacagtccaggagattgttcaaggagctttgaggccacttgagttgaatattacacagtgattacaccgggtaatatttatacctgtatcataggcatgattggagttctacgtaaagtgggggccattttggcaggcctcaagtgattgtgtattattctctatttttaatccagtatttgttgtgattctccaatttttaaagagaatcattgcctctttatattgggtgggagagttgatcaatataattgtatctatatgttgacgagttgtgggatctttgagtggtttcctttctcttggctttgtcattttttggggtaagaaagatcacaaggtatagagctgtagattaaggttatgaaaggatttttttcttcataggagttgtttctttcttcacagttgggaaatattttttttttttataaaacttgggtaattgctgtacaaattacggaaattttgagttgatttggttgacatttgtattgcaaaggactttccaattttctttttacctcactatgataatttcaagtcataaatactaatagaatgttcagatgattggtaattaataaactgagattatgtttctcatgtgatagaatggggaatcttgcgggttttggggttgagagagaaaatataaaaataattacaagaatctgaaaaatgagatactaaatttaatttcactaatattggaaaaagaaaaaaaaagatagttccactaagatataaaactatatcaactaaacctaacataaagaaacgtcactaagaaaatattttcaaacaataattaattcaaattaataataatattcactcaaaagactattaattttttttgccaatcacttctttctctttgggagtgaaattattcttaatattgaataatttttttgatttttttggaatttttctttgaatcaatcgtttgacttgttaagtcaaacaatttcttgatgttgaagtaatttggataatttgaagtagtaaattagtgttactctaaaaaataaagaatgatttcaataaatatatgatattaaactagaataagttcaaaaagtgtagcctaatcaagcttcacaaagtcggcatcccaacacttgagttcaacaggattggaggaatcaacatgcttcttacaatattttagtaagaatgttgatgatagttatttaaaattatatgtatgataagttattttatagatttattgtctttttttttttttttttttctaattatctatttaatgtgagaattgttgatttttaatttttcttcattataacatatatttgaaaatatttctttgagggatttttttatgggaattcttaagaattctctatatatatatatatatttttaaattatatataaaattaatttaaaatcatttgatatgattttattatctaattaatatttatatttataattttaattttttttataaataattaataacaatataaagattgaaaattgtttttttttttcttctcttaaatgaattttaatattttcaaataaatagtcattttttttttaaatagaggatcacatttaatttgcggatatgctcctatcgaatattccaaaaagaagtcccttctctattgtattgataaattttctgatatacaaaaaagttcacttttctatataagaaatttatttagaaactgatccatcaattaatgaacacagatgacagaaacattgaacatcaataattgaccatttcccaacttgcttgccacactcaaacctctctctctctctctcnnnnnctctctctctctctctctgtactcgtatgcatatcatgtagccctgctgtgctgctgcgaatcaagtatcaatcaactagaagaaaacccaagatgtaacccctttctcctttgctttttgcattacatttctctcacaatctcattacatacccgaagttgaaaatggtgtcctctgaaaaccagaagaagacttaccattccctcctggcagccaagctcagcaacctcaccatcccatcttcttccccacctacctcctctgcagctcaagacttcgacttcaacgatgtcttcggtcccccaaccccttccacttccacatccaacccttttcatggggacccacaaccacaaccactacaacaacaacagcaacaaccctatatcatccacaatcggtcccactccttcgtgggtccgtcccctcgctacgcctctgctcaaacccaacaattcgatttggaattggagagaagaagatgatgatgatgaagatggagaagaaaccagccctggaaacagggacacaaacgacgtcgtttgcggtgaaaagatcagccagagtccggtggggagtgggagtagtgatgtgaagattgggcctggggattttgagattatgagggttgtggggaagggtgcgtttgggaaggtgtttcaggtcagaaagaagaattgttgtaatgatgatggtaatggtaatggtaatggtggtggggatgggatctatgccatgaaagttatgaggaaagataccattattaagaagaaccatgttgattacatgagagctgagagggatattctcaccaaagttgttcaccctttcattgttccgctccgctattcttttcaggtacctcagttatcaatacccatttcttagttttgggttttacccttcattttcagtttcacatttcttgctactttttccatttaatcaaaatattaaaaaagcacaaaaccataatcgaagtttcaaattttgatcttaatcttaataacttattatgtatgctttattatttatttttataaattacgtctcttgaggagcgaggtctgttacttat

SEQ ID NO: 15506 - DNA, 7950 bp, Cannabis sativa
  modified_base (26)..(41): a, c, t, g, unknown or other
  modified_base (6368)..(6374): a, c, t, g, unknown or other
aagagaattgtaacattaggtatttnnnnnnnnnnnnnnnnacattaggtatttaagtgtataaaggtatatatggcacaatttacccatttatgtttagtacttatattaggactgttctagaaagtttggtaggttttgagcaagtgttgggtaggtgtgatttgtaaaatcttgtgtttctaatttttgcagagaaatggtaatcgtttctatagaaatcgtgaaccgtttctttaggcaagatcccagaaaaatggtgaaccatttggaaaatcttgttatccagttggggtgatttttcaagtgcatatatttttgtgttttatcgatatttagagtatcactacgctatttatcgataggggaacttttgattatgagttttaagtctttcaacaggattaaacaagttatttaccagtttatcgctattgtgacatagggcccaagatcatcaagtgctttgtactcaggttggccagcacacctaaatttggacttgaggtaagaaaagtacaattgtaccacttagcatgccatattgtgatacagtaattaccatttataggaaaaacttattactctattttgaaaccggtgttaggtttcttgtatattgattatctcattaagtaatagtattgacattggttgtatcatttggcaggtataaaggttgtcttattaggtaacgagagattataattactttataaagtaactgtaatggtttaacttattagacaaatacttgacattaatgaatgtttacattgtgttaaatggctttcgtcttttggattaagaatgtaaattcttaatttttgttacatgagtataattagttttatctgtacgctgatatgtgttataaatttttttgctgaatctttgtgactcatgggtgttttgtggtgtaggtaaggaaaatggatagttagggtagccatgagtcagagatctttcctaataaatgtacatatcggctcatctggctcgcaatgctgaattgtcgggaatttactttatggggcttttgatgtataagtgaattttgctataaaactgtgagcgagatctttggtaaattttaaaaggtaatccccgactttaaaagtttataatggcatgacttttatgtttgaaaataattagtaaagttttaattttttttttttgaaacaagtaaagttttaattaaatcttaattttattaaaactattagtttattattataaactaatttataaaagcacacacgtaacatttctatgggttaggacattacaatttcttacttttaattttattgcatagtggggacactgtttattttaagtttgagggaaggcaattttcatgtttttaattttttttaattttttttattattttagtttctatgggtaatttttaagactttattattattattattattattattattattatattaaagttgacttatgacctatgagatttgatgatgaaaattgacgctaaagtcttttgttgttatttagtatggatgatagacatataaattgtgttcttgacttatcttgtttgcttttgatattgtgatatgaattatgtgttcttttgcttgttctatataatatgtgattttatgtacatatgtagacttggtttgatttgatttatattaagataactagaatttgtgtgattaatttattgaggtgaaatcttaaatattggttgtgtagagatgattaagctaattttctttgaattgtttgagctaaaagctaactttgatacattatcctttgttctcctattttgagcctaattttttatcttttattttttgttaaataaatacaaaattatccttgataatgagccatgatcttaaataaattttctttaccctatttcgaaccataaacataagattattttgtaatgaatgaaaaatatgatgtatgtgggatgacaaatactctggaattatttgaaaaaaaaggaaatatgtgtatattataatgcaattgttctatatagaaaaactctcttgttaagaaaaataacaataaaaagaaagaaaaaagcttcaaagaagaattcttgttgcaaaaaaatattgataataagagataaaattttagaggattataattttacatgtgcgaaaaaatgaagaatttaatgaagaaatagtgaagagagaaagggggatttacagtgaatgtttcgtatttttattagttgttttttaagtttatggtctgtgaatcctcttgaaagagaggggtgccttctggaacacggacacaggtggtgcatgaattatcctaaaaaaacattctcatccactatttacttaagcctgacgatatatgtctattgttatcaaggtttctagatgggtgatgtgtacaattccaaagcccattatcagttgaggaaggccgaaacctaggcccaataactaagtcaaacctaaaactctggtccagaagcgagctacaatttgctaagactgtcagggttggatcattctgttctagaagagaccattttgactagagacaaagggtctgtggatgcccattcggagccctccaagaagtgatatttagaagcgagtaatcgaagagtcacttccatggatttcagatctcaacaaactcgaaacccgtcagaaacggggccctaccatgttaaagtatttcccctgcgtcaaccatacggactacacacactaccaaaagaaggtcacccttttgtctaacaccatattctttaacattcttggcacgaacataagattgcgtgacacctgacaccttcgaatggtccttgcttgtacagatgatcttcacctcgtgaattaggcctcactcaattggcccaaagtcaataaacattgtactttaccccaacaaagggtctagttgacacccaaaaaatcctaccagattcaggtatgttcgtacccagtttttccctataaatacaatataactccttcataaggggggtcgagagattgaattttgggaacaagaactaggaattaggattcttcaggtagagcataaatatgtataagaaatactttagagcttttctagcttaataacattgactcgtgcactacagatcattaacactcgaacaacgtaaaaatctggtcacttcatttttaatttatttctttcttaaccttatttatttttataattagtatccaaaaatctcggtaaacaccttaaagtccttttgatctacacaactttaatttacattagtatagatgaattgattatgtaagtttatgattatcttgattgttttgaggtatgggaagtctttatgtacataatcatttacatataagatttgtagaattgacatgcacacattctggtaaaatgacaatactaggagttaagtgttgggttgaaattctagtctttgatttgaaatacatgaggaataaattgaaagaaaatttagtattttgagaaaaaattcttatggtttatgatttttgatttgtcattccaataattgatttttttaatttaattagtttttagatttatttttgtcaatcacttgaggataggcaatagttcaagtttaggagtttgatgagttaacatttgtacactcattcttggtcattatttaggtgaattgttgtttatttcttaaagtatacatttgaagtgtttcttgtaatgtgtagtactaagcataaaatgatgaaattatgataaattaggagtaaactacacatatttgagcaaaatgttaaaatcgggaagcaaatgaactaagaaacaaacgaaatggtgaaagtaacttttggcgctatagcgccatgagtgtggcgttatagcgcgccaacctagaagaaaggaaacaaagaagatataaaaaagattatttttgcatatttgtaaacttggggaatcacacatggcgctatatatagtgttgtttctgaggctatagcaccgtccatacaatttcatttctatatttttttaaaaaaaaaacgtcaacttttccaacttttttggcttataaaagaaaaattataactttggctttgaaatgattagagagactataacacaactttaatgatagaaataagtctgagaaatcaaggaagtaccttagcaacattcaagactcattcattcattctttttctttcttctttatttctcaatattattcagattataaataatattttgagatgataaaccacactatgtgtggctaatgttcttagttattaggtttatatatatatttctaattatgactttaattttatgatttaatgcaaaattttgtttattctaatatacttcttgtgattctactttgtttaatttctatcatgcttatgattatgatttatatatggttttactttatgtggttataattaaaactattatttaaattgtgagatttattactctagaggggaactttaaaacacttagacatctagtagatcaatttagctggtgtgagatcaagaaataataacattcacttatgtaaccaaaatagttctaaattgtgaaatcgagaagttaaatatttaggattgtgtttagaataggagttaataaagataaggtataatgttggtatatagatatatagactattattcacttacacattggttatgcggcactcgatagagggtatagagatacaatattactctaagctctttaaaaaatagaaataagctaggcacattaatgattaaaatcatagttaaattagggtgaaattgaaaccttaataattatatttatctgattattctcaactttaatttattattctcgttctttctttttttctaacgtcatttgaaattgattgcttagataaaattaggttttaatattcgctataaataattactttaattactttgaatttctataggacgataccagtctttgaccactatagttacttgtccatttttgcacttacaagcatatacatataattttcgcaacagttatattgaggttttgaccttttttattaatgaatttttctccttttcaaaaaaagaaagaaagaaaaagaaaaagaacatttcattatacaattgaaaacataattttcattattgtctaaactagaaatcgatatctatatatatatattgaattagcaagtcagaattttaagaaagcttcactttcattttcaatcataactatttttacaaaatcacaattatttttaccatataaaatttcaactaaaaataaaatggtatttaaaataaatccaatcaggtggactatgaggtgtctttgtagcaagcagtgcgtgcatggacttgaatttagagaagggctaggctatagattaaggggtattcccgtcagatcatagaaaaatgtttgtgttttcgtaaaattggtttcacgtcaaacgagtgtcctcttttcaatttgtagtttagcttttgtagtttaatagaggcaccaaccaaacacggtctcatgtttcgaatccccatcatgtttctatactatactatatatctaacagatataaggtaaaggatacatcgaactacgtgatgggatttaaagcctgttctttcatgacgacatttcatctcttccttcttctaatattgcttctcttctatttgcttgctagcttctctctccacctttcttttcttctttcatcttcatcttcttcttctactttttttttttcttttcttttctcctaacatcttaacattccaaacttctgtatcatacagctattgacataaaatactagctctctgcccactactacctttacacgctaacttacaatattatttaactctctttctcttattgtctctagcctcttttgagcctccaactttggctttaccttcagctcggcttacatgctgacgtgtccaggtgattgaattattggctctaaaagtttccatgaataactgaaaagtgtgatagtataattattcaacgcaaaatatataaaaaagaaaacatttttctttttacagctttctctttaacctctatttgtaatggcccaagaaatattcttctttttgctctctcccaaaggaggtacagaggcattaagcatttaagcataaatgtttttctattaaaaaatattatgaggaaaaagtaaaaatgattcattgctagaaataagaattgaatcaccaaaaggcaaactacgaggatattattgtgggtgagggagtttttatttatttattgttttccgccgctatgtcaaagttttgaacgagattcataataataataataacaataannnnnnnaataataataataataacaaaaataataataattatagtattgcatgttattattattgtttcagggaaccaaaaccatgtaatgtatatataatatataaaaataataagtaggaagtcaccaagggattctataaaagtaagtgatcaattcaaggattcatttatgttttttttttttttttttgagataatggattcatttatgttgtgattagtaatagtgtgacaaagagagggatggaagagtgcttgcactgtaaaacgggtcgggtagggacgccagaatgggccccaaagtgaaaccaataggaaaatgatgactaattatttcacacaagatactccaactgattattttgattatgtctatgattctcattattggaaaaacaaagtaaaagtactgtccccagttcctccacccgtttcagtttttgctcatttcatatccatttgaagttgatttatttatttatttatttttgaatggatccatttgaagtttattattttcattaataatactttttcctttctttttcaaataataaatgattaaacaaaaattccaaaactcaccgaatgattttcccattttatcccccgttacattttgaaattgcatatgtatatgtactataacagagagaaaattaaaaggaccttgtagctttcctatgcttttatcgttttgtagtttcttttttttttttttttaagatgaagttttatcgttttatagttaatgtggtgctgcccattatatatttgttaatgctgtgattagtttcatttccaaccctagctaatctacttcatatttgtaaacagcatcaatactgtcaggttcaacgtctccccataaatgcaattcaaatgggaaatggactccttatttttttattattattctctcagaaaaaaaaaaatcctagaaaattcatataataaataagaataaaagaatagttttttcttttcttttttttttttttttttttgtgctgatgaataataaaagaatagtttcttggcccttttgtgtgtttctgtttgcatttgtttttctctctttcttttttatcgttcttttcattctacttccttctttcttcaattccacgttcacattctgaccccttcttcttcctttctctctctctctgcagtaagttctggacttggtggcagcggctgacatggagacagtacagtagtcctttttattttgatggttctgagagttttgctattctcgtgattcttatttttgtttttatttttcgaccttgctaacatcaacaggtctatagtcccacagatataatatttcctattccattattcatgttacatgcacatttctgggaacattttccatgtaccttttccctataaatcaaacctatacaccactcttcaattcaaatcaacccttttttcatttccgttctaaaggcacctttcatatatattaaattcaataaccagttaaccacttggggctagctcaagtggccataggtgggtgtgtgagtgttggaggtcttgggttcgagtcccaggtaaaaca

SEQ ID NO: 15507 - DNA, 16765 bp, Cannabis sativa
aatcaagattgtgtgattaaatgttttcttgtgatttatcagtacacaaggtttaactgataagataatctacaatgtagtttacttgcaccttcccaagttgacttttgacctagagtgcgtggtttcgttgctcaaatgcccattccgccttgggtattcttcgtattttggtaccaatcaagggaggagccctcgtgttcagactgattcttcatcaaaatacctaaacgacactcaaatgacacctggtgtcaactcccaacgcccaagttgactatcaacctaacgtttgtggtttcattcatctaaatgcaattctattttgggcactatgctagttttccaccacgaaaaaggtgtaatactcgtggaaagttaattcacactttggcatgtcaccatgtgcccagggtgacatactagcactcaggtgaccaccaatcatcacctcatgcgtgaccgagctcaatcactaagagacaatgaccaacttcactgaaatcataactatatcttagtggtgcatgtctcatagtcatattacaattctaaatatttcacatcaaaaattggttcctaagttgaagtgtgattttggtatcaaagcattaaaaaacgatccgacagtccaaatccaatctcccaaaactgaagatcaccatccaaagtcaagatgaaaattttgaacccttagatcatgacatggcatccatcaatggtctcaatcttctcaaaaggcatattccttgaatatttcttattttgtaatattttattgttgaaaaatcctcactcctataaataagaggttcctcgaatttatttttcacatttacattcactccacaaattagagattctctctctagaagctctaatctaattctaagattttccaagtctttcttttataaaggtataaggtttttagtgattaataaaaaaagtatactctattatcgacttacatgaggaataaactactataaaatcatagtgtgctatctcattttgatttctctttttcttgctactattgctaatcacgcaatccagagttagccattttttaacgtcaaccgtacctttaggctatgtctagtaggaaagaagaagagtaaaatagatgaagaatctataaaaaaaaaaaaaaatagagaagagagtaactctcatttgtattgtttggtattataaataaagatggaatgatggaaatgaagtaaaattaccataatatcatttttaatataaatatttgttactttttaaaaaataaattttgtattttgtgtattaattttatctttttctcaaattcttcctaaaatgaagggattgtatttttaaaatttggaaggagaatgtctccccccacatctcctctctccttttttgctaaacaaagaattctacctctcctttcaactctctccttcccaccaaagatagtgttagttctcacatgagaaagaaaagaaattgtaattagaacaaaaattttgaaaaacttgacatcatatattgctcgcctcttactcattgtcatccttcccagtactaaataaacaacaaaagatacaacataaactacagattaggaagaatgtggagaaaattgagcaagtttagactacaacaaatctactcttcctatgcaattacacaaattcaatttcttgcaccatatcttaccacggtgaagagcaacaatgcaaagaactccatttgttagacaccttcagaaaagaactggtttcgatagttgacaagatgataatgataaggatgttaagctaaatgtggatttcaagcataaagctgccccaaacagttgcaaacttttcaggactatgatcgctcttgcattttggctctagcgaaaaagactccagccagaagtcctacaatttgcaaattaagttgggtaaatactacaaaagcaactcaaggtgtatcgttttgaagtttgtgagggattataccacattacaaagaccatttattggagataacttaccaaagaaaatgcttgcggaattctctaaactggtcgggactttaaaaattaggataccagccacagacagggggatcttatttagtgacccaacaaggctgcacatattgatagggtcaggattgtaaattatagtctacaaagataaataatcactccatagtgaaaattaaaaaataaaacaaattattccaatacaaccgatgttttttttttaaaaatggtcgggtcgaactgttaaaaacatgttaaatggaatcggaagctagcacagttcttcccattatatagttggacatcaaattagaaaaatatatttaacatagatcattgtatccaattcaagttttctaattccgtgcataggtttggataattaaaaaataagcatccatccacatgttctgatgaaacttttctactgttaagaaagagtcttaacatttaatttgcatgcttaccatcaaaaaaataaaaactttcaaattaaaacaaaatgacttggtcaaagtaggatggaccttgataaataatttatgaattactaatctgtattacctgtatgtggtagcacctgtttgatgaagaaaccacatagaagtgaaactgattgccagacccagaaatccactgagtgtcattaccaaccagaaagttggtaccctcaaaagcggtctgcaattaggttgagaactgttagattcatttatagtatctcaacttatggcaagcacagttcagaaggcgaggctagataagatgggtttatgaagcctgccaaaacttgtttaaaaagataagctttattgatattaattaaaagtcaacccttaattacagagtttttatttattaccatgcaaacatttaatgaattaacatattattctcatcaagagaaggcaaagctagataagttgaatgaggaataagaaaccaaaaacaaatgtaatgaagtgtataaattaagttgggaaaaattagcatctccaatggggtgctaaattagtgaaatatagcttactttaggaaaaacttgctctaataatctaccaacagttgtaccaaatttggcacaatctaacatgatataaattttgcatcaccataaatgcagctctttttaatatacttttatacctttttttattattattagctttagttatcacattaaatactaattcttttagttcattattttattattatcattaactatcaccaataaaatagaaagaaaaattataatattttttaataagtattaaataaacactaataaaaaaagtactaagttcgaatcccccctcaatagtaaaagaaaaaggtaaattttgaatcaaattttactattttgcattagagcatagctaaatattatgccaaatatatcacatattatctttggtagcaaatatagcacaatatttacatattctattagagatggttgaaggcacattactgcattggggctggtagagtgtgttggaaaaggctggtaggcatttgtttcaaggtatgaatccccatagactcaaaaaataacattggagccactaggagctctccaagtcaaattgccagggccaaaaatttgaagaagaaaaatgaaggcaccaatatctgtgacacactacaggtacaatccggttcttgacacaaacagagtacaggtattgtattcatgtctgaaacagaattacaattatccaagctattcgatatgctcgggtgtctccctgagtttgttaacataattacaattatcctagatttttttttacagttagatttcttcagcctcctagagtaggtaagcctaataggtggagtatcaatctgtatcctagcaacatcagtcataactacgaaattgttatgaattctaaactagaaataagaatatgggtgggcggatgatttagcactgaagcctaatcattatgatgataatcgaaaaccgctagatacaaacttgaatgaaatgcactaatgatgaattagggctgggttgtgaccatctagaattgacaaggtaaatttaagagaccaccctctctcaagtcagaaccttactcccaaaaagaaaaaagaaaaaaagcttaaaaattctcccgttttctaagtctccattatatacaactgtttcagtgccaactcagtggtaaaccaacatgtagagacccataaacaagctacctatcccctaaaagacacatatgccaatggatggaggagggcctatcaaatgactacaacatcttttttcgctttatcaaactcataagcttctattcaaatgcatgcaagcaaaatcactcctgaggtgaaaggtgaaatccaagagagctagatacatataagttgacaaatatgtatgcttattaactttggttatccattatgtagttttaaatcatagaagatcatacagcacaaaatttactgcaaaatttagcttatgttttataagaatcaaaggatccagggaaaaacagtagaaactatcaagagttctttgtttgtagacatcatcatatcaagaaaggatgctttaatgaaagcctgctaagcagactgatcttatgtatgagaaattcattttcttgctcttgcaaaagccttaaaggagtgcagtttacatctgtaacattaactaatgaaaatggacacattacaatgaccaaattacgagaaatcaggagaggaaatttaaaaaagtacatatacttcaagacttagttaaaagtaggtaatttttttttttgtttttttgaatgtcaattatatgatatgcatcaatcctcaacatcagtaaaataatgtatcaactgcacaagagagggagagacagatagacagacagacacaggggtaggggagagaaggactcacgtttttaaaagataatccacctcattgaaaatgaatataagaagaatccccaaaggcaaagaaagtgtgttatttagcatgaccatagaaaattcattcaagttcccagatttggtgtattgctttgctgtgtccatcaccctacggagagtcaactgtacagataaatataacaataaacatcaacattctaaattaacataaagaaaacatccttaataccagaatattcttagatgattcataagataaatcgacaaaattacaagcaatcacttgtgaaggaaaatacaaggacttatttgcgtggatatctttctttgggtagttgaacatgagcacctacccaatgttaaaatttgtgtttgcgcactaaaatttctacaggatctagcaagtgatttgaccactcatcattttgaatgtaaaatcataactttaccatctatcgccaaggtcatttgataaacatatttacagtatttaccacaagccaggggaactaagggacttttaaagtgaataaagctatctacaaacataaatattctggaagtgtataaaattgaacagttacatcaagactgtgaacttacagaatatgatgcagttaaaaagcagttagcgatctgccatgcatagccaacagcatgaaatgttaaatcggtaactcctccagaaattgctgatatgatctgcacaatggaaaatcagaattataaaaatgaatctataaacagtgcagtgataatttcaaagtagtagttctgtgactcacatgtgaacgccttctaatgtcacccttataaattaacaataatatcaagtgtttataatattttaattttttgtaacacttagttattggtctctgagttggcagaaagttgtcctttcaataccatataagagtaaatcccatgcctaatgaataatggtttagttttaggttctctcattaagttgtgctcaaccatagataaaagaaaaagtttccacaaaattactggaatagccaatgtccaactaaacatttaagtgaactcaagacataaataaaagggagaggggtaaagagaatgaagatactcagagagagaacaaaatgcaaattgatatgataataataataattgaaaaatgaatccattgcaagttcaaacataccatcaagaacaaagcagtccacactcggctctcgtgatgcttgctaaataaatacatttccccaacagcagttatcacatttgttacattctttaggactgtgaccatggcaacattaatgtacttcaagctgtaaacaagaagtacaaagtctattaggtataatttataatcaagctctagactagtacactctaaataagacatatgagtaggtgacggtcatgctacgcatcccatccctctaaagggactcaccaggcagcacaaagaacatcaaatccaaaaaatttacattcatgtttatatcctggttaataaaataaagcatttaacaatggtatggcttgtgctatttataaccaaaagtatttttgcaactgggaatattcttttagacattcactcctatttcaaatttgtttacaaaatggcaaatgcagttcaaaattttcaagtttcttgccatcaaaggcactttacaaatgcagcacgcagtagctaccaactgtaaaaacttcatacctacatacctaaacatgcttgtaacaagcatcccaacaaatataacgttcactggcaaccagaccttaatcaatttccatgtcaacggttctgttgatatgacacccagaaaactcagtacagacactattattactgaaataagattctgcatccacagaagagcaaaaagtagttaagacattaaagtttaagtcaaaccaagtgttcaaatggcacttgactgaaaatccaatatttctttggtcatagcaatgaacatgtatacaatatactagtcttacaagaaacctcagtaaaaggtagattacctggtacagcatcaaagatatcccagcattaaaatcatagccagatagcatgaacttgttaactagtatcatgctacaagaagagatgcaataggccaggccagacaataatgccggattctgtaatttgactcctttagtactactacgtgtagatttgttcctttctttctccgtaccactttccaagtcagtaccattatgttcaaaagacttcattgcaaagtatcacctgcgtaaatgtggaaaaaaaaaagttaatacaagtgttttccttttggcaaggaacatgagagattagaaatgatctgccatatgaggtgaaacacaagttcagagattagaaagagaaaaaaaaaacagagaaccaatacttgtataccaggtatgcagaaagaaatttcattaatacagaaaaattaattgtcatttaatttcagagtgtgatatcgagtgcaattagcatttctgtttcaaatatatatatatatatatatatatgttggatgagcggaggagagaagcttttatttaaaatcaaccataaaacatgcacagtgacaatactactatccttgtctaagttgattagaaatattttatcccctgtacgttaataatcttattagcaacccatgcattaagaaacatcatcacaatgtaaacgttgcatgcatatgcagatacaaccaattcataacattgagcattatcataatataatgatgctcctcttttattacaagcctaccacccaacaacatcaaagaggaaaattattgttcactctactattctaataccaatatatcatgtgcttaattgttgttcactctattttcctctattatcctactgtttataccaaaatgttaggaaattcctatcaaatggtatcaaagcacgatcttgtggcctctgtcatggcgccaatgctaccgctattcaatgaagaggacccatatggctgagttcttcacatagaagagtatttccaggttcatcaaacaccaaaaagaaaaatggtagtggttgctcaagaaggttatgggtgttgcttggcaatggttttaagtcgtggagtaacaagatccaatcgaaaattggttggaattccacatcacgttgttcaattgttgcaacaaattcaataatgatccattcgacgaattgatggctctctgatatgagaattgagtgctggggttctggactcagttcattccggttgcagcaatattgttggatgttcccaaaaccttcctttgttattatatgtttgttgcaatcttccgacgaaggtgtagaggaaggtgcatgaatataagcctaggacacttaccgatgtcatcaccaaagcgttcttagttgaaggacaactgaggtcacatcatcaaattggcaagggggataaagaagagatatagaatgacagtgaacgacctgttgatcttcttgagtctccaacggaaatggtggaagttatagcgccgaaacacagttcctaatccgagatgctctctgaaaaaacaacagagaataaatcaggaagtcgacgacccattctagcaataaagctttgcatcgacagagaagaaagagtcacaggagatggcgccaaaaaaggaccagcagatgaaggtgatgtcagagaagaaggagacgtaagaagggcttctttcacatgcttcggctagggtttttcttgctgtgtgggattcaagtctggacacttttgatacttcacttactccaatttgggcctgaggtatacttggtgcacctccattaaataaagaaaatagccaattatccttaagtgtaattgggcaattatttgggatccagggtaaatagtggaagcccaacgttctatatgtttgaattttgacaaaccacctctccatctcagaagcttcatacacaatggacgatcggcaacagaactgcaacttctagatcttcctaagaagcggcgcaaaggaaggcaagggatggtcaacgccgttgagagggtaagagggaacagcgaaaagtactctgtcttctccaccaatcagaattttctttgagagagaaatatgaggcaataatttctctacaatggaaattggtagagtccaagcacacaaggaacaaaacaaatttactgaagcttgatcagcagtcagaaaggttgaagggaggtatgctttgtagttattagcttgagagtctgaattttattgttaacagttggcaaaggggaacaaatgttcttttcatgttggggttaaaacagaataatcaacaaatccatgggccactatttcttcttgttgtaccatacttcatattgtcaaactgggcaaaagaatttagaaaatggctgcctaagatgaatattatgaacaaaagagttgacatcatcaaacatttaaaaaaattattgacgatatatgaaaatatgaaagattaagttgtcgatgaaccgcatagtttcaaaaacgatggaacacaactgtctgcaacccttttggaatttatcactaagaataaattattggtaatgggtaccctatcactgaacagtgtggacaagtcgtgggtccaactttattttcttgatcaagataaattcaaaagtttagtctcacgaaagctaagtactctatcacgtaattggtttgtagacaaaggacgagtgtggcagctcatcagctctatttttgacattggaatgatcctattgtatgtagttggtactcaaccttctcattgttcaagtttggtaatgcagctcagagtcaccccttggttgcgcgcacaccggcataccaatttgaagccttctgtccttggctccttgctgccatatttcaacagtcacatgttcatcctaccaaaggagggaatatgactttgctcaacggtttttagagcgagttgtatggtggcgtttctctcacagcttaaacaacttgcatttgttggcttggttctttgacaaaggacgagcaaagtttggggctacaattgaagttgatcttcttcaccttgaggacaaggtgaatttcgggcggctggtattgataggccttagaataaataaaagaggtacatgggtcattgtaatggggtatcgagttagtatatatataagagagtattagaaaggatttggggtagagaattacttggttaaagtaagcattagcttaggggagtgttgggtctcccgaatacccaacaaccttgtttactctattattttaatctcaatatatcaattgcttaattgttgttcactctattctcctctattattatactactgctagaatgtacatatttcttaaaatgtaccaagcctaattggacgtgtgctttgaagctgagggtttttgacataaaaggtcttataaaaagggtgcttgcttttcatgatatatcggagaacttccaaacctaggcataatgcaataaagtgatacatgtattccgagataggccttatttcaaaatatatatttcaggaaagaaatgagcattttcatttgaatgttaccatcaatgtctaaaagattgatataagtcctttggctaacaaatcaataaaccaaagttagtcgttttttctttccacaaactagaaaacgcaagtgtcaactagagaaatttgaccaagaaaagaatacatggcaagtgggaactaaaaacatgagcaataagttgaagaaacagacctgctaaactaacttcagctctgtacgtcttcttttccttttaccggtgtccttgatgaggtaataatcagatctaacgaggatacaactgcgcctctaatttaggcccagttcggccaatctagtttctgcagaatcaatgaactcatcaaatgcctaaaactactacaaatcaggatgaacaaaagggtccttcaaagagaattataaattcaaaatcagcaagcaaacagttgatcaatcattagaactactacaactaggataaaaaaaatatatattttattgcaagtgcatagaaagaacctacgcttaaaattagagcatcattgtatagaaattaatctttcaaagtattaacaccatgtaaacagacccaatggttaaaaacatataattaatacgtggattgaaaattagcaatatttatattatatttatatttataaagatactcattaacttgaatttgaaaaaacccagttagtgaaacttaaactacttccaaatgaagaatgtctaggaaataacttcatttccttcttagtcttaagagtttctatcatgatctaaaatgaagatggtcatcctaaatgtgagtagattatttcaacttcaagagagttatgtgacaagtttgtaagactaacataagaaaacagaattaaaggagaattcacttattcccaaatacaagaagcaattttaatgaagatgtatgcgaatagagggctagcatacaaaaacataattgaagccaaaaactaaagatgccaacttagtaaaaataaataaataaaaataattgaacccaaaactaaaaatgtcaactttgggaaaaaaaaaaaaaaattgtttaatatgtaagacaagaagacacccatttgatactcttgatcaaaagaacagtttcagagccttgaattctgaattaaacgaaaagaatagtaattaccttgaaatattctccaaaacttcaacaccctctcatcgatcaaagaagacccacaaaaatggttagagcagagaggacctaagaattggaaaattcatgaaaagggtacagaaaaaggaggaaaaaatatgtataaaataaagcacaactctttctgatttgagcaagaaaaagagagaaagaatgaaattgagaagaaaagctgaggagaaaaagggtggaagtacctgggtcgtcgtgtaatgttgttgttattactatgtttcgtatatttcaattttcaatgttcaaaaattaattcgccgttgtccagtgggagcactccatgtcttcattccaatttttatttttatgttttattttattttttcaaaagccaaataccattttgattttctattttgtaaatgtacctgacttcattttattaaataataatttaaatttaatatttttttttggataattattaatttttgtaaaaaaaataattttttacgcttaaataattttcttttacatttttataattttttatagaaacaacacgaaaataacaagaaaattacataaaagtaacatgaaaataatatctaaataatatcaaaacaaccacaaaaaataatatatagataacaaaaaatcaacaacaaattaataagagtacagcataaaaagactgtattttctgtaaataaaatctaaaaaaaccgcaaaaatatttaaaattctgtaaaaccgtatttttgtaatttttttattatttttatgtatttatgaaataattcctttttttaaaaaaaaaatggccttatattttctaaaaggtacaaattaatactttaaatttaattttcattaaaataaaactaattatatgtattatgaaaaaaattagttatattttttatatttgttcatactaaaagttaattctaaattaattatattaaaaaaataataaaaattaaactcaatgtattattttatttaagaaatataaagtttatcatgtaacaaaataaatagttttaataattagataaataaaatattttgtgtcattttactaaaaaaaaatcatattaataatttttataaaatactaaatttaaaatagtatttttttttaatttatttttttaagtgaactttttatatatagttatacatgcttttgaaaatacaccaaaaaaaattatatatttttgacatttacatcattttttttatatataataatgtatgggtgcactcttaatgggtattactcatgaatggattaatgttagtttttgagcttaatttttctatctaatcagtttgatctcttattttcacattataggaattggagttgttctataggttggaaaaaaaattaagaaaaaaagtttttcgacaaaagaaagataaaaaaaaaataagtttgatttaatattttgtatctaaacacatttttgatatagtgtaaaaagagatatttttttattttttttaattatgtagctaaactaagcataaatattaaaatttatcttttattattcgtctttagatcaaaatctaataatttaatattttaaaaattaatatttatagttaaatttatttagtaaccatcatcaatgggtaatatccgttgaaaagtaagtatatagtaaatatataacatatactgccttattttagaataaatcgaaataaaattagttgtaatagttaatcacatatttatttaaaattagttgtaatagttaatgacatatttatttaaaatttattctctaatttaaattattcaaaaatttacattaatttatgttatttcttaattaaaaattgaatataagaaatatgtcaataattgaaaatacaaaaaaataactaaatcattttttttgaaaaacaataataatcattcattattttatgcaacttatcaataacattttggattaagcatattcactgagaaccatatttatagttgtcaaaatatacacatcattttaaaataatatatttttttttattttctctttcatctacataacatttgtcatcttttcttaaaaatatactttaatatttgacaactttaaaaattgtctgtcatattcccacgtcacattaaattaataacttttgaagtaaaatataacttttttctaataaaaaaaattaaaaaaacatcatgtggctattatctatattgagcaacactttacataaaaatagttttgaaaattaaatcatattgcagatctggtaagaccacttcaatgagcaatcccattgccaatcatatccaataagggcaacatttatagttgtgaaattacacacatcatgctaaaatattatttattttttattttctctctcattcacataaaatttatcacatttcttaataaaaatatatttggtagacaacttttaaagttgtccacatggtcccacattatattaaattaataattttttaggtaaaaaataacttgttcttaataaaaagaataataaaaaaatatcatgtagttattgtctatattaaacaacacctcacataaaattagtcttaaaaattagactacattgtatatgtgacaagatcacttcaatgaacaatctccattaaaaattagagattgatttatttgtagttgataataaaacataacactatttttttttttttttgcttaaaagctcaataattattaaatatatataatgtataattttcatttttgatcctataaagttgtttattaaattatctcaattaagttggtgaatactaattaactttttctaaccgtacaaaaattatgaaattaggagtggaatttttttccctaaattaagaatgcaatttttgttagttttttttcccttttatttggttagtttgtcattattgaggagaactaattacagcctcttattacaactttttagtcaatcttcacgttcaaaattacatgttgaaattttttttttttcaaatttttttatagcggtattcgttatagctacaatatcatccctataaattttttaaaaattccaaatagtttatgataccgaaaacagagttcttgatatttcagtttaccacgtgtgttcaaaaaacttaaaacatattttcggtaatgtaagctattcgaaaattttcaaaaatttacagagatgatgttgtaagcataacgaacactgtcgtgaaaaaaaaattgaaaaaaaaatattccgacatatgttttcgggcatggaggttgactaagagattgtaacaggaaattgacagtagcactcctcttattttttttattcgattatatctaaattatttaagagtattttcatcatatttaaaaaattgaataaattgtgtgatttattttcttttaagaaattaactactttgattttgtaaagaagataagaaaagcattattacttattaaatcattccctcattatacttggcagaattatttaccaattatcaagtataaattatagttttattacttttaaatacaagtatatcttataaaaataaaaataaaaaagaataatgtatcttttatcattatactctatactaattactcaaaatagaaagtacataaagctatttatgtttttttttttaatggagggaaagcttatagttatatatagtagatagcggttacggtaaaataaatatttataataatatacttaaccagtttattcccgttaattgatgtgtttaagctttttttttctgttgatactgtagcttcattaaatatgcaagcccaaggtgtctttcttaatacaacgagatttcttttagctaatattatgaaattctttcgatactgtgagtcttaatatacataatattgcaagatattttccataccgcgaattctctttatcgaagtccttctcgagtggaaaaatttatcccaataacaattaattttgatgaaactgcctagtacaattgttgttttatttattattcagattagattagatatgaagcaaaaggagaatgccgtctttgaggactaccttccaaaatcatagtgaataataatataaaggttttgacaaatccaaaagttaaggaaggtaaccactcacttggcttttttgtttgcttgtacgtatttaaatgggggagaagaacccattaacccaacttgtgtcgaacaaactatgtactcgaaaaaaaaaaaaaaaagaaacccgttgtattcattgggtactatcttctgaggttgaaagggacagaggtttacttgttaattgttttatctacgtgtcacaatgtgttataataacaatttttgatgccttttttggcgggatgtgataaatcgtatccactagtcaatacaaatgtgaatcataatgcatattgcagtgcttttggacctaaaagtttcatctaagtgggcaaaccatcactttgtaagaaagaaaaatgtcaggaataattcttaccaaacacccactaacatgttatttagatagacaaaacaaatttaccaaagcagaacccaattatcaaaaacattatacaaaaaatgactaaaaagttggcaatttttccattgaaaatagcatagtggaaatgtaaacaatgtaggctgcatgtggtccaactccataaccatatagaacgaaactgaagaaagtcaaaactggaaattgtgtcaaccatatgatgctgtcagacttcaacaacatgtcagatcccagtttcatattaatttttgtttgttttattcataacagctgaaaactctaatcaacatgaccaaagattcagcattgtttgattacaaatggaatccaaccagttgctcagctcttcaagtaactcaactaagtcatgcttttgttggtagcttgagggacttggtttaactagaggacatgaaaaacaagggttgaatttcagtcttttccctgatttttaactctacaatgaaagctgatctatgatcaacacagtcgcattaaagctagttacgctaaggtacacctgtcccaggtgattcgaaaaacatgacctagggaaagaaaagcaggaaaccaaccagaactgtagagaatctatagttattcacaaaactatggtaaaatg

SEQ ID NO: 15508 - DNA, 5560 bp, Cannabis sativa
attggtccaactaagtatcgaatcccatataatttaatataatagtttttagggagtatcgctagctaattgcaacgtgacatgtcgagaaggtgctaggcaccagtggctaatagaaatattctaataattactttaatccaactttaaaagttaataataatgtgaaaatcaatagtgtaaaggtatatttctttgaattacccagaaagaaaaaaatagtgtacaattatatttacgaataagttctttaattttgggcattcttgcatgaaaaatatagttgaaggttacacagttaaataacccaagtaaaaaagtactcattaatttgcaactctcaaagaaaggaaattttgttattattttttttttccttttcttcatatgattataagagtacacgcgagtgtgtccaaaaaaaattagaaaaacgtagagacattgatcaatcaatatactaattaataaatttggcccctagttttcttggaccatgaaaaatgaaacatatttagtttaaagctagggtacaatttggaaaatttgatttgtagcttaaatattctaatattaattaggtccctaatttaaagtcacatcataaatttaagattctcatgcttttataacatcctataaaaatttataaacgatcaaaaatttccatgcaacaatcgaactaaaagtgattttttaaaaagtaaaattatgcacacatgtttttattagtattataagtggccatcatgtgaacatgaaatgggtgatagtttatttaaattactccctcacgcatttcaaattgagaatggtttcacaaaccatcaaattaagtaattcgcaatatttttacaaaatatatatgatttttttattagaaatatgtatatatatatatgcatttattaaaaaatttctgtttaaaggaggtggtcctttaacaaagctttctccgccgcttaccataattctcttcttttctcttaccccgtatgccctacacagtgctgaagtcatccccttctctctggctttattaatttctctgtttgtactttctttacataatattttatttatttatttatatttgtaagaaattaaacaaaactacaaaggtacactacgcacccctttggtaggttagtcttctttatttttcaataaaaaaaataaaataaaaattaatatagtaataaataaataaaaaaaataattcccccaccttttcccttacgtaactttcatttagattatatgtatacatatatatatgtacgtatatgtaaatgctaagggttcaaagccattgtttcgatatcatattatatgaaataagttgaataaataaatttatttttaaattttatttcgtaaaaatgataataagatttatttcctaggtcaaatgctaattaatattgaagctggctagggtttgatgagtacccataaaaaccgggggtaatgcatgaaaaactaccagttcgtatatatctcagctggtttttcttgacagtaagtaaaggtacaattctgaagtgggtttctgaaacttgtaatcctacacatataacttctatatatttagttttctttctcataaaacaaaggttgtattatttaaataatattttatatagatgtagtagagtggtccttcacatgatatttggtatggaccaatctaagatgctatatatgggttctgtaaggtgaaaattaggagtgtgtgtattgcttttagtatagctctaagctcaatagctacttaggttgataaaattttatgcagcttttgaagttttttatggggaattaaagtatacagctagctagggtttgacatatttgaggtttttcatttttaatttttagttaattttttaagaagaaagagatccaaaatatataatttgattatacatacatataaataatggagattaattattggagactactacatagctgatgttgggaatttattagttatttataagaaagaattaaagaaagaattaaaaacaatgtaaaccactaatgattaatattaatagttaataaacgaacaaaaaaatgccactacaatgtatacagataataatgcagggctcttgatgatattatattcataataaaaactggagtactccaattatatactcaaaattaatttacttttaagagatcgatcgagctttattattagtttccttaactggaagtattataattaagaatgtttcaataaatgataatttatgtacatatatactaattattagtttagacatccatggaatatttttttacagtgactaaacttaattatacgcctagaattaatgcatgtgaacttttccatcagttttgcatgttcactaattatctgttatctaggttttattttatttttaaagtacaaaatacataataattatcataattaattgtcaaaaaaaatattatcataaaaattaattattacatcaccgggacaatatcatatttttacatacgaatcagacggacactgttgattagggaaattattcataaaatatgtactatttaatatgagtaataacgaagattataatgtcatattaaaaaaaacaaacaaaattaaagatacacatgaaactgtaatttaattttgttagtaattttgacaattctaaatgtttgctgattcatctggtggtggtcttgtaggtgtttttgcacagctggcaattagtgtgttaacaaattctgtttaatttggtttaacaagcgtgtgtgggtttcctatgctggtgctacacagggacggaactagtattgttgatatggggactatagccctactaacataaatattgtcttttaaaaaattaaatgtaactttttgatttgataattataaactaaaatagtagaaaagctactacaaaattaaataaatctagtaagagtgataataatataggtataaatattttttaatgataaataagcccccacaaagtaaaaattctgggtccgtcacgggtgctacatgagtataaatattcagtacttatttttttattttcattctaacatctctttgatagaagttgatccatagattaattttctttctgttatttttgtaggttctaatttcttttgattgaaggtgtaattcatccatgttgagttagggtttcaaatacagggattttatccttccaacacttgaattaatttggagggaaattgaatcttaaaaacattaaaatttatgaaacaaattaaagattttacaatatagtaaaaatattgattttgtagtaaacttttacctggaatgaaaagttcaaggatatgattctaatatgatgagatattccatcttacaacccaggtgattatgaaataatacatgttcttatatatgatttaatattttactatttatttcacggagaatattatcccacaataatattatattattatggtcaaccatgtaatatattaataatatattacacatactacacatgatatatatcaatatagaataattagtattttcattgcttgaattatgtatacttattaataattttagaaatataatttttacatcatggtcatccttttataatattatatttaattttatcgtaaaacaagtgacactgttgataatagttgataaattaatggatcaaaattacatactttttacaatttttactttaatgaataaaaaattaaaaataaaaatataaattataataaaaaaaataaattttttattctattattcattaacgtaaaaaaaaaaaagttatttaatttgtatttatttatcaattatccttcaccgtttcactataaaattaaattaaaagtaataaaaggattatattacagtaaaagttatattttgagcgatatttttaacaagtaatatgttataggaacacaacttgatggtgtaaaaggtttaagcataatgttaattatacaatattaattatacatctctatgtatgtattgggacctcattaatgaaaggtttaaagtttaaagtgtgaacatataaatatctccttacatgtgaatactatcaaatgtgtcactgttaagtttgttacgatcatccactaggtatcgaaatattctttgctgaaaattaatagcaaaaactatatattcaatacagatacaaatatgtatagtaataataatataaataagacattatcattatatttatcatatttgcatgttattttcatggaacaaaaagctgaaaattattagcatatgagataataaactatatatacaccatcggtagtactatatatactactgtccagcaaaggataacatgtcgttgttctttaatatgacctaactggttaaacctagctacccatggattttatatacacgtagtcatatatatatatatatatactaatggcggctctgcataaacttttagcgttgccttttgccctaataatcctattcatatatgtatgctacacactaattaaagtgaaagagaatcacactataataatcttaatcataatatgtatactaaatatatatttttaatcattcatgctattacaattaagtttggatatagttaattaactacacatgatcttaattaacgacattcatgatgtatatgtattatgtaatatatggttcgtttaggagtaataacaatgactcttctctcttaaattttattttttgtttcacactaaaataaggttctgattttttctttctttctttgcaacttctatagaatataggccacaatgttacaagcgtgctgaataatgcaccacaaaaagatggcccacaaagggaaaataaatgtcaattggtgggccgttgtcattaattgattgaattacatatctagtccaaaaaaaaaaaaaaaaatagagaataaaaactaattaatatgtgaaattattttttcccctccaattttaatattcttgaccttgcagcatcaaaatcttcacccattttttcttttgttcttgattggactgtctctttatatatgtagtttagatatataagaaggcagttacaagacatagataaggtctagcctcttgatttttatattgttagtgaaacggaaagaatggattataatattgtctcatacattgttgactttttctaagtagcaagtaagttagagtaataataatacagaaatattatattgagatttgatattgtttttattgaccgagattttggggcaactcaaataatagcaaaaattattttaagcataacaaaatttgtaactaaaagtaaaaaatcgtgtttaattataaattgtcattcttatagtgtgactgaaaactacatggctaaaagtattagtaagaaaaattataatttgttgtaactaaatgtatttttagtcataatacttgttgtagctaaaactaaattaataacaatttatatctaaatattatgtttactcactaataagtaacatttttgttgtgacta

SEQ ID NO: 15509 - DNA, 3297 bp, Cannabis sativa
gattatagtgttgtcaccacagtagaaaattatcgtgattatatgtttcaaaatatttagtcccatgatttatcagtgcaatagatttacactgacgtgataattatcgatgtggtttacttacaccttggctaagtggagtatctttttcaaagcattagcaaagtaaacttatattgtatgtatagggtttacatcagactggatcaatattgtcagtgaaaaagaaatcataaacttaccgttatatcttttctaagccaatatcacttaattgatcatagatcgattgatcttaatcctaagatgattaagcttttgtcagttttagtattagagttctttgacttattcgttaccgacttacctattggtctagcccatacttacatcttagaaactcagtagtgcaattcaatgagaacgttaatcatagatatggacatctatagcttctatgattttttaaaagtaaaatgatagttttctttgagcttggctaaacgagttaaatagtggagtactcattttagtaattatattatttactgaaatattatttacaacgagcaaagtattttaaggataaaatgcattgaagggtgtttactgagatttttgaaaattgaactaataataaattaagctaaggaataatgttttagaaataaagaagaagaagatttttacgtggttaaagcgttaattagccttagtccacaagtcaatattattaaactctttggctatagagtattttacacaagagtgttcttgctaaatttttgcagagtttctagtcaaaattcgtaaccctttgcatgaagggataaaaccctatttatagactgaaatcgtgttatcgggtaaatctaggctaaaccactgcatcttaggcccccgactgattctaccatagaggtcaacgatagacaataactctccctgaacacagcttacaactgttagagttttgtacatgaaaataagcccgttgatgggtaaaatacattataatattgactttggctcgagtaggtgaggcccaaagaggaggcttacctttgccagtacggaattgcataacttgatggtgaaaggtgtcaatgcgtcgtcaattatgtacatttaaatgttaggataacggaggttggacaaaaaggtatgttgcttttgggtgttgtgcacctttcccaagtctaacacaagggaaaaactcctgattctgtgggatttggtgtcggaggggtgtcatgtaggataacacctggacgcctcctcgattacgcttctgagatacccctgaagggtatccggatgtgtctctttaaatcttcatctctttggacgagagtcatacttccaggaccaagaaggtcttgctttgtcgaggtggggtcatatttgaacccgaagctatggtccaactccgcttgtgggctgacccacagctttgtttgggcccgacgaatgggcttgttcatctagttcttgggccttgaaaatacacgtgtcatgcgtccgaaaacaaggataagaaaggataaaacagtaatttgtccctattcaatgtaaaccgtctataaaggataattaattactttaattgaaacaatagataattcataacgtatctatattgaatatatatagagtgttctatgaaatcaatagtgcaattatgagtatataattgagtcatgataaattaataagttaggaaatttactccgtaaatttcaagtcaacttattaggagcttgatttcatatgcccatagtcctcaaattacctaggatatatatcatcttgatgactcaattaattgatttatttaattagttaaaattaaaaaattaattatgtctaatttgagaatttttacgaagattgggctatattgaagagaaaagataaataagattttatttattaattatgacactttgtaggtcaaattataaatatatttaaaatatattttatttgataattatttataattactaaattaaaattggaatttaaatagtttagatttaattaatggtaaattggaaaaaaagataaaattatttcattcaaggcttgattaaaataaaatagcaaaaatttaatataggcctccataagtggattttagccataagggttattttcagcccaattgtcttttatttggtccatttaataaaacctaaaacctaatgtaagtaatataacaagaaagagaagagagtatttgtcaaataactcaattcaggccaaaattgacaaaaaaaaaaaaaaactcttcctttctctctatatattccagccatactctttctctttgtctttttcttatttttttcaagccacaatagtgattgaataatcactccactttagtcaatgtgatactcaggtctttgtaaaagattgtgttaacaaaatttactaaaattagaagagattaattcaggttcatcacttagaaatactctactacagaaaggaatcgagagttagagtgatagaacgaaaagagtcacatttattctgctgtaaccaatgtaaatatccaaaaccctaatacatttattttatcattttgtaaattatattttaagatgttaaattattatgttgataatcaaacattagtaaattaaattctgataatataaaattcaataattacacattcaagtcttatcttactcgatacaagattacactaactgaatggattcttgtattggtgtcttagttatatttggtttaaactaacaacaagtcttcacaattatatatcttaatcacgatcattaattctaaggatcacttataatcattctcttcttatattaagtatgagtgaaaacagagtagaaaagaaaaagctttgaaaatgctttattaatctgaatagtatctaatctacaacagaaaaataacataaccaatgatggttcaagatgatgctgatcaggggtagtatcataatattaaaagattttctaattcaagtccaatattttgaaaaataaaatgaattgcatcttaaaactaatttttgttttgagtagatcttaaaattaattcataatgaataaattatttatgacttttataaacaggtaggtttgatatgatatcctcctatctatccacgtgggacaacaaaatgataatatgtaaaataaataaataattagcaatttttctccctgaattttgacatataccaaattatgttccctgaactttttttatcgttaaaaatttcctctgaaccattgagattgttaaatt

SEQ ID NO: 15510 - DNA, 3824 bp, Cannabis sativa
caaatacataagatggttctttttgattaataaaactaatgaaggtatcttatctataaacaagacaatgatcaatgaaaccaaatcaacaacaaacactgtaatgcagcaaatataaaaccagtaacaagatctttaaacaagcattaagaacacacaaatttaacaaggtttgaacaaggtaatatccaccggccagaaaacagccacaacaatggctttagagaatctttattagctgatatttaatgagagattacaacagttccaattacacaatcttgagaagctttgcttctgcaattgaactcacaccattacataacactcaagggcaactcatctctctctctaaacagctcataattctctctttctcacaatctgttttccctcgaaaaattaacccacaaactttaatctagttgagccttaaatatcaatgctgattgaatcataattacaagtattctatatttaacatgcatggggtggtttacaacaacttaatattgacatggatacttttggtcattctcatgtccacaaatttgtgttgctattgcatattaatatagtaaataagtaggctaggtaggcgtacatctttgacattacacatcaaaatcaggtcttgaaatcattacttcaacacaagaagtagaagcagaaggaaggggagcgaaatgagacggaagagatcatgaagaaaacctttgtgtgaaccattttcattctttaaaattacacaagataaaaagacagcctctaaccaaataagagttggaggatataatctttttagatttaatttctcaccttgaattagctttcaagcttaaagagttgatcaaaggaaagatgatgatgatgaaaatagtcaaactattgccaatactaatgaatggttgaatggagaaagaagataatgatagtcaaaattaaccacaagcaaactatcaattaaattttccttcctgaaataacaacaaacttcaaatttgcataagatataaagaacctgtaaaacaataacaattgaaaaagtatattgcaatgattttgaacattgagacattaatgcagagaaattttcaacttggatctatggttaaagatagtaatcataagccatccaacttgttatacagtctaaatttgtgtatgcaagacaaaacactaacattatccactaaagacaataaaccaaaaacaaaaatactatgcaaaagccaatagaatagtggtataaaaaatgcaaacaaaaacactaacattatccactaagacaatacaccaaacacctggtggtcgatctataatagcaaacaaaccaacatactaggatcattaatatattgatcttgtaaaatctaaattaaatgactgtataatactttaaactcgatcaagtccataataaacacattcacaataaattacaatgtcacattcataatatgggtaatcaaaatattgatattttaattcatctgcaatgtataaatctattttttataattcaattttaaaaattgtttgctataacaattagggaaataataaaaacaaaaaaagagattgaaattcattaaagctttatattaattgtttgattcgtgtcaaggaagacttacctgattgagctaaacaaactcaacttgttcttcttgttctgtagtagatttctcaatggtgatttaggattgcaacgtgggtttctatataaatgtaattaaaggatttgggttgcaattttgtgatttgggttatgatttgggattttgaagaacaaaattatagtgctgggatgattgacgaagagaacagccattacagtaagaagacggaagactaagatgaacagagtgaagtttggtgagaaaatggagtgtgattcaataaaaataaattcaaaaaattaattttaaagtaaaaataaaaaagacaaactataaaaatgaaaaccaaaaataaaaaccgtaaaagtagaaaaaaacttttaaaaggtaaattccctaaaaaaatatgaatttcaaattttagtatttttaatcccaatcgtgtataaattaacgtaattataataagaatagaattaggattaaataatatcttagtattgtaatatgtatagaattaggatttgtgtacgtatataaatagatgagaccaaaacatacttttgaaagtaagttgagttgagttgtattacctacaatattaatttacaattaatattaaatcatactcaaaactaaacctactcacaatggatgatattgtcacaactgaaatcttttttgatggaaattttgatgatggttctactaattggatacccaatcacatctttactcacccaaatttcagttggaaggatgttgatttgggtgacctagatgaattccaattcgtggaaaatcaacaacaacaagatcattccgatgacgctaatgaaataattattcaagatgatggcataggcttagatgatatccctaaggaattcttcgaacctaatcaagaagttgaacatgatcacgagacaaagaagaatagtagttcttcgagtgatcttcaaagaagcatcacaaaagaattattagaaatcaaatcgtctcctatcgaaaatgaacaacaacaagatcaatccaatgaagttagtcagataattattcaagatgatgggataggccttgatgatctcccacaggaattcttcaaacctcatcaagaagttgaacctcctcatgagacaaagacaaatagtagttctttgactgatcttcaaagaagcattataaaagaattattagaaatcatatcgtctcctattgaaaataaacaacaacaagatcaatctaatgaacctgataaaataattattcaagatgatggcataggcctcgatgatctccctgaggaattcttcaaacctaatcaagaagttaaacctaatcatgagataaaggcgagtagtagttcttggagtgatacctcgactactaacaccaacaactaccaaggtttctacacatctcatctagtgcctgaaatgaacaagccttattatttgaacatgagtagtgagagtggtaattgggaccaaagtaatgattacaaccaacaaccctaccaattttgttatacacctcaattagtacctaaacttacttatcctactgattattatttggattatagtagtgagagtggttgggaccaaagtaacaacaagcaagatgcacaaatggtaacgacaacacatacatttcctattctcactcacactcctgcgccggctatagaatatcaacaacaagaaactctttcaactcgcaaacgaaaatcaacctcttcaaaccatggtcgttggactgtaaaagaacacatgtaagtagttatacacctaaaatactatattattgttatttacttctcaaacatgtattatcaaaaactaataatgcttagtgttttatatttgtaggatttttttacaagggatgagtaagtttggttctggtaattggacagaaatatctactttacttggtggtacaagaactccagtccaagtggctagccatgctcaaaaatattttaataaaatggagaaagaaaaacaaattgcagagacaacctctgagaataataagaagaaattaaataagagtataaatgatataagattaagagaagatggaacattttgttttccaaactcatttcaaaactgattgtttgatgaggtactggctctaacctaaattgtccaaatatttttttagtcacatgttacctaaatttgatgaggtgtc

SEQ ID NO: 15511 - DNA, 5271 bp, Cannabis sativa
  modified_base (3340)..(3347): a, c, t, g, unknown or other
  modified_base (3454)..(3472): a, c, t, g, unknown or other
  modified_base (4181)..(4185): a, c, t, g, unknown or other
ttgtatatgctatattacatacactatatatatagtctaacatacattacatatagtttaatatatcttctcaatttgcatccttatctataagaaatgcaaaatacaatatatatatatataaaattataataaattaataatcatataggccatatagatgctacaatatatatagagctaaattccctaaaatattgatcatattccctgggaaaaaagctgcccaaattagaaaattaacttaactaaacaaccggtatttgatggacctaccttatgaatgttttattattttttagatataaaataattcattttggagtgtcaatgtttcttctcaagttctctgcatcttatatagtttaagtttatcatatataatcaaataattaatataatttttttccaactttgcatgcaatcgtgtctgtattattatttttagttatcctttgacgttgtttattctctgcaggttcttctccactgaaactagcaaagattattttattcctttaattagccttaattctttaagttgcctatttggacttattataatatgtggtccaaaattcctaattaaacatactcaaattggatataattgtaaaatttagcgccaatggtttaaagggtttctttttcggttagatgtggactttataattaatcagcttctggtttatttggtttggtgtgtgattacttaatcagaaattaattttagtctaatttttacctaaaaaacaaacaaattaattataaaattagtagggacattgccatataagggttaggacaagagagtgcccacgaaaagattctgaaaacacatggaattgaaatggtgaagtgaaggtcgttgaggggcaaaatagtaaatttgtgggaaagcgcgtggcatacacggtcagaagagttggagtggggtcacgtcgaaacccccaacaatacgacgtggaaaaacgtcacctgaggtttcgggcttttagctcctggtttttaggaagtcctttaatccttttcaaaaccgcttttcaattttaattttaattaattttttttttctttgtaccacgggcttaggaggagtctaaactcacaagtcatctaaatctcacacccaacctataattctaatagttttataattataataattttagtaattaaataaatattactttaatttgattaaaaaaatgtaaatttcgtgttcatatattatttatttatttattttgtttgaaagtaaagattttattaaatcaataaatcaattgttacagaacactaataaaacgaggacagatatctgtctaaactgacactcctaacgaatatgtaataaatttagctagtgcatgaactacaccattcgtagaacgtggaatggcacaatacgaaccaccaccagccgcagccactaaaagagaaacatcattaataatagcatttaacatgacatttttaacagacccattaatccaagaaataacaacaaaggaatcatagtccacccgtagtccactaaaccccatctaaactgccctttgcaaccccaatcgcacggccaagagctctgccacccctactaagaaattcaccaccctcgcctccgcccacgaagcccaaaccacaccaaactcatctctaacaacaccaccaagtccaatgaaccccttccccaccgtgatagccacatccatactgagggagaagcaccccgatggtggcgccacccaacgttctattttgttggagctgcaaccagaaccacaagttaggacacacactcgtttctgattccctatgtattccgctaatgcgttccgagccaatgacaccagaaatgccaactgggattgcgctccaccaaagacgcatgcattacgatcaaaccaaatccaccacaacaccataaccacctcttgaaacaactccaattgtaacacgtcaaaaaacaccaccaacaagtcagcaagagtaccatggacacacgaggaaacctcctcccaaaccatctgtaaccgtggatagaaaaccatggcatgagcagttgtttccggcacaacacctccacaagccaaacaccacggatccataacaattttccgtctaataagattcgtcgcaacaggtaccgcatcatgatataaccgccataagaacactttgacctttggcgagacctccaaattccacatcccattccaccaaccagccaactttgaagaacacccaacatcacttccacgagcgagctgcagagccaactagtaagccgaacttacagtaaaacaatcatcccgatcataatgccatccaagacgatcctctacaacatgagaagataaggtaatactcaaaattaactctacatcatctggtaaaaaaacctgctgcaattttggaagatcccactgacccccatcgccaatcaaagaatccacaaagagatactcattgggctcaggagaaatcgacataaaacgagtaggccttgggagccagggatccctaaacgctcgaatatgcctaccatcaccaaccgaaaatcgcaaccccttctttaaaaggtctttaccccacataaaactagatcagagaaaagtacaccccccaactttcccagccgccaaaagatcagagcgaggaaagtatttatgcttaagaatctgagccggaaaactccccgaattttgcaaaagttgccacacttgcttagaacccaatgcttgactaaacagatgcttgagaaattaggaaaattttaacacatcaaaaatagggtttaaagagtttgttgcacgtgtaattttttttattgggaaattttcaaaattatttatttatttttttatgttttatttatattttacgacctaaattttttagttacaaaaatacactttcaaatttttaaattacaataatacactttgctgtaacaagtaagaaaataactaaaaaaccagaaatcaacctcacgacaactataaattaattataaaaataaactataaaatatttaaaaaactaatctcatgaaaactataagtaaactataaaacaactaaaaaaacgatttattatttttactgaagagatatttttgtaaataaaaaaattcagtaaaaataaaaaaaaaaaaatccgtgttgaagtacttttgtaattttttttcaaatttttggtctattttataatttttattttatttgatatgcgtgtaaaataaatggtttgaacattaatttctatattataaattagggaaattttaacttttttttttttcaaatttacagtttgtgtttctaaagtggttgcnnnnnnnnttgcaataggggtttctgtacgattttttgttacaatttaggttgcaacactagatgcaataggggtttttacgtagaatttcgcaaaaatacaaaaaaaaaaaaannnnnnnnnnnnnnnnnnngtaaaaatgaaaaagcccttataaattattctaaacttttttaaaattttacaatataccttaaataactataactgtgcagaaatgatccaatccaataacaaactgataccgatccaatgtcaactgaacactgaaaattaaatatttatgattggattggattggattaaatgatatttttacaaatctaatattggatcgatcggttcttggatgacatgtaaattcaatgaatccaaccgactgatctaattcaatgatcattcaataccatccaatattaagatggaaaatatatattataaatttataatattgaatatattatattttattacatatataaaaaacattaaaaaaaaataaaaacccttaagagcaagtttaacacagtttttggaaaaactaaaagatgcttctcaaaaaagctatgataataaggtatgtggtaagcagttaaaaaatagtttattgaaaaatttatgaaaaaattacagctaaaagctaaagctagtacaacccaacttttaaaaaaaactatttttattaaaagactataataaattagttttttactaaaaatttattatgtattaaaaaaaataaaaatatttttttaaaaaaattttaaaatatttaaaataaataatatttaaatttctaattttttattttattttaaaaatattttatatttatatttatnnnnntattattaacaaacaatatcaacctaagttttttataaattataatttttttttataactgataaaaatataatttctttttgataaatcagagattatattgcacaaattatttacatcctattagcaccctcaaccgggcctaaacaatctatacacaatcaaactttctatacatttctcttcaatagattgttaaagcaatctctatctatgtctttgatttttttaggtaaaaataaagcaattctcatctttacataccccttaattttcttaatcattctgctggtattaatgacattagcttgccaaaatatatcatttctaagtctccaaatgttgtacaccaagactgttgtagcagcagcaaacacaagctttcgaaactttgtgattttggccttcctgatccatatgatcagctgagggagattagttgttgctgttgtccagttataattttttttttataactgataaaaatataatttaataatattaaaaattatttttattaggtatatataaatttatattatagaaaaaaattaaaaatatatagaaaataaaaatttttatatttcatattttttttatatatatatttgtaatttaagtgatgtttattgaggagtaatgatctgagtacaattattaattgatatatatatatacacatatgtacacattgagtgtctaggatgtgatatggtcacaaatgctattgtttattagtaaatatagatatagatatatagattgatattattattgataaaaatatagggacataattttgtcccgtgatgtacttttacggaatgtattctgtgatgtacgacagctgttagatgggagagttatttgatttgagggctgggattgatctaggggtaattagggttaaaaaatagtaacgtaccttgagacccatctaatgtatcctgagacccatctaatgtaccacggaatatatttcgtgaaagtagtgttggaaaaattctcattacaagagagaatatgaggattacaatcaaaatactcaaaataaaaatagaagtatttcatcaagattacaagaaa

SEQ ID NO: 15512 - DNA, 7023 bp, Cannabis sativa
atgttgaagagagagcatctaaccaaattaactaaagagagagctaaaaaaaagaaagtgatattatatatagtgggaacttggaacccattttttgtggcattgagaagagaagaataacccatatatatttattcttgacttcagaatatgactcattggctttactttgagttaagattccacattctcatattcccaaataaatagaatctcaacctctctctctcttttctttctttcctttttcttttatttaaaaataaacatatcatattatatatattatattatagtttcaaactatatatatacatacatatgttcataccccaccaaaaaaaaatgctttattttcccatcaagctagggaataacattccgtggtcatttctcagtacttatcttatgctattttggccaatgttagctattttcaatggtcaaaaaaattaattaatttaaataaaattaaaataaataatggtcatatatatatattgatgatcttatgattctttttgcatatgaatttggaatttgtcctcctttttagggcctcctcctattgttctccaaactcaatttaattaaacataaaagaattcccataaaaggaaatgcaagtacaaatgaagaacaattttatatcctatatagatgttccctttggaatggtctctatggtataaaatataagcaaggaataatattaatataacaaacagtgtttagatattatatattataatttatacatggttgtgtgtccatgtgtctgtgtatgggtagtgaaaagttatttttatttttaatatatgtatatatttatatattattattccttttgtactgttatatagggtacattaaagctcacaatgaggagcatgttgtgtattgtattggcaacatcagagaaagttaatcaattatatcaatatgcatgcatatcatttatcatttatcatttgaattaccaaatcaaaatcacatttttctcatgtatatataaaaaacatattatataaatatatacatgcacttgtttttaacacgactaatttatgtcaatttaattcgtatatttaaccatatatatatgttgtgtatatgtattagtaagtgtatattgggtataattttttatataagtcttaatttgaagtgttattatacaaatgggaatagtactagagttaggagcttataacaaggcttggaaatagtcttaattattttgttgagaggacacataagctcaccgttcagaaataaatggagctaaaaatattaaagttgttaaatcaagactatcacatggacttggaattattcttcttgatccatatagttccttctttcatgcctgagtggtttagaaatatgtatatgtgtacatacatatatcaaaaagatatagtgtattactatattgtatttaccctcacgtgtagataatgcaaggttacatataaattttaaaatttaaaatactagatgagagcttggtcaaggtgtgccgattgtgaagggaggtattaggagggagttacggtttgattgagtattgcttgtaattaattcaaattttattaaattttaattagggttagtctatcggaggggttggtatggttagtgtggaggtctataaatagagcctagctcatttcatttttcctaagccaacactctcaagaaaatactctatagactttgttgttacttagactgaaaccacctcaaacctttatataaacttttgtcttccttcttttccattcttctatagccaaaatcacttatttctctaagagccaaggtagccatcataattactacgtacaagttttaaacatcaatatcctccggtgatcatcattttcttataaatatatatattctttatcatatcggcatcactactgctattatttaacgttcacattgtgctcatgctagattttatttggaagctaattaaggtaattttataatcttgggtatgtaaactcaaggttaagatttcataaatatatataatatatatactattataatgtgttttaattaataaatataaatttagtctttacgtacaattattggctcgaaaatcactcttgcaatcaagttagatttttcacattcgagataagaaaattaattaaaaaaaataaattttctataggtaataacattcataggaataataaaaaaaagtcaactaagatcgatcttgactttttattatttggtatttaatatactgtataatatatacttaaataacatatttataatattcatgttatttgtatatgtttataggagcatagccattactaaagctatatatttaaataatatatttataagatttatgttattgaagtatgtatgcaaatagtgtgtttataagattcacattatttagttatgattattatgttatttaaataatgtatagtaatttagtattatttaaattaggtagaatttaatttacgtgacgtggtttgaccgaaaaaataatggttgaatacttgactgttgggtatatggtaaatagggggccatttagtagtgggtacgattttactgaatccaacccttcgccatgtagttcaatagtgcgagtttatttatcaacgttggactcgggcataatcatttatatgtgattcaacttaaaaattagttattagtgctcaaattaattttatatattgttatttgtctaaatatatgcatcgaagttttagttgtatttttttatatgactacttgtcacatattttcttactgagtttggttgctctccactatcaaattaccatgtggagaccaagataacaaaaaatctagatggtcggtggcgagtggagctttggatgcttgtgtgtgtattcgttgaaagtcatataacttcgaacggtttaggacgctctgttttatttatttattttattaaaataaatgtcacaattatttttatttattatttatattatgtttttttaatttaagaaaactggcaatagacgttacagtttggtattaggaccacagttatatcaatcctgaacattctctcgaatttcacacatcaattaaaaagattctgctcgctaccaagtaagtctcatattatatgtttgcttttttatgtgtatatgaatttaaataaaatcaacgtttatgtcaaaaaccttagtaccaaatacttgagtttatgtacctttagagatgaaaatattattacttcatattgttattattctaaaaaaattacaactgatcaagatagattaaggagtcctaatggtatttctttttccaaattttatataaatatcattatattaacattttatttattttccatgatttagtgatctacttagttatttatttattttatttagaaataaaataaaaattagttgtgaactagtaatacaaaaacggacatttattttcttaaaaaaagtgataattatatcttatttaacaaggaacattaggaaatcatgcctcaaagaagatcaatttgaatcaatggtaacgaaaataaccacgtggatgcaactctaacaccctcatgggacggaggccaaggtgatggtcgacgtggaggccaaagtggccagagaggtagatatggaccatcggtagcactaataaacgaggtagcactcgaacaacaataaggacctcccaacgcacaagttgaaatactctgagaaaacactcatatacacgagcaactagctaaagaaaatgcaaggctatgagctccaaatgagaaattacgcaggaatcaaaatccacccataggaaacctaactcttcagtcagccacaagaaatttaggaaacagtagccgccaatattcaatggggactcagactcacttgaagctgaggagtggttgtgctcagtggaatccatattggaatatgtggacctcgatgataagggacgagtgtcctgtgctaccaacctacttaaaaaggacgcacagatctggtgggaagtagtaagacaaatgcgtaacatagcaactatgacctagttggactttgtataagtgtttaataggaagtactataatgcttccatagtgactgcaaaggaagacgaatttatgaattgaagtagaacaacctcactgtcatggagtatgtaaggcaattggaccgtttggcaaaattcgcacaagagatcataccaaccgaggccctctgggttaaaaggttcttgaaggggatgaaccctatgattgataaggatgtaaaaatcatggttgggaccaacatggtatatgctgaagtgttggaaaaagctctcaaagttgagttactcaaaaatgatataaagaaggacaatattgcaaagtaagaaggtcgaagaaacaatggaggaaactatgagaataagagaaatcacaataatgatcgtgataaaaaggagaaaacagtggtgcaaaataacaacaatgcgatgaaaaagccctatgtagaattctcaatttgttctacatgcatggtttgattttgggcagtatggttccccttcttttgtccctttgggcagtttttctttggatgtcctagctgcctacaattgtagcacatccctaacttcatcttacactcatcgaggtgtttcttattgcacgtgagcgaattgagaattattaattaagctttttcacattattttctcctttttatcacgatcattattgtaatttctcttatattttctcttattctcttggttttctccattatttctttgggcttcccaccttgcaacattgtccttctttatatcatttttgagcaactcaacccgagagctttttccaaaacctcagcatacaccgtgttggtcccaaaccatgattttcacatcttttttaatcatggtgttcatctccgtcaagaatattttgactcagagggtctcggttggtacgatctcttgtgtgaactttgccaaacggtcaaattgccttgcatactccatgacagtgaggttgttctactttagatttataaactcatcttcctatgcagctagtatggcgacactatagtacttcctattgaatacttccacaaaatttaactaggtcatagttgttatgttgcggctctatattactacttcccaccagatccgtgcatcatttttaaataggctggcagcacaggacactcattccctatcattgaggtccatatattccaatatggactccactgagcgcaaccactccttagcttcaagtgagttcgagtccccattgaatattggcggttgttatttcctgaatcgctcgtacacaggttcaaaacgttgtattggttctggattcaatgtggttggctgaagagctaggtttcctacgggttgattttgattccagcgtaattcctcattatgagctcatagccttgcattttcttgagctagttgcttgcgtatatgcgcgttttcttggagtatttcagcttgtgcgttgggaggtccttattgttgttcgagtgctacctcctctatcactgctactgatggtccatgtctacctcccttgctactttggcctccacgtggaccatcacctcgaccttcgccccttgcgagtgctggagctacatccacgtggtatttctatagccgttgattcgaactgatcatctttgaggtacaatttcttaatgttccctgttgttttctaagaattttgtaaaagagtataaacttaaataagatgtatttatcactatatttaagaaaataaatgtctatatttacataattatttcacaaataatttttattttatttctaaatagaataaataaataaataaacaagtagatcactaaatcatggaaaataaacaaatttttaatataatgataattatttataaaattattatgactctttaatctatcttgatcagttgtattttttttagactaacaataatacgaactactaataattttttctctataggtatctaaattcgaatattgatactaaggtttttgaagtaaatgttgatctttttatactcaaatacacataaaaataatgcaaacatataatacgagatttacttggtagcaggcagaatctttgcagtcaatgtatataacttgtgagaacgtttaggaccgatataattgtagctttgatactaaactataatgctcgaactttttgtaaaaatactaactttatttatagacgttaaatacgaaaaatcataatactgcctttttattttatacttaaaaatattcataattggcaaatttttgtacaaaagatataataaacaataaaaaaataattgccacatttattttaatagcataaataaataaaacaaagcgtcctagacctctcggagttatatggtcttcaccaaatacacacacaagtatccaaaactccactcgccaccaaccacatagacttttagttacttgcatggtaatttgataaggatgctactaaactcagtaaggaaatgtgtgtcaagtagtcacataaataaaaaaataaatacaactaaaacttagctgtacatatttagacaaatagcaataaataaaattaatcttatcacttactagtttctaagctaaattacacaaaaaatgattatgcttgagttcgattagcaaataaacccgcactattggactacatggtagaggactgggttcagtaaaatcgtacccactactaaatgaccccctatctaccatatagacccaacaataagtattcaactataatgttttcaatcaaaccatgtcacgtaaactatattctacctaatttaaataatgctaaacttatatacattatttaaatagaatacaatcataactaaatcatgtgaatcttataaacacactatttacatacatacttaaataacatgaatcttataaacatattatttaaatatatacctttagcaat

SEQ ID NO: 15513 - DNA, 10372 bp, Cannabis sativa
gagagagagagagggagagttgaatgaatcttacccatgtctgctgatcctcgtgctgctttcatggatgaggatgcttcttcaggtgggtccggagacgactcaagcaaacgtcttcaacccggaggtcgtcggaagagaagtcgcaaagccgctggagatgccattgtcgatgctatgcttcaaatagcttcagcttcgaagatgagagcagctgcaatcatgaagaacaatgaagaagaccctttctcaattaccaaatgcatcaatgttttggatgatgagatgcaaggtcttgatcagaaaatttacttttttgctttggatttatttgaaaataatcccaatgctagagaaactttcatctcacttaaatctgaaaaacgcttcccatggttgcagaaaaagtccattccttcttcttcttcttcttctcttctacctgattaaaatttctcttcttttgctttgctttgtacttaaaaatttgatttttatttctaatgatgacattattattattatgcccctttgcttcatttctctgattttagtattgggttttcttttttagtgtttatttttcttgttattgaaaatgccatggcattgtaatcttacatgatattattatgcccttttgtgattgttttcaacatgttgccactattttttagttgtgtctgttttttcttgtatagctacctttttcacttgccttgatctttgttaaaagtttattacaagtttctaagaagtatcctaactctatgttgttcatagtctttagatggatagagaattagtttagatatccctcatttttttaagaatgtatgattttagatatatgatattaggattattttcaaataaatccaaagtaaaaaggtaaattctctcttgccttgctttgtgctcaacaaattgatttttatttctaatgatgacattattattatttttattactatggcctttttggtctttcttaaagtttattacaagtttgtcatccaattttctagtttgctttctctttagatggatagagaagttgtttagatagatactttcacttatttctttaagagtttatcttttttaggattatgattattttgaagaaaggtgttcatttttgctacaaaacaaaagaaacacatatactgctgattttagtattggagtctttttttagtgtttatttttcctgttatggaaaagccataaccatatatacataccaaagtagtaccaaatcaaacaccaagcaaagcaaatgccctctttgtttatataaatatataatgtcttgtagagaaaataaatcttatttctaacgatgacattacattcttattatgcccttttgcttcatttcatgttttttcaacatattgccactattttctagcagttgtgtcatctttttcttatatagctaccattttcactgaccttgctctttgttaaagcttattacaagtttctcgtccgatttttcaggagtattcttaatctatgttgttcgtggattagtgtgcatgctctttagatggatagagtacttgtttagataaatgttggatagagaacttgtttagatagatgctatccctcatttttccaagaatgtatcttttgacaatgtatgatattatgattattttcaatgaagttgtttattgctacaaaagaaagcatatactgctgattttagtattggtttttttctttagtgtttattttttcttgttataccaagtagtacaaaaccaaacaccaagcaaagcaaatgccatcattgtctgtataaataaataaaggcattgcaatcttgtagagtacataaatcttatttgtgcagatatgtcagagaaaagcaaggatgattttgacttagaattggatgagatggaattgattgcagcagctgcaggctactattactataacaccttaacaactcaaccttgtcctagtttatcaccaacccgaggctgtggattcatgactgaagttctaaatggtcctgaagatctttgtagggagatgtttcgaatggacaaacatgtctttcaaaacctctgcaacgttcttcgccaaaaatccatgttaagagacactgctggtgttatgattgaggaacagctaggaattttcttgaacattataggccataatgagcgcaaccgagttattcaagagcggtttcaacactcaggcgaaactataagtcgtcattttaacaatgtattaaaggcagtcaaatcactgtcccgggaggttttacaaccaccaccagtcaacactccttcagaaattattgttaacaatagatttttcccttatttccaggttttgattctatcagtttggttcatatcttatgttgctgttgtatagtaagtcatctttgagtcaagctttatcttacacaggattgcattggagttattgatggaatgcacatccctgccaatgtcccagccaaggatcaatcccgatttcgcaacagaaaaggttttctttctcagaatgtattggctgcatgcacatttgatctgcagttcatcttcatttatcctggttgggaaggctcagctgctgacgcccgtgtattgagggccgttcttgatgatcccgaccaaaactttcctcaagttccacaaggtttaagcatattataacacaccactttatctgctttgattactttagaacataatatattttgcacaaaagtgaggttaaaagacagttatttacatgtatttaggcaaatattacctggttgacatgggatactcaaacatggaaggcttcatcgccccatacgagggagtccggtgtcaccttcatgaattcagaggtgctaatcagttgcctagaaatgcaaaggagctattcaatcacagacattcatgtctgaggaatgccattcacaagtcatttcatgtgttgaagactcggtttccaattctcaaactcgccccacaatacgcctttcacattcaacgggacatagttatagctgcttgtgctttacacaacttcatccgccgagaggaacaggataaggattggttgttctccagtgtggaaggtataaaagttgatgtgatgcctgatattcttgatgaacaggctgaaattcaattggtttcttcgatacaagaacaagtcgcattctcagtaagagattcaattgctgcagctatgtgggaggactacattaataattgggatgaatggtgatccaatccaatgcctctttcaccattttcactttgtagctttccaatttgttttgttctgaagaagagactaaacgaaaatcaataggaggggttttggcttttgttagaaacaaatattttaactttgattcatttacaaatgattcagaattcagatcatggggtctttttttcttttgtcaaaattcacttggttggaaatcttacaatatttgatttgctctttatacatttttgacaaccatcttcttcatcgatgtttgaggtgttagaataacatttagcttaaatttatagaaaatgaacttgcatacaacaattacatcaaattctaaataaataattaataaataaaaagaagggggtgttttattctatccgtacatcaaatcttagtgggtacaagaaattacatcaaggaaaagagtagatatggatatggtgaagaaagctaattcatagaaagaaaatgcacccgagcaagtgtgtattcctttccggcaatccaaacaccagtttgcgaccactgaacgtcttcccagtcgagattctcctccaatacctgaaacaccatagccacaccgtacagtgtgtcatttcattttcattcgatgaacaacgttacaaacgcaaaatgtatagctacgaacaatgtatttatacctccacatattcgaggggcagtggaatcccgactgaacgcattactttctgtggaagaggcttcttacatcgagaccatcggaatgtatcaatgacaatgttttcaacatcatttctttcaccatttgcagaatgtgaatggtgattatgggacttctctgaatcgggttcatgtgactgagatgactgcgttgctctcaccatcttctctccagtgaaacatagctcatacctaaatacaacacatagtaaagaggataagaaactaactgttcctgttcttacatgattttaactcatgtggggataagaattattacctgcgtgaatgtgtctccaagtacaatacttctcccttcttcaaacgcgcagatgtataaagtggttttttcagacccttgtctgcaactatgcttatactgtacttgatcctacagaaacaaaatgcatcgtttcggattagatataattggaattggaatccttggtgagatgagttgacttatgtgttatgacttcacatatagtcaaacatagattcttatatacagtacagataatcaaaacgagactggcttaccaaggctcattgcagaggttgtattgtattgtaacttctcgcacaaatctctgttgtcgcaatgcattctaaagaatgaaatattgtgagccaataaatacagaaaaatataggtgattgagcgtgtatgacaaggtaaaactcacacagcacaaatatttgcaaaataatcgcagataacaaaatttcgctctatactgaattaaaatgagaagaccctaacttatttgtatatggcctcatattatatacattgttcagaccctgctaatctactgtagcaaaaacaaatgaagatacagctaatccacccaactccacaacttttcagaaacatgcagaaataatccttaaggctgagattaagaaacagattagactgttggttagttgagtggtaggattagtcagttagaattccattgagctattgtaatcagagtgagaaacaaaagacaaggcaaagaagaatttatggaaagacagacatgtttcagcatatataaaacccaaaattgagtataagatgtcaagtaataccgaagctgcagcccttgtagtcatcgtccgctctacagccacgggagcaagggtcggctccacagtagatgtatgtgtaagacaaggctcaagatcaatggttccaccacctttctgaaaagtttaaaggtaagaagatacatcaagattataacccagcggtaccatgaaaaatctgtaatcagtaatttaagcatcttttagagtgttagaaagaacccatgataaatggaacaaaatatataaaaatctcagcaatcactaacttgtcaaaagacataaataaataaaaaaactgactatcaacttttagcaccttcacaatgcaacacctttcaacacggtagctacaaccaattgctgctccccacgcacgagaacgaacgttgtttctcagggtagatacataacctaataagtgctagaattagagtaaacaaagagtgtatacacaagtatgtaaccaaaatggcaatagcataaagtggaaagaagaaaaaaggtgtttagtaactacaaaatgcaatttttcatcctacaattccccaagcatgtgcatgatgatgaccataaactattggatagacaaaagaaagaattctgttaaatctattaattggagcttccttgttaagtgattataattgtgagtgaaagaccccagattataatgtgtgtaataccacatataccaccctatactaatggacaagaaaacaaaaggtttgaaacacaaaacaaaagaatagaagtaggtggaaacaaaccaaatagaagctaaagtagcaaaaatgaaaaatataagtaatgagaagttaatgtgcataaaaatcaagtacagatgaatcctacttacaatcttgaggaggtagcaccctgatagtggcacgcaactcctgtatagcagaaggcggaggagaagctgtggggcggcagtaaccagtatgcatgagaactgtaatgcgtaattgtgatattagtactagacagttttctcataccaccagggtcttagacaacattaatataaaattaatttcaattatcacactgacataccggccacaagatctgagtcatctgtgtatatgtccgtcccccaaagctggccccctctaacctgcacataatggcatttttaaaaaaatcatatatagataaccaaaatttgcaacatcagtagaaaaattcctcatcacaaagcagatcatacttggcgatttgtggcagtaacatgctcagctggtatccgtatttcaagtgtaggtccactacttgaactttccccattcttttcagtttgtgatgcttcatactccttccacaaccttatcaattcttgcatacattcaccgactttatagaccacggaggaaacctcggtttttcctgtaactgcaagcaacttaagagacatgtaaagaaaactaacacctaaaacacaaaatgtgatagaattaggtgtccaagtatgcaaatttataaaagccaatgtcgtatttgcaatacctcatcaggtataagtataacctcacagtagaaatcagcttttactaggagtcaacaaccagattctaatatcatcacaatcctaaaagcctaaaactgatttgaaaattggtgataattaatgatgatcgaaaatttaatatttttattaaattttggacgccactgagtatatttctaagtacaagttgtgttcagatttacccattttcaccgtctacaatcagccttcagaatctgaagtctagtacctctaaagaactaaccatgttatttattcactatataacctttgcatttccaaaaacatacacacagacattgcagaggtaaatcagggatttcaccagggcatcacttcctctgaaattatggcaaacttaaaaagctccacataatgtaaatgattatgacaactcaccttgagatctgccaccaaagaaaacaatgaaaaagagaacatcaaaaacaagtaccaaaaaaaaaggaagaaaagctgtacaataaacagcataaagatatatacttttgatttcgtttaacctttgaaaaagaaacaatgtaccaaagcttctatttcctggtccaccttatcataacctttatccatatccagttcttttcaataaaaaaaaaagagtctaatccccaatatccctgatataaatgcagtgataactatgcaattataatgtgttcttgatgttgtattccaaatcgaatgcttatgaactatttttcacaaatagcagcaataccatttatgtttccttaaagacaagaagctataaggaacaagcatgatatagaaaccagactacgaggctatatcttaactaaaaattgataggtttaagtatgcttagcagaaaatcctgtagtctatttcccattccagtaaacaaataaaacttaatcagtgaactaatcacatgtgcaaatgaaaaaataaataaaatatggaaaaggaaagaaagtaccacatacccttcatgatcttgagtacgattcctaaaacggggctcacggtttgtcacttgagggctaacccgagaccgttgcattcttttacgctgttgcactccataattattataaacttctctttcccgttcaacagtcccttcagcatctgcacatccatcatctgattctttttcaaatatcctgctgcgtttttcaggtctgtctccatctccatcaccatctcgttctttctttctgtctctagattctttttctgcagttttccagctctcagattctttatgtttcttttctgacaataaattatccggctctggcagtcggttggatcctccatccccgacatctttgtcattactctctttgtctgctccaggccacaagtctctcttaatagggtccttttccctttcttttactctttccttatctttggtagggtccttcctctcccacttctctgcatatctttcctcctttgccaagtcttttacatcattactcgtattagctacttgcatagtactcctacgatcaatcctttccctctctttatccccccaatcccggtacttgacattcatatccttccttttcctatccttatccttcaatttgtcatcaaatttgttctctccaacagcctcatggggttctacatgatccttctcctcggcagtggaaaaatcctttccaaactcagagggatccgtatccgcaagtgagtggggatcagaaaatctttttcctacgtagccgcgaaacacccctgaatctttccgattcaagtgaactgcagagacagaataagcatccttgtctgtctttgcttcactcttaacatcctccctatcatgtttcatctctttactctcatgccttaaatccttggggtcaagcttgcccctttctctctccctgtcctcagagggcagataaggattaggaatgggagtaggagtgggagtgggagcagcaggagtgggagtaggattgagactggaaatggtaatggggtttgggttaggattgggtttaggactgagactagaaccaagactgggatttggatttggattgggatttggattgggattgggattgggattggggttggggttggggttgtctacatgggcttgagtttcagataaatatcgaaaaagggcagaaggtctcctctcaagatctcgaggatgagtatgaggtctaatattgagagggatttcataggtagtgggatgatgatatgcagtaacagtggaagaatcttcatgggaatatttagtattattagtattagcagtaacagtcgaagtttcttcgtgagatcttttaggtgcgccgctcatactatataatctttttattgtaaaaacaacaataaatgaataaaaatgttccaaaaattccaaaacagagcatgcatttgatgttgctcacaaccaaaccctaaacaaacaacaaaaatgcattcgtattcataatcatcgtaatcatattcaaattcaaattcatattcatacagttacagctcatcctaattaaaacaagaaaaaccctaaagaaaaatgcatagaaagaaagagagaaagaaggttactttagttgcagaacaaagaaactggaatttgatgatgatgatgatgattatgtttgcagaatcaaaatcaaaatcaaaatcaaatgtataaatctctgatttggtgaattgaattgagtttgttgtttttggttacacactcagtctctctctctctctctctaatcttttatatgacttgtctaattctttccttaaaaactaaaataagagttttttttttttttatatttatatcctaaaaagaaaaaagaaaaaaagcaaagcccaacaaaggcccattatggacattcctttccttaaacagacaacaaaaatataatctaatctcttccaatatactacactagtttaaccttttaacttttaagggtatgccagtgtcttttttctataaagggataattgggacaaatattactcattttgtaatactaaaaaaacatattagggttctacatggattagctcgctatgtttttcgagtgaatagagaactagtatagtttaatgaaatttttcttttattggagtttcttaatacttagagtttctaagttattcatggtacaaaaaaaaaatgttagaatattaaataaattaaaaattcaagacaaaaatataatgatttgcagattttaaatgtatttagggtaataattagtttttacaagcataatgtaattatgtagtaatttaattttatgcagtttcttttatatatttcataaatatgaattttagttttatttaaaagatcatctgaattatttaataataaaaaatatgcgagaaatgagaacattaaatgctaatttttcattccatgtttattattaaatactaagttaaatcatgatacatgagtcgctataataaaattgtaagctataagttgttgatagttaatatcaatgataaagatttcgaacaagtttccttaaccaaaaatccacatacagaaatttagttaagactaataattaaaaatcgaaattctacttagtaaaaaccaataataaaggctaaagatactgattaaaaaccgaaatttcacgtagaaaaagaaaaaaattaagtatacttaatagtaatatatacatgaatataaagaaaattataatgagcaaagttcaattttaactattggaacttaccttttgttaaaaatggtagatatattattgcaacctgttgagaattatgggattctatctcaaaaccaat

SEQ ID NO: 15514 - DNA, 7376 bp, Cannabis sativa
  modified_base (4993)..(4993): a, c, t, g, unknown or other
  modified_base (5314)..(5327): a, c, t, g, unknown or other
tgatgaataaaagaggcatttttcaacttaccccaaaaaacaatccttaacaaaagaaaagctcatttcactttatacgttaatttcttctcatatataataattaccaagacaaagacatacaataataacaaatgtatatataattttaaacatcatattgtattggcataactcttttttcttatccttatatatagtacccacaagagtaagaatataattttttttcttaatgtaaatattttgtaaaatagttatttatttttataattctctacaaatacatgttattaatttttgtagagaattataaagaaaatggtattttacaaaattataatgtattaacggtgcaagtagaattgtacaagtgggttcggtgggccttctcattgggcctccgaagtattaacaaacaatgggcctggtgatggtattttgggtgaataagccttggaatgactttaaaggaggaactaagcttcattctaatcaacaatggcatgccatggctagactccaacatgtcttccatgtctcttccagccccatacaatggcttgttctttgttccaatgtacaatggaaaacttgtccaaccagtctccgcatacatcttcgggccctgtttaataattataaattagggttagggtttcatttctgaaagaacagttcgatcaataatcagactgattagatgattataggatcgtaaatattattttctaaaaagaatgtatgtaacgaaatttgtgttttcggatgagcttaattaattaattattacatgagctaacgcgaacgtgaggcgctcgaacgacatgtcgatcattggaggatgaatatggaggccaaagagtctagacttgttgtctatgatgagatttagggaacaattgcaagtgaggatcttagttgtaactcctgagctatccactccttcgccaagcccaaatactccaactcttcctatctgcacaaataataataataataatttgcataaatttttagaagagaattacttcatatactattttttaattttttttaaagttaacgggttggattgctccagtggtttttcagtaatttctatgtgggttgctatacggattttgattacgatttaggtttgctccgtaagttgttattttctgtgtagaattccataaaaataaaataaaaaaaaaaacctctttttttatatataaaaaaattagcatggttgaataattatttatttatttgtgaagtatatatataagagtttaatattagttactaacaaaattacaaaactcaacattaattttggcatattatataacttatttatagtgatttcaaaactttttgaaagaagcttgtttatatgtaccatttgattatagacacaaaataagacatttaaagaggatatcttaattaagttatatatttattataatttggtccatattattacatactaaaagttattcatgaactgttctcattatgcagtttattttgtcactttagtcacttatgtgataactttggagcaatctcatgatacattaaaataataataataaagttatcgaactaatcctgcaacttcacacatagttaaaagaacattgctattaggcaccagtggtgcctagcaccttctcgacatgtcacgttgtgattgattagcgatattccttaaatatattaaactatgtgggacccaatacttagttggatcaatagctagcgatactgacagataagaaagtattaagcaccacaggtaccctctagcatttctctagttaaaatggtccttattattgtgatggatattatacattaaaatacaatagtaaccacttttgaataaagtattatgttgtcataataagctttttcctttagtgtaagactataatcatcagtaacaattattatatatatatataaatgttatgtatagatataattataaggttgtgtgtgtaataagtacctgaatagaaagcttaggtggaggtggtcttgaagcaatatagaaaacaagcaaagcaacacacaaactaaccaaaaatctccaacttatctgaatacaaatccaacaacttgaatctgaatccctataagaacaatacctcttccaccaccctcttttctcaccataataatattcataatcatcgtcttcatcttcactcccacaatgatgatcaccatcaagagtagtattactgatgatgagacgacgattctcatcaacactattactatacttctgatggtgatgatcaatgctcgcagcagtttcatgactgcgagcatcataagaaatctttttgtggtgaccgttggatgaggaaaagtagtcctgatcagcggtgctacttagggttgtgttgttgcgaaggaggccgtctgttgcgctattagcgtgggagacggtggaagggctttggacgtagtatgcgcatggataggacgatattgtagtagtggagtgatgaaaccctactactacttcttcatgatcatgatcatgatcttgatcatgatggtggtgatgatcatgaccgtacattctctccatgcatacacccaacaatgagagaaatattaagaaagaagagaagagtgagaatttgattttattatgaagagaaagaataggactttggagggtttatatatgaataataaagtatgtaaataaaaaaaaataaaaaataaaagagtattgtgtcattatttggttttgttttgtggagagtggggttgggaatatatattatttatgacttctcttttaggttatggccaatagcattatatatcaatataatgaaatgttaaagggcaccagtggtatctagcaccctcttatgtgtcaatatcgctatggtccaactaagtatcgagtcatatataatttaatataatagcttttaagaagtatcgctagccaatcacaatgcgacatgtcaagaaagtgctaaacactactggtacctaataacaatgctctatatattattgtaaattataggtatatataattattgagcggatatacattatataaggtgaaaatagtatataagatcaaatattgtactaaatatcacttatagccatgataataattggtatgttatttttgtttttactaaacattcgattacatttgcaaatgaaaaaaattaatttttagggtatttagaatttttgtcttgaattatgatttatgttttattgtgcccctgaatgtttattaaaaatcatccttgaactattcatagtgctttaaattagtctttctgacaaatttcgtcacacgcggcaaataaaatgataatataactaattagccagctgtcacatcagtatcatgtcaacaccatatgtttaattaatttgaaaaaaaataattcttttaatttaattttacctaatttttttaatcattaatttattattagattaatattttttaaaaaaaatgcatttttttttaatgttacgtggtgctgatgtggcaattaattggataagcagtcgtgtcattattttatttattacgtgtgataattatacttgacattaagactaatttacaatattgtgaatagtttagaatttatttataacgagctggaaagttcgaagtgacaatatatgacgatctataaattatagttattttgtctgttttgaaacaatattcaaaaaaattatgataccgcaagaattgaattcaaaacagtcaattgcgtaataaaaaaattatgcatgtgtgcaaattgataaatgattaaattttatttagcatttataaattatttaaaatttaaaaaaaataataataaatactataactataatatatataatatcgatcgttgtatataatttttcttgagatatacacacgtagtacttcttttctttgtagtaaagattgatataagatatatgatgattattattcatgatgtgtatgcgtgtgtatatatatatataagtacattatccacaaaattgtattatatatatacatatataggtgaccatgatttcaacattatgtttttagacgaactacatgatcaatatatataaacatgttcatacggtatatatatatatataattatatatatatttgttcatcaattttgcacaaaaaaatccaataatatatattaataagaatcttttattgtgcatatattctatatatagataatctcatttatttgggtatgcaggttggattatatatatattgtaaaatcgtattaaaaacacgttacagtaggtgctttgaactctttcattttaaaattttttaaaatttattatttatgctctatatttatagaatattattcattgttctaaatatattttattaattgttttgagttttaataattttttttgtatgggatatatgagtataataatattatatatttgaaatgagtaaaatataataaaatttttaaaaagtgaggttttggtgatgcatattttaaagaaattggtatatgatgtaatgtaaaagtctactataaaatagagaaagtataatttcggtgacgaattttaaagatagagtagagaaactgttgggattgctctaaacatactacattccttttaaagtaatttgtggcataaatagttaagtttaatttctggttgtaaataaatgcctaagtttaattttttgcggtaataatacctaagttatattttttgaactctgtaggtaactgaccgttaaatgtcaagtcattatccacgtgttattttcttattagtatatttaaactaatttttttaagaaaataaataaaaaaatttaatgacttggatcaattaaaaattgtcacgtgatgatttacttaacacttaaccgtcaggtagctacagaagttctagaattatataacttatgtattattaccgctaaaaattaaanttaaatatttatttataactgaaagttaaacttaagtatttatgtcataaattactcttttattataaaaaactgttatcttttgtgacaactttttagtcacaatatagttttttggtgactaaatgtaactttttgtcacaacaaaatgttatcggtgactaaaatatagtatttaaatacaagttgtcactattttagttttagttacaacaagtaatattgtgattaaaaatacatttagttataataaattgtaatttttgtgactaatctctttaactacggattttttagtcacaacataaaaataataatttnnnnnnnnnnnnnnttttttcacttttaatcacaaattatgttgtaactaaaaataagattttttatagtatttatactattaatgtatatataaatatatttatataaaatactatatatacaagctatagataggtagataattagatccaaatgtaatattcctagaattatgggaaaagctttgttttttttttttttgtttagtccttaattttttgctttacaccgaatgtctctttgtttaacatcataacaaaagtaagcacgctttgtctaataattccatttgtttccccataaaacacaatataagatctcatcaataatattaatatatataaatattatattatatatatatatgacccacatcatcaacactatgatctcaacatcacatgtgtactctctatactttttttttttctaattaattaacaaaactttgtaaaaagaaatttgacttaagcctagcttggtggtatctctatattactattagttgactaaattaaatgatataaatcttattatttaatttaattgttcaattagaagattttcagtgaagtgttataaatataatgtatattattttttagctagcttatgcttataaaatttaactccaataataataatacataatgtggtctaataaatttcacataagttaaaagttttattaaatttagtacaaaaatagtatgaactaaaaataatttcacaccataataaatattattttttttatttactattttaatgtaaaataatctttttatattttagctatatatttaataatatttttatataatttcaatgaaaaaaattaatatttttgttaatttttttacaatttcctattaagaaaaataccctataatgcgttgaaatacaattacaaaattcaagtcaaatataacattaaatattcattttcttagccaaatttagtatgtaattcgttgaagatggtcttaatatactaattaattcatttattgattaattgaattttcactcaattaattaattaagattaattagaaactaacataattaataagagctcttgaagttgtgaggttcaagagcctttctctccttgcttttttcatttttaatgtttaaaaaataaataattctataactacatttataaaattataattattagggatatctttaaatacaattcaaaaaattaaaaggttggccttgatactcattaatgttaagtgttaagatttgtgaatacataatggaatgtctttaattatacaattaatacttataatgggagaaaagaagaagtgtcataaaagaaagataaaaaaaaactaataataggtataattagcatttagcactaaattattgtaaatgaatggaataaaattattataattaattaatattttgctttcttttgaagggaaaacaatggattgaattacaaggatgggcaatgtatttatacatgatctatatatttgtgtactcatgatgattatgaattgtaaaggtaatagtagtgaatatagttatgataatgggatgaataatgaatatagtacacatatatataataatttgacttttgcttttatatacctagacattatgaattgcacttatataaatacccaaacatatataatcatcacaaaaatattccctttgttgctcactacactatagatctcatcatttatttattttatgatgatctgatttttttcatcacatgttaaccaattaattaattaattagtcttgtgatcagatgatcaacctttgttaattaaattaattaagcacatccttattgcaagttctccaataattatattagaaaggatacatggaattatttgtataatttgagtgaattttcgtaacaaaaaaagttctacaatggtggggaacaaaatccaatctattctttcaaaaaaatagtatcacatcactttgtaatgtatatatagtatttgggtatacacactacaacattaaggaccaatagcggcgggcccctcggccgctattggtc

SEQ ID NO: 15515 - DNA, 9034 bp, Cannabis sativa
attacttctgtcccattaattcaactgacttaggtgaatgatgtgcagcttgcagtgaacataaaaacacctaacaactaattaaacgtgcattgtctgcccttgatattattcatcaaaaggaaaaatagtaccttgtcacgaatgcgcatactcattgctggaatattagatataaagactgtgtgatagttttcagctactgcaatataatctgctgcacctacctgaagtcaatcaagtaacagaaagcatattaacagaagagcaagcttccaataaacatgcagaatatcagtagaaaaaagaagtgattttaagcagaataaaatatttactttcaaactgaaaaccttttgtggcctttagagacttatttttctatttaaagtctactttcttctttagatttcaattatacacggtgcttaacttcttttctgttttctcactttcttaaagataaacaagttgaagtcatatgttatcagcaagttttatataaggaacaacaaaatcagaatatcagtgccttgattatacatttgcacaataaaaagactgaaatttcagggacctccttcggatagacaattaatcaccaaagacatgattgaacaaaaaacataaaaattcacagcctagttatatacaggaaagaacaataccggctggccacataaatactcaaacgtaaatctcgcgactccattgcagctttctggaacctcaagcattctgacttaagaaacaagtgttattaaaatgaatggtagagattctgctgaaaatgataatattaaattcttaatgcaccttccaaacattactggaatagtaacagagccaatctggcctcctacatggtctgtgttctcatgccacatcttttcaaaattcttcagagccatgctatccagaggccaaaagtagtgagcctgaacatataagtaaaattcaaaccataattagaatcccacatttctaaaataaatataattatctgttcttgattcataactgaaaaactgatgcacgatcgatgcattatgttaaatatttggggaaataccatgaatcacagtcaggctgatagaacttgctagtgcaatgaaagaatctcctatactcaaagccaagcttcatatttaaaactagttagtaacaatacagtggctggcttattcaagttagccaaagtccacaaagtctaaaaatgactgcagaatctggttacactcattttatacttcactaacagccacacaacaccccttctataactaacaattgttattatttctttaaactcctcagacaagtggatatgtaggatgcctatcgatgacacattcaactgatcgggcaaatgatcataaatcattcaaaggacaatcacaaataattaaacttcacacttaaattagtcattgggatctttgaacacgaccatgatagcatgtggtatttaatcatacatttatatcaagacaataactggaacagcataaccctcacctggtctatagatctttgacctatgagacggcgataatcaatatcacttccaatgagagcaatctcacagtgcccatacaattttttaagaaatttaagaaaaatctcccgctgcataccatcctgcatgagcatttttccagagcaatgttaaaattcagagtaaaaacattctttgaatgtgctagagagcatccttactatcaatacaataataaataataagtaaattttatagcttaaataaaatgcttgcagacagatcagtttatgtatggagaattttatttgcaaccccaaaaacttataagtgtacactatttcaataatttttattatacataaaatatatatctttaattatatttttttaaattttttttccaactcatatttttaacaaatatacctgtcaaacaaaaataaattataatttaaatattataacaaaaaataaaataaaaaaaagttgtacatgatttacaaaaaatatgaaattaaaattaaaattaaaataagtgttgaaattaacacaaaataatgtgagaaaaattcttaaaaaatattaaaagagaattttaaaattatttaagcttaatttttttaaatattggactgtacttatcattttgaggggtgcaaatggaactttccttatttattcactaattcaaaagaattccttggtaacttaggaatgatgtttatttttatcagatgcaacaacatttctttgattttgaagagaattttagtcctatcattaagcctacaactattagagttatcctcactgttgccgtcacaaaccagtggattattcaccaactagattcaataatgtctttctaaatggcatttaaaagaggaggtttatatggtgcagctccctggttttgaagactcctctcaaccaaagtttgtttgatagttgcagtaaggcattgtatgttaaggtccacattactacctttcggttttcataatgcaaagtcagagcgcagtcgtttattcgagccactcaacaacacacaacatacattctagtgtgtatgttgatgacatcatgtccactggtagctctcctactgaagtttctggtctgatcaagagcttgaattctttaattttctctcaaagatcttggttcactccattatttcttgggaattcaaataataccaactgccattcgtatcctgctcaaccaaaagaagtacatcacagacatactttagagatcacaaatgcatcttgcaaatgagctgccaacacctaagataggagggaaagctttctgctcatggcagtgaccctatccaaaatccacacctatacaggagcttagtaggtgcattacagtatgttaccatcacacgaccagtgattgcttatgctgtcaataaagttagtcaattcatgcaaaatcccttggagtcacactggaaaacagctaaaaggttacttagatatctaaagggtacaattgattatgggcttcatttgaagagagcttcaaacttagatttgacaggatattgtgatgctaattgggcttcaaaccctgatgataggcaatccacttctggtctgtgtgtgtttcttggtccaaacttggtctcatggaaaattggcaatccaagaagccgcaaatagtttctcgatcgaataccgaggcagggtactgaagtcttgctcacttagctgctgaactcacttggcttcagtcccttccttcagtcattcgtgtagctcaatatcgacctcctatagcacagttcacatgtctgccgatcctgtgttgcatgcccgaaccaaacacatagagaatgatctctattttgtgagagagaaggtcatctccaagcagctcattgtgaagcatatgccatcttgtgatcaagtgcagatatccaaacaaaggcattttcttgctccagattctcccttcttcaatccaaacttagagtagaagattcttccaccctaagtttgagggaagatgttaggaagtagttagagttagagttagtttagcactgatttgttagttaatccagctgtatttgagcttcctgaacaattaatattataactaatctactaactaatgtaacttataaatactactctgtaactattttctcaatcaatgaaatacaattcatcacaatcatctttctcaacactgacctgattcaagtcctttggtgcacgattactagttgccacaagaacagttcctgtacttagtaatctgcctagaatcccagacaatgccacaatagcaaatacatcaacagtctgaaaggaaagcacgacaaattaaagtcaaaaatagaatgtgaatgccgtaaactgagattgtagaatcatgtgcacatgaagaaaaatacaggcaaacaacttggaaccaaagataaaacttaatatgaaactccacctaataaagctgcatctatgctagcttatataggaaacgtttagccttacctgaatttcatcaaagcagagaatgctagctcctctaagatcaacctgctgactaatgaaaagcttatctgctacatctggaagaatgtttttcatctgaacatcctgtttgtacctttcttctgcagccaaccactcctttacttttgaatcaaagggaaggtttctaatccaattagaaacatttgactgtaatgaatctccctccacttggttcttccatatcttatgcatctgctcattaattttcagcatagcctgcagatagagatagttacacataattttctttgtgtgtatgttttatattttctggaaactgcagctaaactttaaaccatataaacaaagaatagtttccataaccaactttcagtatgcatatacgagattgataaggaacataagtggacaacaaaaaaatgaatacttattatgtgtactgcaaacttgaaatgccacattgatagaccacataatacttcatgtacatgaggcataaaaacaaaggatagagtagagagaatgagtcacaaaaacaagatagacaagcgagcataactcagtacatctaggtaagtcagctttgggtggggtatttttgtgagagactttctgttagccaccttgctttccatgcaggtgcttttttctgtttgtgctgtaattttatattttcaaaagaggagaaaaggattaaaagggatgggcatgagaatgatatccaacaacttttctaagcagtggagcatctttgctcaaggggttagctagcagatctttcgaatatctatcattgtacttgggtagttctagagccttgggctatcatcaatataaactgatttttgttttttgcatatcacttgttcctacgacagcttacctcattaaagtgatatcttcgtctatgtttaacaattccttgagtggcattataaaacatatccataagcatggtctttcctgatacacccataagttaatttcgttagtgactatatgagtagcttcaatgaatatgatgagctaaaagggtgaccctaatgcagtccagtgtgatttgaacattcaaaggtctattagtacaatatataattgatgagggattaagtattgattctagaaagtttcaattaagaaaataccacttccgacattgccccatatatatagtccttttggagccggaggagcagttggacgagagccaacaagcgaatccaacttcctctctcgattcaggtatgaaacccatttgcccactcctggttctacattatcaggtttcctcctgagtaaagcaaaattccattgattaaattaaaaaggagaaaaacattttgtgcaaaacactgaacgagacacatactgagacaggagccataaccatctcacatcagacacgaaaataaaatttaacagaacacaaggcataaaagctatagctagtatcactactgaaccagatataataaataacgaaattaagttgaagaatgcaaactttttgatatcatgagaaaccttgattgtgtccacttagttagagaacacgtcctatttcatataaactactggtcataattgggatgatagttgttacctaaacatccatctcccaaaaagtctactttggtgcctggttactgatgtccatgagtcctgctgcttaagttcagcttcctccattaaaatcctgcgtcgctcattctccctgctatcctcccactttgctagtttctcctgaaaatacagaagaaaaaaaaaaacacaaaaacttacataataagacaaagcgagtgaggctttacgcattgttgtaacataaagaaggtagaattgtacatgatattcctccatttctctttcataccgctccaatctcccaagcaaattctccaattccaaagcaactctttcctgattcggatcatgttgtagcttcccttgttcaaccagactcctatattgcgaaagcggccctggtcgagaaaatccgtatcataatctcagagagaaaatttaaataattttcttgtgtgtatatacacatacagagaaagaaataagaacctgaagagcttgattgagaaagatggagtggctgacaatatgagcgaagcgcaatgacgggagaataatgagattttgggcttcgaacaagccctagagatcgaaaccctgagattgaaaaaactcttctcattgtttctatacgtaagcttgatcacgtttttggagctttcaggtttcagagtcactcaaaaaatgaaaaagaagtttcagaaatcagaattccgaaaagtcttttatacatattctgaggttgaagataagtgacgtggctataaattgaccatccacgtggcaaaagtgaatcgtattttgtttttttggtagttaaaacgaccagttaactagctcccacgttttccatttttatttttctaaaataaaaaaatatatacaataacaattctccaagaaaatcacagacactgaaaatggccttaagtggttagaaacttctaaagattcaacagacatttctgtgaaattatttttcgttaaatgcaattccaaaatgttaagagtagagttgtccgtacagttaccgagtcaatcgtcggtgccgatgccggtagcaagagatcggcggaacagagttgcttatcgctgatcgaagcctgtaacagtcttcctagattttctcaactccttgctcgaataatcaagttgggtttgcgaaacaacccactggttctcactaagttcgccgccgtgtcttcggaacttggtgtaattgactatgcttcttccttcgtgttctccatggatgccgattcaagtctctacgacgctttccttttcaatacgttcattagagcttatgctcatactagcaatctaaaggagaaagctttgtttgtttacaattctatgcttggatatggaattttgcctaataaatttacgtacccttttgttctcaaggcgtgtgcgggtcttggaaacttgggtttaggaaaagcggttcatgggtcaacggtaaagtttggatttgacaacgacgttcatgttcgaaataccatgattcacatgtattgctgttgtggcagtgctattgaggatgcacgaaatctgtttgacgaaatgcacaagtgtgattctgtttcgtggagtgccatgattggagggtacgtgcgtctgggcttatctacggatgctgttgatgtgtttaggaaaatgcagattgctggagtccgaccggatgagattacaatggtatcagttctttcagcatgtacggatttaggtgcgcttgagcttgggaagtgggttgagtcttatgttgataaagaagggattcagagaagcgtggagctttgtaatgcactcattgacatgtttgccaagtgtggtgatgttgataaagctttgaaattatttagaagaatgagggaaagaacaatagtttcttggacttctgtaattgttggtttggcaatgcatggccggggtttagaggcagtttctttgtttgaggaaatgatagaaagtgggatgactcctgataacgttgcctttattgggttgctttctgcttgtagtcattctggtttagttgataaaggaagagggtatttcagtttaatgacagaagaatatgatattgctccaaagatagaacactatggttgtatggtggacatgttatgcagggctggacttgtcaacgaagcagtggagttcattcagaaaatgcccttcgagcccaattcaataatcttgcgaactctggtcaatgcttgccgtgctcatggggagctcaagctgggagagagaataagtagaagcttgatttcgaatgaaccgatgcacgagtccaactatgtactactttccaacatttatgccaaaatgtcacactgggagaagaaaaccaaggtaagagaaatgatggacatgaaagggatgaaaaagatccctggtagcaccatgattgagctagatagtgaaatttatgagtttgtggctggcgacaagtcacataagcagtacaaagaaatttatgagatggtggaggagatgaggagggagatgaagagagctggtcatgttcctagtacatcagaggtaatgctagatattgatgaagaagacaaggaagatgctttgaacagacacagtgaaaagctggctattgcttttgccctcctgaatacaccaccaggaactcctattcggatagtgaagaacttgagagtctgtagtgattgccattctgctactaagttcatctctaagatttatcatcgagaaattgtggtgagggacagaaaccgctttcaccatttcaaagatggtctctgctcgtgtaaagacttctggtgacaagatattcagtacttgatgagtctataataactttagatgaacagtctagtaaaggtcccaaagctagtacaggtggcctttaaatataatttgtctccaatattcacctcaaattgaaaacgtcaaagctgctgaacgataaactgaacgtactacatgttgaggagaatgtatcgagaatagtttctaagaatcaataactggcctttcctcatcacgtaacacctgcctttttcttgttactagaacttgtcactggtatattcgtcattctacaaataattctctttaatttatacggccacaaactccaaatatgctttcaagttcatatgttagttctgttaaaaaaaaaaaagttcatctgttgttttgcttttttttttttaaagaacaaaggaagttcattgcaccaaataatcgggtatcataacaggggtcccctccctatcaatgattccattacaatgaccctccactctagccctcttggctaaggaatcagtaacaaaattgtctacacgagaaatatgactaaaattacaaatatcaaacttcttacaaaattttataaccttcattgccaaaggcctaacatcccaaatcggtgggcacctgctct

SEQ ID NO: 15516 - DNA, 4744 bp, Cannabis sativa
aaaaaaaaaattatgataataaaattaaaataagtattgaaattaacataaaatattttatgagaaaaaaaatattaagaccgattattaagaattattttaagtttattttttaaaaaaatataagagtgtaattatcattttgtgaggtggaaatagactattccatattttatttgtttatatatgtgttatatatatatattaaaataaaacattttacataattaagaacttttctctagttgattataaagtatgtgtattttttatatttgctttttatttttttttgatgaaatatatttgctttttatagtgtttggtttccctctctttattctttactttgattgcttgaggggtatcaataaccatacaacagaaaaattataatttcactagtgattaaattttctttttcctcttgctccttgtgagttaaaagaagataaatttactgtatttgtcatcaacgtttacttccttgcttagaaaatgaacaatgcattagtcaactgagtttatctttgctgggaagaaattactattatattgtgtttttaactaaatttgatacttagatcttttgtttttctcaatttatatatgacccgcaacatatgtaagatgataccactttctccttttaaaaggagaacattttccaccaacaaaaatagtagggtggacatctctaattactttcaatgtttatgggtttcttcttctttttttttcatgatatgtgcataaaatgtaataatgtacgtaaattagaggcgaaaatatttgcttctgtttttgtaatcctatccaatgaacatatccatgggattgttgcagataaatgagatctctatactggacgatgggaaggggcatatatatatggtgtttttctttgaggttttcatgtcatgtatggagctgtaagattttattgattcaataagcattgtgcattcagttctcacggaatattttcttcccgtgtaatgtaatgttgacaaacaagtattttgagtttgcattccttttccaaagtatatgatctttcaaagaaacgatttcttggaatgcaattggttggtttctgcttttctactttcgttttcaagtaatttcttttgatcccttatcttcatccatatacgagtacttttgttacataacgttattcttctctccttgtgtaaaatgttgttattctttccagtagcttaaatttaaatgaaagtcatggacatactagtaatgttttgcgttgaagtttattggagaacattattccaaaatagattaattgtaaaagtattgagccatatataacgggctactccactcatcatcaattagttttgcaatataaagttcatgagcatgtgaaaactattatttttgcttattttttttttttaaaaaaaaaattgtgattggttagttatcttaaaatgaaaatgttagaactttaaatttcaattcagttttaaaactaataaaattgtttccttgtctcaaagcaatggataccgaatcctttatctaaccccttcttgtatcccaagtattgtattatccggacaaaaccttttctattacaacaaattcccaattttttcgttaacttcgaatacttttagagtgaaatactaaaatgtcccattaaataattccctacaatgatgctaaaaatattattttgtgatttttttccgacagaaaatattatttgtataagatgatttttcttggcttaatgtattaggtgatttttttatccttttgaaagcgtattaggtgaattattgatacaacagtatccctctccgcccctactctaactttatcttgagatttacgttcttacacgtaaaaaaaaaatgaaattctcatgcataagatttcttataagattgtgaacctgcctgtataatcaaatagtcactaagccaatttcattatttattgaacaaaaaaaaaaaaaaatcatatgcaactccactatccttatttatttcccacttcattgtgattgccattaaaaattccaaagccagaataattctactataatcaaatgaagatttccctcatgtttttaatttattaattaaaacaaactgtctattgcttaagtttatattttatcatatagttaactttctgctttcccatatgttggggacaatagatcttccgcttttattttatttttcaagcatctttgccatttggggtcgagttggaatgattatcagaacaattacaaagaaaattgtatatcctactcttaacatccattcattcagaaacaaaagagttttcaaagttcacttggcaaatcatttacaaaagttgaaagagaaatcatctggcatataataaacttacacattcctaaaataaaacacacagctcaatcagaatcagatgactctgaatctgatttatgctcctttggtggttctactttctttcctgcctcaccctttttgaatgccttggttatctcatccacaggaaccaatggcaaatatccaaacacagcataacccttctgcgtcaaatcctttacagtatggttatacttctccgaccactgagctgccgtcggtgctgccttctcagccacctggtgaatggccgggtacctgtttactgccacccaaagattcactgtcctatccattacaaaatgcttgtaatccgtggcagcatggctcacagccgcacgagggccttctgttcgtgcatcgttcacaaatttttgagtcttctccgccgccttaagcgtcaaataatgagctttgtaaacgatctgcttagccaatggtggcgcatgcttatcaaacttgtgtgtagcttcgtctacctgtcatagtgaatccacttcttaatttgagtcacacgcaatggaaaataaatgacatcgtatacatatagattgagcaaagggaaaacctaataaacacccaattcacatatatcataacattttcgtttcaaataagcttagtaatcaagatcaagatcaagatctctctttatcttcctgtacatgagcgccagaaaacttttcttattcatgtttagatatgctaaggcaggaaacgaaggtcgaaaaaatagatcagacccaaagaatcgttgataagattctcggagctgagtatatcagatattgagtgaaatcattaataacaaaaagtattttcttggagctgttaagattgattaggcctgaaaaaaattgtaaagaaagatttaagtttcgattcataatcatacctttttgtcgagaaaaacaaggagatcatccggaacgcccttgagtttgtcgtagactggagtaacgacggtggtaaccacaccttcaacagtcccaaccgcagatcgcaaaggccccgagttctgtttcgcgtagtcgtacaaattcgatacgcacaccagcgcttgaatcgccgcgacccttacgaaacccagtcgcttcagttctccacactcagtctgtccatgcaatcaaataaaatatttaagatctaagctcacagagaaactaaaatcaaatgaaaaataaatagacagaccttatcggtggtggccatggcgtttggaaatttcagaatcgaatatgagttgatttagtttctgtttttagcttttgttttgagcttgttctttctccgaacctaaagtatcgaagaagtagccggtacatggttgtatttataaggaagctgatttagatgcagtggcattttctcattggaattttgagaagagagagtgggatgtgatcaacggtcaatactggttgttaaatttccctcaaaaataaaatactggttgttaaatgggccctagattaccctagaactagcatcattttgggcatgggcctagaagagttgtctagcctaaagtagaggcttcaaagaagacacgtggcgatctatcacgaattcgtggggcccatacttcgaaccttctagccttctttcttattccttttctctctcccactgtaataaattcatattcatattacaccttcatctttgtaattttctttcattgccttttgtcttttctttcttttattttctttttgtgaaagtaattttcttctttattttcttttttaatgtaaaaaattcggcaattatcccttgaaaaaaaatggcaattatcaattgttctttttttttttacttaattaccaaatatacatattttgatggtaactaagaaataataatttattatgaggattagatcgacatcccttcaactcttacctaatcctcggacgatctaatcatgtagctgagccaatctatgggcggccgtgctacctataattttatttgggaaattttgtgatgttatttaaataagatgagactacctcaatcatttttattttaatctcattctctaactttaaatacttttttattaactaattaagattttgtccattaaattttaatatatatcaaataacttttttttatattttttaagccattcaaaattctctaaaactattgagttccttattcaaagattgttatccaattctcttcgattttattaatgcagagattatccatatactaaatcgcgcttcctaaattttaatagggttgagatgcaaaataaccctaaatttagtaactaagttagtaaatgtctactttttaaaaaaattaagaaaatggccaaatctaataaatta

SEQ ID NO: 15517 - DNA, 11249 bp, Cannabis sativa
ggtttacagaaggaggtattaaaatttttttggaaaaattggaaaactgtgatcatgtgctctgcaccttctgacgcgcgtcccatccaacagttgctgacgttatccttctcttcagcgtgttcaaaaagcaataggattggattaaattttaaaaacggtataaagtagcggtaatattaataattagaaaaactaagttattattggaattaaatgtacaaatacgtgtccacatgtaaattatccttttttatttacatttatgttatttgtattattttattagtttatttaactatgacattaaattatgaaatatttatattattttttgattgtcttatatattaaaataataataaaattgataataaatttattagtttctattttcttaattaaatattaattagatattaaattttacattaaaattttgtaattgtacattcgagcacaaagttaaaatttgatgtaaatttaacacaaaaatactttttttgtgccaaatatagcacaatttttatatctcatattgaaaatggtcttaagtttgatggattgtaccaatttgtcatccaatgaaataatttcgttaagatatatatttatctcatttgggaagaattgaccgaactaattttaatggaatttaataattttccaatttaattgagcatgacattaccttggatggaatgtttaaagttttgatttattttttgaaaagattttataagtagtgtggttataaacgagtcaaattatagttacaaccaaataagtgttatgatccaaaatctaatgcatatccaatttaaaaatttgtactttttgtccacacaaaaataaataaataattgtacatagtgaacaatggacatcccaaattcccaactaacctcacataaatatatatagcataacaaatattacgtacacagtaggcaacactcaactttacatatgttattattctacttttattaagtttgtttttaacattagagatagtagattaaaacttgagatgtagtatatacaccatactatttttatgtccacattttttaatagtttcgatagaactaatatttcacttaaatcatattattttgaaaatggaaaatttaagctgttcaaaaaataataataataattcgaatttatttttgtcttaatcttatactagtactttgagaaattgtcctgacattaattaccttacattgtatgaacatatttatatttcccaccgtaatttgagtgtttttctttttataataaaccgtaatttgtggttattaattctttttacattcagatttaagataaaatgatgctcaaattcatatatatgtcctattgaaaaaatatgtatgcaataatgatcaataatcaatatacattgtatatgtcattgtcatatagttaattactcaataattaatacttagttttataataaacaatatttaagattaggtagtatgccgcgtgtttgaatccttttgttctgttggtaatgttatccttattatgtcttatattaacttcatttgacgttttcttaatctcaacggactattgaggtagaagaccaattacaaccatgaataaactaatatattcccttaatatatataatatgagaagaccacattgagattttgaggaaaatggaatagatttgttgattcacctaactcaaaatatttccaaacgatacttatttaattgggatgatgatgcaaaaaaagtgaattgaaagtaaaaacttaatcacaagtttgaagaagaagaagaagtaacttagagcttttgctggatttgaagttgaccatactcacaaaagataagatagatccattattttcaatctttaattcttcgttgcttgccttaaactttgtttttttctttttcatttcatttgactggttccacatcacaaccacatattcttgaagattaccaaaaccttaccaaactaagataaactaaacccaatttaagcttagattactaccaacatataatctgtcaataccctatttgacatgtgacaagaatcatgtgactctttactatttgagatctaaacattatgttttttttttccatttttggttgcatatgcaatttctacactaaaatcccattacgtattattttatagccaaaaggtaaaaaaataaaaaatgaaaaatcccactattgttttttgtattactaaatgggatttagaagggaatatgagacaaggtgctatggaagccaagccactaaagaaatacccttttactcaatcattaaatagtctaatgtttagattctacttcaaagttaaaataaaaataaaataaaataataataataataataaaaaaactcaaaaagcgtgtaatcctgttgaaagctactagttccctattttatatttattaatattctgtcagtgtcaattacagtgagctaaaagaggaggagatgagatatggtctatagatacatacacatatacacgtacaagacacacatacacaccaaccaagagtttattttggtatttctccataccccaaaaaaaaaaaaaaggagagagagagagaaataaacaatcaaattctaagaaaaaagaggagagagagagaagccaacgggctgataagagaaaaaacgagtcttttttatatgtggctttggattcttttggctaatcgtgcctgccagctttgcttgagtatggctaaatagtaattgaaaaattcttgttgataaaagagagaaaaaaataattaaaattattaaatttaagagaattagctaaaagaaaagaaaaaaagagctgccttgattgtttagctttggaggtgagtctaggcagcgagtggtgttttggatagtgaccattggagctggtaatgagggagatgtcggaaaaatggagatgggtattggtgttcttcattgtctgcattctgggctggagacccagttccattaatgccgtcacagatccaaatgatggtcagtgcctaatccatctcatcttttttgtttatcttttccttgtatattgttttctatttgactaccattgttttgttttcttcttttcacactttcatggcttcaactgatctagctcatctgcattttttttttgctgctttacggattttttttggcagatttgttctgggtttgtactaaatttcagtctattcatcaaagatttgaccttttctctcttttgggaaaatttgaaattttgttagaactgtcggttgggtcttcaggggaatatttttgttacatattgtagatttgagtcgttggatgggtaagttgtttaacaaaaatccaatatcagtgagaaagtcgccattttttagactcttcctcttggacaaaggctgcaccaggattactgaagcttggtcttatactctgcttactttgattcaacagttttggagtttattccgccatttttgttcgattccttgttttaccaagaaaacatcaacgccattacatacatcgggaaatggcatatttatttcctcttcatccatggaaactttaatttttttttttttttttttgggtttatggttatagggggttttgcaacgatgacattgaatatcctagcaaaacaaaaagagggtttttctgaatttaaggtcacaagttcgtgaaacttttatttctggaatagagtaaaaataaaaattgcccccccaagcgatttttatgaatcaaatagttttcacatgatgtctgaaatgcatttcataattttcatttatctgtatagaaacttgagatgaataagaaagtttagtgaagttcctttttcaaagtatggattttatctatgtggattctaattagcagacctttatgtacagcttctgctttaaagatcatgttcactagcatgaacaatcccggtcagctatccggctggaatgcaaatggtgatgatccatgtgggcaaaattggctaggaattacttgttcgggccagagagtgacagagatgtgattttctattcttcatttattttacatttgatgttctttttcctcctcgttacttgtttctgaatctgttattctttctatcagtaaattaccgaacctccagctttctggttcaatgggatataacctagcacctttaacagcagtgaccaacctgtaagatcatgtttctttatataattagactgaatttatatttattattgtttttttcatttattaatttttatggtctcttgacaaattatgcagagacatgagcaataataatcttggtggcaatattctttatgctctacctccaaacttgacaagattgtaagcttttctcttattgctttccttgctgttcttgttcttcattttcctctttggagggattgataatttgggttgtctttgtttcagaaatcttggtggcaatacctttaatggtggcatcccttattctatttcacttatgacttctctgcaatacctgtaagttttttcctttctatgtttcggttcgtcaaaattgacaccccataaatgaacaacaaacggaaacctaatagatatacatttgttttcttcactgtaggaacctgagccacaatcagattcagaaccagttggacgacgtgtttggaaagcttacttccctctcagtattgtgagtttgagctttaatcttatatgaactggcttatgtagatgcttgctttatatgactacagagttcacagcaaattagtaatttcttttcaatcccatttagaagttaagaaagggattcaaactcttttaataaaacttttaaaggtttcatgttgtttgttttctattaattaaaccatttgataaagtttgcttgatcagttttgtttatgtaattttggcaatttttatctagtctcagtgtatgtaattttcagtgagtaatacgttttctttagaggatgcggtgtgtgtataaatctatgtaatatataaagacagttgttcttattcatatctttttcctcagggatctttcgtttaatactataccaggtaatcttcccgagagtttaagcagcctgacgagtgtgacttcaatgtaagtagatatctttgattaatgtggttctaaaccatggttagagtctcttaccccatatctgattgtcctttttgattcaggtatctgcagaataaccagcttaccggcactattgatgttcttgccaatcttcctcttcaaactctgtaagtaaccagagtattattagaaagccaaatatgccctattttctctctttctttctgtgggggttgggattcgggttgtgggagggggtggaagggtgttctcattacagcatttcatttgtctacctttgtgtttatcaggaatgtggagaataacaagtttactggttggattcctgaacaactcaaaaacattaatttaaagtaagcaatttatgatacgagtaattgctcctttattttgtcccccttcttctttctctttcttatgaaggaatgtaaaccaacttgacaggagggaaggtaacgcgtggagttcagggcctgcacctccacctccacctggtacacccccagcaaccagaaaccgaattcataagtctcccaacagtaacagatcatcggatgatggtggcaatggtggtaaaagttctggtataggggctggaggtatagcaggaatagtgatatctatttttgttgttggaggaattatagctttcttccttgtaaagagaagatccaaaaagcgatcatcccctgacatagaaaagattaatgaacccttcgctcctcttgcttcaaatgaagtgcaaggtaacacattattttgcattttgttttaggttttaatcttctaaatgagtgtcaccagcaatatcatacaagattaatgttacaattccagcaattgatctaagtaccaataaataatttacaaaaaagaaaagaatatgtaatattttcaagccataaaagatgaatttatgtatatgtaaataaggaaaaaaatcccatatcaagttgatagaaagctctgcattaaaatattgtagttttgagcagacagcctagataggtaataaataatcttcttcaagtgtattgacatgtaatcttagtttactcaggatctgtactaagtgttcattttttctgagaataatgttgctactattgcttgtgctaagcttttttttttgtctctggaatattgatgcagagatgaagtcggtacaaacttcttccacattggacaccaaaacctttgatgctcctcctcctgcctcaataaatcttagaccacctcccattgaacgtcacaagtctttcgatgaagctgatgttgtcgttgtctcaaagaagcctgttgtcaaaaagaaaagtgtcaccgctcctataaatgtcacatcctactctgtagcagatctgcagatggctactggaagcttctgtgttgataaccttcttggagaagggtcttttggacgtgtctatcgagctcaatttgatgatgggaaggtatataatattaactaaataaatgttggtccatcatcttgggctagaaagtcataatctttgcccttggttaatggccaaagtgaataaccaaatacgaccaacttcactgattgcaattagtactgtttattttaacatgttccttgttttatcacaggttcttgctgtcaagaaaatagattcaactgttctttcgagacaatcgccagaagaagatttcacagagattgttttgaacttatcacatttgcatcatccaaatgttacagagttgatgggctattgctcagagcatggacaacacctattagtgtatgaattccacaaaaatggttcactgcacgacttccttcatctatcagatgaattcagcaagccattgatttggaactcccgtgtaaaaattgctttggggactgctcgtgcactagagtaagtctatcagtgaaggttttgggtatgtttaagaattctctagagttgcaatttcattgcttttactgaaagtggtgtttttcagatacctacatgaagtttgctcgccatcagttgttcacaaaaatgttaagtcatccaaaatattactcgatgcagagctcaaccctcacctttcagactgtggcttggcaaactatatagagcaggccaatgaggttatatttttttttatatatatatatatttattgaaatagccaatgaggttatatctagttgtttcaaaaataatattccaaggatatgtgcacatatgtttttttcagctttgacttcattaagctaagatgttctgataacataaaaagttgaggcaattgctgaattttgagtatgacttgtgcagtatttgagcagccattcagatgctggttttaatgctcccgaaattctaatgggcaatcaattttccgtaaaaagtgatgtctacagttttggggtgattatgctggagcttcttactggacggaaaccatttgataggtatttgaaatgacctaactagtttttagtgtcttctaatttgtgaagtgttactcttggttggtttttcctgttatttttgatgatttttttttgattggtttaacagctcaaggcctagatctgaacagtcattggttaaatgggcatcaccccagctccatgatatcgacgccctctctaaaatggtcgatccagcacttgaagggctatatcctgttaagtctctttcccgctttgccgacgtcattgctctttgtattcaggtaatcttgttaagctatgagtttttgtttcatcttctctaaaagtttgagattctgatccttgagtttgcacttctggtgcaggctgaacccgaatttcgaccaccgatgtcagaagtagttgaagcattggttcggttggtgcagcgagctaacatgagtaaaagaacaatcggaactgaatcattcaaacgaggtgaaagttcagaaatacctgacaatttttcttgaagtaacaattgtgggggttggttttcttggtgttgtgcactttgttatgtttaacctggtagaaagagagagagagagagagtaatgcaatgcaatgcttgtccataattacgtagttatagtagttgtttcattgttttgttgctgaataatttcaatactgaaccgctgcctactgagtttattgaacttgtcgactcataaattatattttactttacacattgcttatgtacctatgaatatgatgattgatgagcccgattcagaaaaaacccacagatgaacaataagagtatgattttttttttttgaaagcatttgccaaatcaaattttgttttgtaatgatccaaagaaaatgttagcactgatctaaatgttcttaaaaagaattgctaatcaattgattcatataaataatatttgaataacaggattcattatttttatgaaaagaaactattaaattcaaattagggatgtataattgtctgtttgataggatcggactatagtgtattttaactaaaatatataaatattgggttgtaaatatttaattgtaattcgttgaattaaaaaataagaaaagtttaactcactcaatgattttatcggtttagttgagttaacctttcccatttttattttttatttttttttattgttagttttttgtcttaaaaaataaaggtataatattacccatttcaattttcataactttttttattttaatacctacataacaatttacctcctcaaacagttctattctgcttcattttctttctcttcttcttatcttcaccaatttttcttcttctccagattggacatcatcttgtcatcaaattcaaatgtatatgtatatatatatatatcatatatgtataattattaatcaaagtcaaacgaggaaaataaatgaaagaaagagagatgaatgggcataatgaagagagacagagaaaaataactaaaatgcagtctgatccttaatctgattttttgcttcattatttgagataacaatttacctcaaccagcttttctttgtgttcttccttcttatctccttgttgtcccttcatcatcttcttctagtcattcatctgattcttcttttacaaagagaaacaccttagaatgaaatattgcaaacttaattttgatttaaactgaggatggttgagtttatgtttgttagtataattgtaagaagaaatgaatagaatgcaatttatctgtttgttggatatgaaggttaaatttggggagagccattgtgtaaattttttaaaaaaaaaatgagagaagatgaactgagaaaggaggatatgaagtatattttttataaaaagagaatgggtttaaagtaattgttcatttttggtaatttttttttaattgaccaaaccattcactccgaattcatttagtctggttcagattcgtttagatttgaaacctcaagttgcagattatatgaacaatcctacatttgattaatacccaactacatacccgaaagtgcatggcaaaatctgagtgtataattatttggagcttactcatgacgatgggatccagatatctaatcacgaacgtggcgtttggttgggaggaataaaaatataggaataagaatgagaatgaaaaatagaatatgaatggaatggaataaaatttaaaatgcataagaaaaattgataaaaaaaattattaaattttttttcatttggaatgtcttttcttctatttcaaaatggaattgtcatttcaacactttaatatgcaatcaaacaaaggaatgaaatggaaattattttcttttatttccattctatttcattacctccaaccaaacgccataatacctcacaattaggattaaatgcactatctaaatcaagtgaaaccgctagtagtagcaaaaccctaacttttgccatactcgtttgtacattataacattttcatatggtaaaatcgaaaggaagcaatacaatagtgaactttaatttaaataagacaatagtggacttttctaggaatgttttagaattcttgttttgggtcttccctatacttttatgtgtctaaacattatttttcttgtttgtgatgactcttatgaaaatagatcattatgcgtgcatattcactatttgagatgctactggacgacaaagtatttgaaatatagacaaaaaaaaaaataccatttaagtaatatcttgtttgtgatgtcttgtttgcatgcttgaggttgatgatatggtaatgacaacttagctgtgtaagcacaagatttgctagaacgcctctcccaactctcacaaagctcaaggaagtgctctgtaagatctttgttctcttcatacatctcctaaacatttcattgactattatttatttataatgattaattaagttaaatactaattaatcacttacgtgtataattaaatttggaatgagttattaatacctaaaagttgtttaagtaggattttattaatagaataatcaccaagtatattgggttttatttactatgtgggtatatatatataaatgtgtgtggcataagattttaattttatttggttatgatatactaaaatagttatttatcttagtgaattagttagttaagcaggattttaattataacgtccctgacgggggtttctctcacaaaatacttttgtactacgtacttatcattttgtttgtgagtatgcgtacttacgtattcctatattttatagcacactataacactatgtaataaggattataaagagtagtgttatacccattacattagaaaggattacaaaaaggtaaatcaaacattagaataacactatgtaataaggattataaagagtagtgttatacccattacattagaaaggattacaaaaaggtaaatcaaacattagaataagaactttaaggtggtgtttagttggaggtaatgaaatggaatggaaatgagacaatttacatttcattcttttgcttggttgtatttaaaattattggaattccattctgttagaatgacctttctatcattttggtggaatgactattctattttgaaatggaaagaaagaccatttcaatgcaaaatttgaaaaaaatttaatatttttttt

SEQ ID NO: 15518 - DNA, 2695 bp, Cannabis sativa
atatataatgtatatataaatatgcgtgatgcaatgtgccctaattctaatcttatgtgtatgtttacgtaatgtaaatatatatatacttatatcacagtcattggtcagagcttacagcttgttggcctatgagccacatggtacatccatatagttatatatcttaaaacaaatgcatgataaaaaggggagcagatgaagtaccatattatatatactagttggaatatatattaaggagtactgtgaacaaagctaggatagtacacccaccattatgtcctataatctatatatgtattgattatttttgagttattggtggaatcgtggatgcattgcatgccatgccactatacatgaaaataaagaatgtaaacgtacaatttgtgcatgtttcgggctacttttgcttcccatcgtatatttatatttatctagcacacttgcttattaagtacttacatatatagataaagatgaaaggcctgcaatcccactatcattttcctaatttcccatacctactttttaaaagatttagtatatatatgatcctaggtttctgtccaattaagtgcctggaaatgataatgtacgtgtttgtatacatatgtatgtgtgcgtgtatttattttattaatgttagtcctcgattgcgttgcaatccaataaggttgttcgcgccaacaaatttaatatatatgtatgtgaagatattctaagacacataaaaaacgacagataaaaatgagataaaaataagtgggtggctgtggcggcccacaagaagatgaagcatgcaaggcgcatatggggtctcgacattcacagatggacaaaagctcaaaagtccacttcatatcacttaactacctacttggactaaaaaaatgtttttttctcactttgaaaataatgcaataataaaaattatttggtcatatgatgatcaaaacttattattaaaaagatacgattttgagttgacagatttatttgtcttattaacacatccaaaagatgcgtgttgttttatatgaaaacctactcttgtatacatactacaagagtagtcactggagtggaaatagactatagtacttggtaaaataaatattatatgtaattaactacattaataaatacagaaatattatccattattgcagcaaaagctagtatatataaataagtatatattatatgtggatccagcacccagccacgctgttgggagtgtctaatcatagcttaaaacaccctggtattaatccatcctaatgtgttggtttaattaaagtcaaatggaacaaacagggggctggtttttcatatatatgaaagatgatgatctatgcacgcaattgggtcgtgcataggctatctatatatgacttaaaatttacgagtggtttattacacttttattgaataaaaatagttaggtggtgtttgttgggaaaaaatgaaagtataggaataggattagaaattggaataggaatgagaataagaatgagaattgaaatggaatggaatcaaattcaaaacctacaaaaataatgtatattgaaataattttttttcattttaaaatggaataataattttattaaactaattaaaaaatcattctattagaaatattccattattttaaaatccaaacaatcaaaagagttgagtaaaggttttttttctcttttgttgtataatgtcttgcaatcaaatgtatataattgttgtagtgtaatttctattaaataattgtgtttgatataataaaaaattgtattcgatttcgagcataccatttaaaagtctgcaatccccgttgaaaaaaaaaacaaaacaaaactctgcaatccccctaacttagtaattgaagacctcttataacagctcataattctcattcctattttgcctctaattagtttgtctatggtctagggcgcctttcaatctatgcaaatttggggtttcacacttgtaagttttactaactttcaaggacgaattatcaagaacaactaatcatggaccaacacgttcttgataattcgtgatttttcttgtagtggccgcttttctctgttaataataataataataaagtaaataaaaataaaaagcagctcacaattcgcatcccatcaacttgcatcagtattcttaatcaacttgggaaatatcaaaaggcattagccgtgctaggcaacacctttagaacattattattagatattactccctagcaccatcacaaggtagcattttgttaatgattaatattaattaattgtaaaattcgatatttaattctaccaataataatatcatattattattaggtggtgttagatagtatctttagcattttttgagaaattaagtagaaatatgctaatgagcagattacggtgccgcagtaaaaaagaatgtgtaatattttaatggtacatttcagttcggacaaattttaatttaagggatttgttaacgggtacattaaagtaccacaaaaagtgagatattactattagtataatataatatcgagtcccatacattttgatttaataaataatatagaaattcattagctccttacaatgagctacattggtaattaaagtattaaggtttctaatagcaatgttcgtattataataaatgataagagaaa

SEQ ID NO: 15519 - DNA, 3334 bp, Cannabis sativa
gtactagttataaatatattaacaagatacctaatcttaattataattatatgtagagagaatttattatagtttaaggtttaagctgaaagaatataatatattttgaccatgattatatatagcttaaatagattaaaaatagtacttaagcattaattaattaggtatgatatataggtaggatataagtagtgttgtgtagtgtgattaaagaaactgagtgagaacattctttaatagaaagtcagcgataatatgactagttttttcggtgggatggaatgaatcccagaagacgtatttgttggcatcagtgcaagtgaacatatcatttcgattgcaagcataacccatttcgaacattccagttgcacaacatgccactgagctcacctcgaatcctgccaacccaccaaatacttaattattcaatatcaatatatatgtatatataatataacaaatcactttcagtaactatttgttcctcaaatagcattatcaattttcattaaagaatattgctagactaggcaccaccaccaccttatgtatacgtgtgtttcttggaatttattggctagtaatataattaactttctcccaactccccagctgtttttacaacttatttcagctcattaatgtgactatacttaaatgccctcagaaaatgaaaccttttaccttttcatcaaggggttaggtacgacttagtcaatttaatgaaaattcatatgtatgtatatacatacacagatatagggtaatttttaagaagctaccacgtacgtagtgtgagggatttgaaaaagaaaaagaagagagcagttataacacattccttagcattttttattttttcagaacactttgatattcaattttttattattgattggatgattattgaattggatcctctccacccttaacttgtatatatgctgtggggatttgatataaatacaaaaatacgaaggaccctaaacttagaggtaggacccgttttataaatatatgcatgtgctacttttaaacaatgaaaatgagcattctaataatgtatacgtaccgtaggaagaaggctgtttgataatgctcaaaagtggattataaggattggaaaagaccatcttgagctgtgggagttccttgttgagtgtagaaatgagtttgtccaatttcccattaaattccaaagacacagcattgtatctctccacacagttattttgaccaaacaaattggtggtcctctccaagggtaggcaccccataggagggaggcctccaagggatatttttcgagccccaagtgcgtagagttgcctgatgaaattcccagctataccaattagaaaatcttggtactgttggatgttgtacctggatgatctacctggcatggtgtagtagttctctaagaagtcgtttgttccaatgctgatcatgtaaagagcttcccctattatttcctttgccttttcttctccttgatatgttttcagtttcttttggtactctttgtagtattccaattccttccaaagtggtattacagactgcacacatacatacaatatttattatgtacataaattaatttccatggatatatatctcttatgtaaataaatatagggaaaactcttttaataattgttcttgtatcatgatgtatttattataacaatctttcaaaaacaaaatctaagttgctaaataatttttcttttcctttattgataaacttttgggttgagaataaaagagagaaaattaatgaagtgtatatccaaacaaacaataagtaccctttcgaaaaaagaaacaaaacaaaaaaaaaacacacacacacaataagtatacattattaaatatatattgtctggaaattcagtaatatataaaaataaatattgttgattcatttcataaagttcatgataacatggtttaatatatgtaacaatctagtagatgggatttggagtgcgtgaatatgaatgtgagatttattttagtcaccaaatgttatgctaacaactaatagaggattgctattacacactttacccaatattatgccgatgtagtgtagatggttaggttttttttatattatttattaaagtaaaatgttaaaaaggtatgagtgctacttaccactctttttattatcatattagtattacagcaattaagtattaaattttataaaatttaatagaataatagaaaatattgttaaccaattccaacgcaccacctcttaaaagtgttagacatcaactagtgtccaattagaatgctttttattaaatcaaaaacgatttcacacttattctagtgcttgatgactttaagtttaaggtgggtttagcatatctctaatttatagggctatttattaattctctgaagtacatgaattaaaatcaaagcagaataatatacatagtacacgttatagttggcaataaaaattgtacaaaatttggtagacaatttcatttattgggtaaaatattatagtttagaacttttgttttttttgttttttgtttttttattttttgttttttgtttttttttacacttggaagttataactttaacttggtttacttacattataattataataagcattttattatttctttttaaactattttgaataatttatatagtatgaaaaaatcaagtatcaataaatcatttgcacgtttaattaataaaataaaataaactaaaaactctttgcactcgtattttgtcttaaattatatggaatttttcaaacattattagcttaatatctactataactataaaaataactacatttgttatatacttgaatctgacaatattgctaaaaaaaaattgtttatacatatttattatttatttttctttctataacatattgacagctataaaagaaatgttttacactaatacgtatacatttgaatcacagtgataatttaaataaataattaagaacacttacaagcactgaggaagttgcattatcgtagccagtgccagcagaagcgaaagtgacaccagtagcaaaatctgagatgttacaagaaggatccaagtaagcaggaatggcagatttcaggccaaaaccctctgagatgaagtcagtaggtatccgcccattcgaaaaccttccggtgggctttccgccggcaaagtcacgcccatatggctcgaaattgcttctggctatggtcggaatttggttattgttgcctgcatccaccgttgagtctccaaacacgataatcgccggtactttcgccccaacaat

SEQ ID NO: 15520 - DNA, 7922 bp, Cannabis sativa
agatttttttcccaaaaatactattaggattatttacaacattaatgtcatcatcttcttagtacttaatagttttagtttttttatttatttatttataaaagaagcaaatttataggaaaaaattgtgtttttgatcacccattctaagccatttgaccatggctctttgatgccattaagcttcttccttgtttaacaataacaatgtaccaggcaaagattggagatgttcaattttattagtagttttctaagtatatcgcagtgaattttgtagactagcaatatcatggcttagactattaatcttagttttaaaaggtgataaaatgagaagaactccaattttaaatgaaaatatacaactttttttgtttattaaggaaaatctaaaaatgattagtagatttattttcaagcggattcctatctttgaacaaagattctttaacattagaataagaaggttttttcaactaaatattttcaaaaggaaatctcttattagttaaaaattaaggaaatatgtaagaaatatttttcagctcattttctatgagccagagaatctcatatttatagatatgaaagtttgttacaaaagggaatgagcaacggctcaattacaggtggcacccaatacaattcccaaggaagattacataaagcagaatattttaacagaatgcctagggatcgtatcctacatgtgaggaccacaggggacacatgtcacactagtgagagtgagattagatgcagcaaagaacagagtaagactttgtacacgggcaatagcaagttggaaaatctcatttctcaacacctcccctcaaacaaatgggtgaagttctcacaccaagtttgtccacaagaaatgagaaccttgagttggacagtccttttgtaaaaagatcaacaatctggtcatgggaaggaatgtacctaacctccaattgtttctgcaaaaccttgtcacgtacataatggacatcaattttgatgtgtttggttctagcgtgaaatactagattagaagccaatgcactcccacttatattgtcacaccatgtgattgaaggcatgagaagtgggaagttcagttctttgagaagagactcaatccagaaaatttcagctgatacatgagccaaagctctgtactcggattcagtactggatctggagactacaacttgctttttggatgaccaagacaccagagtttcacctaagtacacacaataacctgcaattgaacacctgtcatcaaggcagcaagcccagttgtcatcagaaaacccagtgatgcttagtttgttgttgcagctgatgtgaagccccaatgtcttagttcccttcagatatctcagaactcgtttcacagcactctcgtgaactgttgtgggattttgaaggaattggctcagcttatttacataataagctatgtcaggcctagtgtgacaaaggtactgcagtgaaccaataatgctcctgtagatagatggattttgcattggttcaccatcactaatggagagagggttgcctgctgtaattggagtaggacatggcttgatgttctccatattaaccttcttctggatatcttcaacatatcttgtttgtgtgtgatacaaacttgtggtatctctaaatacttcgattcccaaaaagaaatgcaagggaccaagatcttttaaagcaaacaatttgtgaagtttggagatgaactctgcaacactatgaaagttattgccagtcactataatgtcatctacatagatgagaactagtatgacaatcttttcagttttgtaaaagaacaaagtggtatcagcctgagagtttttgaatttccaagtgacaaaagtgtttttgagtctatcaaaccaagctttgggagcttgtttcaattcgtagagagacttgtttagtttgcaaacccaattttcctttccattctcctcaaagccctgtggttgtgacataaagacttcctcttccaagatgccatttaagaatgcattgtttatacctagttgtcttatgtcccagccacttgacactgctatagtaagaataatcctgacagttgaagctttaatagcaggactgaaggtttcaccataatctatccctggtctttgatggaaacctttagcaatgagccttgctttcaatctttcaacagtgccatctgctcttgattttatcctaaaaatccatttattgcccaccagattttggtcagttgtaggtggtaccagcatccaagtaccattcctttttaaagctataacttcagtgtccatggcacctttccaccctggatgtcgaagggcttcttcaactgttggaggttcaagaaatgtctgtgaagctttggatgagctaaagtaggtttttggcttgaagatctgctttagctctagaaaccatctggtgtgtaggctgtagggcagtagccaatgttggttgtggtgagagagtgacagctggttcagcagtatcagtggcatcagtagtgtcatcaacaggagttggttcaagattaggaccaacagtaaactggtcaatattattagtatcaaaagtgtcagcattaaaatcattattaaagggactttggatttcctcccttgctggtcttgaaccaaaattgaggttatctggggaatgaacctcatgtgatcttggtgatgcttccgagggtgctgcagaatgagtgtgaacatgacttggtgagggttggtctgagagatcaaaagagggaatacgtagttgagaccatgaagagttgtggattatgacaggttgaggagtttggtaattgtttaggaacccttgcttgaatggaaactcaagctcattgaagacaacattcctagaaatataaatacgacctgtgggagtgagacacttatatcccttgtgggaaagattataacccaaattgacacatttcagtgagtaatactgaaatttgtgggattaataaggtcttatacaagggaaacagcagtgccaaatgttttgaggtaggtgtaatcaggtttttgatggtagagaacttcatatggtgacttatgattgagaataggtgttggtaatctgtttatgaggtaaagagtcgtgtgaaaggcatcaacccagtattttaatggcatttgagcttgagcaagcaaggtaaggcccatttcaacaatgtgcctgtgcttgcgtttagctctgtcattttgtacagaggtatgagggcatgagtgaatgaactcaatgccatgtgtatggaccaaggctgtgaaggcatctagtgcttcagcaatagaaaattggaaaatctcatctctcaacattattaacaaaatcaaatatgttattctaattactattaagctcaagttaaagagattaatgattagaaccaaaaagaataagtgatgaacagtagtttttgagtgtattagatcacaccaagaataacttactactgccagattagcccttcattatagaattattagtcaagtaaatttgttacctaggacaacgtttgattagtagtcaagagggaaaaaagctttacataatttgaattctctaaactatgtagtaaatattaatttctatatataagtcaatgtacttgatttaatatccaataaataattatgaaaataaaatagtaaatagtcttataaaataatataaaatagataagaaaaaataggagaagagagaagacaaagagaagaacagaatgagacagtgaatgtgatttttctcagttatttattctaataggataaacccgtgtttatacaagaataagactaaaaaaatgagaaattaaatcaatgtaataaagaaaaatataatcaaacatttacggtggtaattaatacattaatttggatgatttggacattcatatatatatatataatatttcatattatacttgtgttggtgccaaaaacaagacatggattttagcttcatgggtgatctcttgggcaaatttgaggagcattgttgcaaagcccaggcagccacgactactactgaagtcaccgctacagcggaagccaaggagaatggagaagatggcacttctggataagccccagagtcttcaggattggagttgcataagggtggttgcatgttggcagtgctctctaattttggagagtacttccattcccttgtggtggccttctatgattgacttttaggttgtttagtcttctttatttagttttgtagttttccatgcgagagctgccttgtggcagtgctctctatagatcaactttaggccatttgttacctgtgggagaacatattagtatttatgtctccttttttcatatacatttattttggttatgtattgacatttgggcccacacgagtgggttcacttcattgtccacttggtgtggagtgctcgttaattaaaactaacaagtcttttcatatctttagaaattttttaagcatatataacttagctcattatatatcttggtaactttagaattttaagttgaatatattttttgcttattttattctgatgctcattatctttgtaacacgaggttttaaagataacattaactttgttgtcaatggtggcttgcatttttgctagtttgagcaagttgtcgacatggatcttaactcgttgggtactcatttttagcatgcgacccacttattaaagtctctaatgttggccattcgagatgtctttagtaagcgaaagtttttgagttatggctccttggagcgtcctcagttgtcttttatctcgtcagtgtaccaacttttccccctgtccgagatgaaatattgaaaaaaatattcatggcaaaaatttttaaaattccattctcttaaagtggcgtgttagtaatgacattgagatttatttttatctcgttgatataccgactttggcccctgtctgagataaaattttgaaaaaatattcatagtaaaaaattttaaaatcccatgctcataaagtgacatgtcggcaatgactttgagatttatcttgtggagtggtggagtatagttatggactataccatatatgcccccaagttataaaagtattgagttacttttgtaacttgtttggtgaagacgtaacattataaaagaaatatttatacaaaaagtgcaaacatttattaaaaaataaacgaccaattgtctaaaaaaattaaatattgtgctcttgaaatggcacttaacaattaaaaaactaacaacattgctcaatcttgataaagcaaataaaatctaaaaagagtgttctccaaatggctttgtctagccacttttattgtcttggtaggcatgttacaaaagtggtgccttggaaaagttgagtcccaggttgggattgacctttcattgccacgttgttgcattcccttgccgctaactggtctccgcgtactatgctattctcatagtttgttggaaacttcacaaccaggtgtctcaccgatgtcgctgcccccaatgcgataagctccagtcttctcattattatattgtagacggatggaatatctacaacgataaattctgtcatttttgttacagtttgcggggcctctgccattgtgagggggagagtaatttttccaatacttgctatgccttcgctgataaatccgtataaaattgtggggcatggttgtaagtcatgagtctccagtcccatcttgtcaagggtggacttgtagttaaccccactccccttatcaacaagtatccttcttactcttttgttagtaatttaagcagttatcaccaagggatcattatgtggcatttgtacatggtctccatcttcttcattaaaaataatgggattttccgtacgtgtttgttttgggggaggttgagttggtggaacttttgcgttgttgttacttttcagtttattaatgtagcgcttttaggccccattacttattccagcaaagtgtggacctccaggaattaccaagacatcatctccttccaatggtggtgccatatgaacattttggccttgtggcggggctggcgcattgtttggcatggcctgggcattattttgggcctacgctagtgtttgggcatttgttccctgattgttgcgcgcataacgagcaagtggtctggctcggatgagatcttcaatttctattttttaaggctttacactcattaattgtgtgaccaacgtctttgtggtaccgacaatactttgaggtgtcttgaatttttctgattcctttcattggctcagtgactctaaaattcaaagttttctcattggtgaggaaaattgtttctggggtttccatcaatttctgtgaagatggtgtaaagagggtagttagccctccctttcttagtattgttgtggtccccaccatgttcgtttttccttttattggaagtatttgcactagaggggttgttgtttgttgaagtgggagtagcttctattgctccagattaaagagggaggttattagccaaccttgcctcttccctattaatgtatttttgaggtcttttcatgaactcatctatggtgggtgctcccttttcttgcaaactatcccaaaattgggacccattagcaattcctgcccccagcgccataagtcctccactatcattaacgtctctagccttcgtggcttcgacattaaaatagttgatgtaggcttttaagctctcactcggttgttgcttcacattggcaagggaggaacattctaattttttgactttgggggtgtagaattccttcttgaagtcacgtgagagttgatcccatgaggtaatagagtgcctcttaaatttcttgaaccaagttttggctgctccagtaagttctacaagaaataacacacatctcaagtcatcaactacttggtgggcacgcataagtgtgctaaagtcacttatgtgtacttcgagatctgtactcccatcgtacttggttgtggtcaacatcttaaacccttgcagatatggtaaaaccaatattctaggagagtaaggctctgactcctcatccaaatcatacctagcgacattttggttgttggtcaccattaattgttatatcatttgttccaaagcattaagcctaggattattgatttatccttcctcaccatggccagcttggggaggttgttttcatgtaccccattgatattatagttattatttaccactggtggaatttagttatgtcttctattgaaatgttccctgaaattaggttgtctttgatagaggtgttctcacaaatcgggccttcttgcgtctcttgggggacggttgctgtggcgacattaataattgcggggtgcattattgtgaaccctaataaggcagcttttagaattagatcgaccactatcctcggcaaagctctctattctttcttgttgtggatgatgaggagagtatgggcgtcgcttggaatatggctcggaatgtggcgtcaaagaagtgtctgatttggacacataactattttcttgggcaggttggcgcctcgcgggcgtcctttgcttttgcccacgatgtgtcggcctttgaagggcgtgatcttcgcgagctgtggcatgtcgcctatgccctctaggtggttgagcatgtggtgctattgttgaaaattatgtacgcaagtatacgtagtcacacaagtaataaaatgataagtaagatcatctccacagacatagacgaaggtaggtgtggataaggtggggctattgcccctgctcaagttactaaaatttcaaaatttttattatgcatatataaactaaatctatcacctatcaccttttaaacttcttttatatatatatata

SEQ ID NO: 15521 - DNA, 6760 bp, Cannabis sativa
  modified_base (6712)..(6728): a, c, t, g, unknown or other
gccgtcgacgcggcggaggatccggagacggcgaagctcgcgaggctaatgccgaggttcgagaagcttctgaagtgcgagagttttaaggctaaaccggcacttctagtcttgtttgggagtttgatcaacgccggggcagcttccggcgagggaactttgagaagcttcgttccggcagtcgtgcagttcttgagcagcgatgactgggcggcaaggaaggctgcggcggaggtcctgttgaagttggcctctgtagagagggactcgttggcggaattcaaatctgggtgtttgaggacattcgaaaatcgaagatttgataaggtattcatatgcataacatacacttaccatattactacgtgtaaacgtgtcatgacttcttgttcttcttcttctttttgtgcataatatattttatgtattgattggattttgatgcaattgtgatgaattggtatataggtgaaggctgtaagggagataatgaatcagatgttggaggcttggaagcagattccagatgtttcaggagatatttctccaccaccacaatcacaagcttcatcaagaggtattttgtcacatagttcaaaggacatagagttgtgtggtaacgttaagagttgttctatggtcaattttattttgtttgcaacccttacaagaaaactatttcaatcacagttacaataactttgtcatgctaatctttaagtttttcaatgttttggccatctgtggtttgtttaattcttttctaagacttttcgtttaggttctgctgtgttttttgtttcttagtttagctcctttagcgaattgtcttgagcatttgagtttatgattatatttgtaatgagtgtagataatgcgagcgatgggcgctatccaccagggacaaggaattctggtggtgctagttcaaaagctcttcaatggaggaaaaggccggtgctatctaacagggcaactccacctgacagctcttataccactacagctcggaagaaaagttacttgaaaagtgaagaaaacaaggcaaagtcaggaatgtttcggaagctggacaagaagaagccatcgaactggaatgtcaatgtagctgttccaaatggtcccttggagagaggagggattcatggtgatgatggtaaggaaagagatggagatgttcaagacaaaaggagtaatgaaaaggctaagttatcaaaaccggaaacaaagagggcactgttctataagagttctgatgacaagggacacagatttggtggattaaggtctggatctcgtgtggctccattccaagaggacagtgattctacggttgtagtcagtaatgctactgcggatatccataagaaccataatgaatctgaagatttaacattgattcgccatcagcttgttcagattgaaaagcagcaatccagcctgttagatcttttacaggtttgttttccactgcaagaaaattgttttatatttttaagttatctttagtcatgtagttaagctaacttctgttgatttgtctttattgcccatttgaaatattagcctatttaacaattgggaggtaacgctttagttacgaatataaatgttcttttaaagtacctctcaagtagctgtaactaaccaccaacttttagagaggagtgcttttgctagaatgcacaaatgagatggatcttgtatatattcaatacaataatgttctttattttttcactctttgtatagttgacaaaaaagaaggggaataatgaaccaaaattgagaagttgacgcaactcttttatcattttttttattcttaatgcgcatgtgcaacttttatatattattttcatatcggtattagtgacctaaactaatgtgttaaactgtctctgtcccaaggaaattattctattagctactgctaatcttcttattgttacgatcttttattagcctttgattatagaaattatcgttttggttgacatgctgctaactaaaagctactggttgtgaacactttgatgaatttcgttatgtcgttctcttcttaaactcagaggttcatcgggagctcacaaaatggaatgcaatcgctagagactcgtgttcatgggctggaactagcattggatgggatctcatatgatctggctctgtcaagtggaagaatgactaaaatggattccaccataacaagatgttgcatgctacctggcgcagatttcttaagctcaaagttctggaaaagatcagaaggcaggtattcagcaccaaggatttctacctccagtggcaccccctcagctgcagccatgcgctttagagatgactcaaatagaaatgctgaaagatttaagtcgagccgcatgcttcaactgcagggtggtggtggtttcattgtgaacccgctagcggagatttcacgtaacccaatgggtaattcaatgtaacgatttgaatgaaaggtatgttgcaaaacttttatctttttgtctcgaactcctaacttgattaccaatatggtttaatgagaaacaatgatgaaccttcttttatgatatgatgaacccaattttcttaatccaattttactgtgatttccatcaccggattcgacagcttaaatgataccctttctgagagttctaagcaccaatatagaaaactataccgtaatgagcattaatatttgatgggtttgaagcttggcatatctgatattttacttcgtttctctgcagttgacgttagcctatgaagggcacaatttggattgcagttttaatttgaagacaagtcgatgtttgaactaatgaaccatcgaaatggtagaggccagaacaaggttatgtgcctatgaatatgatgatgatagtttattggtttttcaaaagaatcgcctctcctaaaaatggctacagcaaggagcatcatatttccatagtattattatgatgattataatccttttggagaaggaaaagtgggatagatatacacattaaaatctacttacaaagtgcagttttccgggctcttaagattattctttcgaaaaagaatgagactaccatctgaatatgatgccaatactatgccatattgagggtgaaatcaatgtatagcggagtagggactttcctttttcacgagtcatttgtatctttgtattgattggttatatagtaatgaaaatcgatgatcatgatgtcatataatccatgaaatccagctcttattttggtgtctcaaattatacatgtctaattacagtgaacacatttgatgagctaataagggtaataacactactaatttaggaaagagttcatagttgtactaggtctacatttaaagagaatcaaagatatgactataaagaagaaaaaaagatggatgtgatcaaaagttctttatgtgcagacaaaatgtccaaattgaaagatttgatgattattaaaataggatttaaatttatctaatgatctccgtcgctgacgttcgtcaagcaggccacgtggattggccagggtcttcttcggctaatgtgaactcaatatcattaagcatacatatacggacccaaatatcaatatagaatatagataaaaatgttaaaattaatacatgcaatggttccaaagtttattatataattgatatttattaattttgttgctatttattatgacaattctgacgtgcttgtctttttatgacagaattctgtaaaattttcaagattacacaaaatgtgaaaagtttgtgtacttttttcatcctagtagtaaccagtaaaagctgttacctaatgaagataacatacagatatataccacaaacatgaaacatgtaatcaaaatcaaatgttcttgagaaaaaatttaacttccgtatactaagtacaaaaacattgattatatgcattaatacggagcactgcattctccaattccaacaacaaccaaaaaaatattctttttggcttaaaaagaaacaaacttatttccctggacaaaagaatatctagtgaaattaaaaaatgatcccaagaactatactcaaagtctattagatccaaaccaaggacctcaaatcatcataaaattgaaccgagtagattaacagaggtttttacacctaaaatctaattcatactcgtacaagaaaaaaaaaaccataaatgttgtaagttcgaagttcgaactctggttgttgattcaaaatcattgtggttcctcgatagaatcctgattctcgagtttctgcagagaaatcaagccaaaaaagaaaaacaaaagaaaaatcttataagaaaaaaaaaacatttcttcatgtttaaattccttgataaaaagagatttaaacgacataaataagaatgacattggctggtagaaaaacatcaatagcaaggttacaagctgaaaaattatgtttgtgaataacaaacactgcatgaattaaccaatgtcggcaaaacaattttcacaatctcatgagtatgaataaatatttgagaataaatttgcaaattgtcaaaacttgtgttctgagttgtgacttggtaaacccacacaagataatggctaaacatcattcattttcatgtcatttcgaaaaattcaattactgaagacagcatttagatgatgaatttgacttctttcttcacataaaatctaaaaattatccgttcattcttatttggctttctcataacgttcttcatttgttatctcctattgggcatgcttcatgcagtcgagactcaagatcagtaaaacataatcaaaaccaataactagtatcatgaagacaaatagacataaaaaaaaaataaagaatattaacgaagagtgcagtttctatgtcatccaatttcataattctctcttctttctgggctttcacaggtacaagtgcttggattcttctaacattgtatgttcaacaatcaaattaaccatacacctctttgacctaaatacataaagtgacaaagttgtatccttatacgtctgcaacttttattcaacaaaccccatgaaaaagtaaacttgtggtggaggttgttattgtgtttcagcttaagaagactggtttgtttgtgagtgtgcggattgcagttttcgattgtgtattgtgtggagattgccagtctctctcaaataccgacctgagtgttttatcttttatgacattattcgaagaggctttcctaacatttgtctaactcctctttgtgttcaagattattcttgcggcaatatacatgagtatgccacaatcttaaaccgcaaaagcaatgaatacgatccaaaacatagagagtaccaagtaagtacccagtgtatcttacatgttctcttagttcaaaaaagaaaatcccttatcggcggctggatcatgtagaacttgatatatacattgtatgcttaaactacatttgggaagctaagaagttcaaaaataatgaacataagacattatttacagctaaactccgtaaacccattaaaataaaatcaaatacactgttaaaagtgtaaaagagcactataatgcaaaagcaaaagcccattttggctctgcaacttgactggttccattaaaattgaatgtgttattgtatgcttaaaaacttagaattgtaagagtgtatggctaaggtgcatgggttccattttaaaaccaattgtcaatgagaggtgtatcccataatcttatataccctcctcaattttggacttgaaaactaggtcaaattgggaattttgtgggtgtggcaaatttgtagatttttgaaaacccaacactaaaaactagaacacatttaaaggtccgaaatggaggaggcggaaacggaagtttttgcttggctctcataccatgttagttgagagaaactaactgagagaaaacagctcatctcatttgggaaatttaacggtgaagaacacaagcaattcctttcaacagaaacccatgacccattgaataaataaagcaaaagaacaatctttcatggaaattttgaaaaggatagaagggagggggaacaaggattagaagaagatttacacatacaaatgttttgctaagctatataaaaaaagggcatacgagtgaaatgataagagagatcttatttgaaaatttgtaagagggattaccgattgagctttgtgccaagcgaggcctttgtagacattgacggagaaagtggcggtgagatatacggttgccacgccaaggctcgccgtgaaagctttgaatgcccaatcccctgccttgcttgctattcccatctctctcttattttcgatcactgttcgagcgtggaaggactatatatattccttagagaacgacaagccgtattgactttgaactggtttgcttttgtaatgtttcatgtcgtttttccatagaaaaatttacttgacttatttatgaagacaaaataaataaatggggaatttagaagacaaaataaattttattgttagctttcgtcttttattaattgtatttattattttgaaaatttatatctattgttgatgcagaaatttggacaaagaaatttgactacacttgctcgttagattggtgagatataatgagaattaagtataataaagagagatacaagaaatttataataattcactgttggaatttattttaccannnnnnnnnnnnnnnnnacaagtatgttgattaacaccataaatatgaa

SEQ ID NO: 15522 - DNA, 5452 bp, Cannabis sativa
  modified_base (5423)..(5426): a, c, t, g, unknown or other
atgttttaactaactaaaatacatttgttcctaataatcaaaagggtattcaatgtatggaatgtgaaaagtatgaatctgaatgtgtcaataccttcaaaacgaataaaaatggtttttatgttacttggagtggtgatgattctaaagatagtgaagatgaaaataaaaatattgctttaacaagtgtttgtcaattgttttgtaggaaaaaaaaagttttttgtttaaacaacactttgactgataacaatgataaagaagtttttctagattcagatgagtcagaacttgatgaggagtcattactagaatcttataaagtaatgtatggtaagtggttacaaatttgtgatgaggatcgttccttaataaaagttaataaagaattatctcacaacattgaagatctttaagagaaaataaatgttgtgaatctgaattgattttaagatattctgataacgtatatttaactaaggagcttgaaaaactaaaaaaaaaaaaatgttaaaatgctaaattcagattctaacattttcgaagagctttaaaatttaggacaagcgagtcttgctgatttgggttttgttaaggctcaatctaaacaaaatactaaatttgtcaaatttgaaaattttgtttctaaatgttctgacattactttgcagggttctaattctgaaaagaagtaggttggtaagtttagcaatcccaaaggtaaaaggaatcaattcattcttttatgtcattttttttggatacaatgtcatattcgacctagatgttttaccttccaaaatatgtttagttagtaatattttggaatacttcaaaataaagatgtttctcaaaaacaaaaatgggttatcaaaaataaatgtttagttggttcttcttgtttcaaaactgttgattctcaaatgtggtattttgacagtgattgttccaggcatatgacaggtgatagataatatcttgacaacattagaccaatccaatggggaaaagttacgtttggtaatggtctagctggaaaagtcatagggatgggaactcttaattttgaaggtctacccaggcttaagaatataatgttgattgaaagactaagagctaatctccttagcattagtcaaatttgtgattagggttacactataaattttgatagttaccattgttatgttcttaatgatcatgataaaattagtttgcaagggtgttgatcttatgataattgttacaacatcactacctatgctacttgtcactctgctattgataacaccacttatttatggcatgaaaaaattagacacattcattaaaaaaaataaaaaattgtccaatgcatggattcttcgagagttacctaaattgggtaagagatttgaaggaaaatatggatcatgttagtttggaaagcaactaaaaatctcacagaagtgttcctaatgcgaatacttccacagttctcaaactacttcacatggatctgatgggtccaattcaggttgaaagtttgaatggtacgggtatatttttgtgtgtacaagtggtttctctcgattttcatgggtagatttttagggaaaaaaattcaatacttttgattcttttaagtccctttgtttgaaattaaaagttgaaaaatattgcaacatcgggatgatagtttgtattaggagtgatcatggaaaggatttgaaaatattatttatgatgaatttttttaaatctaatggtatttctcatcaattttctcctcctaaaactcctaaaaaaaatggaatggttgaagatcccaactttcttgatcatgtttataggttagacaaggttttgtattgcttgaaataagcacctcgtgcttggtatgagcatctaactgagtttttgatttctcatgattatagaaataagagtttttgtccaacatatgcaataagagtttgaaatgagcagggtaagtgaactcacctattttttgggtctccaagtgaaacaaactgatgaggacgcatttgtttcaagagtaagtatgcatagaacttgatgaaaaagtttggacttaaaaataccaaacatgctaatactcctatgagcacaaccttgaaattatctaaagatgaactaggactaatgatagatcctacttggtactcaattatgattggtagtttacttgatcttaattctagtcatcttgatatttgtaatagtgtagatatttgtgctcattatcaaggaaacccatggaattacatgtttttgttatgaaaagaatcatacgctatgtaaatagtactattgattttgggatttagttttttaaacacactaattctaatatggtttgtgatactgagtggccaggtaatgcagatgataggaagagcactagtggcgaatgtttctatcttggaatcaatctcatttcatgacatagtaagaataaaaactcaatctctttgtctacaatagaggttgagtgcattgcagcggatagttattgcacccaactattaaagatggaataaatgatggaagattatgagtttaatttgaaaactttaaccattttctatgataatactagtgctataaacatttctaaaaatatttttcaacacttccgtactacgaacttagacattcgttgtcactttattagggagctcgtaaaaaaaaatcttttcttagaatatgttgaaactagcaaacaaatagtagatatttttactaaagtttttgactatttctctaaggaaatacttacggttttgtactatttaattactgtgcacttcatggttcttgattttttgctttgactaaatgtacataagcttcgtctttctttttgctctagaaaaaagtttcaaacttgagagaattgcaatttattaattttattgataatgtttgtagtgtcatgtttttatacatttttagtttaagagaagttttttactcctcctaggaatatttgagttattaaaacagtgttatgtaagctaccatttttaaaagatgaaaaatctattaaaaattgtgtgttcaagctccattggatgaatagagctacctatctcaatgtgtgaaagtcgtctttaagtaagttggtactaggcaattaggagttatatagaggatatgctaccattgaggtagtgtgacagtgtctccattggttacatatactcagttaaagtctttttaacaatttgggcaatattctctgctttcactttcacgcacatattcttggcatatattttttaaaaaatatatatcataaaaattagaaaatggtcttataaagctgttatatactgtttgaattgcttataacatttttggtgactgagtaaattcttttcctatgtaacctatatgacttcattacactaatttattagtttggtaaaataatttatgtgttatttatattttcggcaaaacacacgtgaattccaaataaatgcttaaggcccatcagtgggctcaaataacataaactgggtcgaatctaggatccatttagccttctgggagaacaacaacataactcgcctaggtaaggttccgtcaagcctaatcagcatcaggaagatttatcaccatatatttgacagaggtccccggtgtttatccaacatcccattatagtttcctgttttttgtctcgcagaagattaggaattactttcccaagatcttagacagagaacaatatcttgctaaaaagggaactgaataattggaaatcagtaattaatatgtcattaattacccacaaatataggacatggtatgaaaaaatagcattgtgataaggcctccacgtcagcatacacaaggtgccttatgggtcaggcttcaccaaatatgcccaaacttaatgtattatttgtaaactccctattaaagggaaaagggtaactagtaagacctttataacactataagtactcattgaatacttcatgcaaagggttagaaattcttgacttacttgcttaggcaaagaatagagcgctcatatttattgtaatcccaaaggcttttttagccaacctcataataatactgagtcgtggactaaggctcgttaacaccctaaccacgtaaaaatcctaagtgtcttcttcatatattttttcttgaattatattttctttagctcttatatttaataattagttttccgaaaactcgataaatattttggtgctttcattaagagctgaataaagcagtgatacatcaaaaattacgttcagtaattatggtactcacgcaaataaagtctagtcttcactaccaagatacctcgaaggacgatgtcgaacctaatgccaaaaacaagatttgatgaagatcgcgctgatgtgactagtcgccaaaagaggaaagattagcatgatgagacaaaccttcatgaagatcccattgatgaaggagacgaagaagaagaagacgagtttgaagatctagatcctatggatccagaagacaatgacgttaataaaggagatgagtgccatgagccaaatcttgaggttgttgagatggccaaaaaactagaagcaactgaacaaaagttggcggcacaaacagttttctcgattaatcctcaggttaataatgctgggaaaacaaatcctaaaaatcttgaccccgcaatcctcctaaggataaatagaaaggacagataggagaaacctacaaaaaagttgctccaaattatcagtaaaagagaacaaatcctgtcagtcagcctcctgagaaaaagaaaggggccaatgctttagggtaaggtcattggactgattctagaggcaaaattatgcataaggaaaagtctcatgctcaggcacgaaagtcttgaattctactagctagagtgatgatgtggatgaagtttatccaatatcagaagacagaagtggaagtctttcaacatacgatctctgggcacaactaaacgccaagagggaaaaggctagaaacaagaaagcctgacctcatggagatgacctaagaaaccacatcaatgactgaatttacataagagacccatgatgtaactactcaatgtctggaatgaaatattgaagagctgacaaacctcatggagcacatctccctgcagaaaaatggaactgtgtccgacttagaagacgaggacacaaaaccatgtgtaaaaagaatcatagaagcacaactaccagaacacttcagaatgctacaaatggatttgtatgaaagtagaacgggccccaggggccatctatccaaatatactagaatgatgcaagtggcctaggtaagtgatgatacaaaattccttttttctctttaactttatccaagtccgcaaaatattggtggaaaagatgttgggttttatgccnnnnataaaactctttacaatctgattagt

SEQ ID NO: 15523 - DNA, 10787 bp, Cannabis sativa
atctcaatagtttaggggcattttcaatgaccttacaagtttagggggcataatttagtacatgtcaaagtttagaggacaaaactcctaattagccattgtttttttttgtgaaaagtaaaaagtgaaaaaaccatacatggatataagaaggtcctaccgggagtcgaacccaggtcgctggattcaaagtccagagtgctaaccactacaccatagaaccaagtcgtacgaagcaaacccatactataaatgtaaacaaactaaaattgttaaaaatggctacagtcaaatcatttataaaaggtgctatatggacatcgagggcttgcttgaggacattttatatttgttgctattatagacaaatctaatatcaactacattctatagaccgttcttttcagctacatacattgtaatttgtaccctcaaatctaaaagactgaaatggcaccactgaataaagtcagtgatcattatgtctaatgatttaagaaacgaaattagagtttcatttctaaacaaacactacatagctaaagagtatttaagatacccaaattgttaggatatggcatttggttagtgagatctcagatctcatacttatttacattaacaagactatacaagaacttttaactgtataaataactcttttaaaattaataagatgtggacaaaagcagacatttcaaaatgagtaaaaagtagaggcaaaaaaatgacgtgtacatgatatttaatatgatttgaaaccaatacaaaataaatgtgtttatgagtttttcttaaatcagtttgagtctttttccaagttgacatggctaacttatttataaacatataccttttttgtaggatgtagattagtggagatgacgatgacttgaacaaaatataacacctacacctttgtttttgttcttgttcaaaaaaaaacttattcttatttcccctatctctaagcactaaaggaactcttatagaaatagctttgagaataatcaagctttagaattttctagcaatgtgcttttttgatagaaaatttctcttctcagtatgagcaccttagatctctttatatagtatttaggatatcaccatttgaaattctaattcacaagtcataacttctatggatgttatggactcaataaagagatgtaactcatgcacaccataactcttatagagatataactcatacacaccataactcttatagcattaagaatttcaaattaagatgtgtaacaccttttacactcttaatgttggtgataatggtagaaattactcatagtaacaagtaaccccccaaatattacaaaaagatgccaattgtcatatgttgcatattaatttgttacacatatttaatctatacattattttattggtaaataatataacattgcgccgtataagggtcgtattgtattaaataataattaacactgtgtttggataaagtgatgtattatattaagtattacgaccaaaattttcaatataatatatgttgtattatttaatacataacggtcggtattagcttgtattaaaatatttacaaaagattggggatcaacaccaatctctgacgcatgcgcatgagcacctgcatgcgcatgagcacgtgcatgcacgtgggctacaacacctttagatgttacgcacacgcgcacaagcacacatacaaactccagtcctagtaaggttggatgtaagctcacaaacacacgcgaattcacacatttatgcagattttttatgcaagaaagaaaatgatcttaactaaacatttccattaaaaatcattgatagctatagaactaaatatacttcaaatgttacatggtttttctgaattgaaataatgattcctgattttgagattacatgtctcaataaaacatagtcgtttaatggcttttctaacttaagcaaaacaatgttaaaagaaaaaaaaaaactaagagacaatctaaatccatttttacaaaaacaagctatcagtgcatgtcccctgtttttttttttcctattgcacctaacttaaactaaatctctagtcttatcccacttttagttcgagagaagaatttggcaaaaccatttctgttcttctcagagctgacatgagttgactgtactgtagctgaagttgatgaagatgatgaagaagacgaaggtggtgaaggattgtcatggtttttgctttgtgcaggagcagaactttcctccgctgcttttgatgaattagaatctcgttttggtgaaaatgtctgattagagtgcatcttccagtgttgtccagttttttgaatcagtggtgcacctgcagggactattatgttgggagcatcaatcaagaaatcttctaatgttgctagagatttaagttgattcccaagagatgcaattgttttctggcactctgcaagttttgtagcagctacagccaggtcttcctgtaatataaaatcacatgaagcacaaaatggttttgctaacatcagttaaaggatcggaattagtgatagtgtggacaaaaacagacaagaaatacaagatgcagatatgtttttcattgagaaccaacctgctttatcttcaactcgctattagagcattcagtttgctgaagttgaacttcgtccttctctcttgatagctcctcctctaagtcctgacacttaatggcaatttctgctgacagtgccctctctctttgaacctcttcttctagtattttgacttttgcaaacattgtccttgtttctgcttctaagctgatgagctgagtttcaatcatctgttttgactcttttgcaatatttagttcccctttcaactcctccaattttatttctgcttcaatctgaagtcgtggtgcctcagacatggtacttgtttctgcttccaagctgatgagttgtgtctcaatcatctcctttgactcttttgcaatatttagttcctctttcaactcctccattttcatttcagcttcaatcagctgaagtcgcaatgcctcaatacagtcttgacttttcgttaaagcaatctccaggtcagatttttcagtttccaacttcttcagttgctcttccaactcaacatttcgttgaatcatggctttaagttcagtttgcaggacactttctcccttcttggattcattagcacaatgcttactttttgttaaagcagtctcaaggtcggccttttctgtttccaacctctttaaattctcttccaactcgattgttcgatgaatcatggtttcaagttcagttctaaggttattttcttcatgtttcaacttagtagcacagtcttggctttctattaaagcagtctctagtccagcttttttcatttccaacttttctaatttctcttccaactcagctgtacgatgaatcatagcttcaagttcacttctaaggacactttctgcatatttggattcatcagcgaagtcttcacattttgtcaaagcaatctccagttcagcctgttttatttctgactttactaatttatcttccaactcggttgttcgttgattcatggcttcaagttcggttttcaggacactctccctattgttggatctattagcctcaatacaatcttgactttctcttaaggcagtctccagttcagccttctctgtttccaacttctgtaatttctcttccaactcagctatttgctgaatcatggcatcaagttcagttcttaggacactttctctattactgttaggttcatcagcaacaacttcagattccagccaactgctttcagtgggttgtaatgcagcaagtcgctccatctcaagaaaatcatccatcaaattaatttcaatggaggaagatgggagatttttattaacagtcttctcgttcttaaattgatcaagttcagcaataagggcagacgcccatgaatctgaagaattgaggtcacatttgcttaattcaaagctatggagcttacgtgtattgctttccactccatttaggcgctcaccattgtctgaatgactatctgcaaaagactcgacataagttgaggaagcagtcgtggatttgtggtcgttacccaaggatgatttacaaactattgctttcaactttcgacactcagcctcaagctttgcaaccttcttgatgctttcaagatgttgcttgctggctgtttcagctgcttgagtactcaagtccctctcaattgcccttatttccaactcctccatttgagcttgtatctcaagattaagagctgaattttctttctccaaaatttcaagcttaagacaaagatcaggatccacacgggcagaagatttattatctccagctttgtttttgagttcgacaagttcgttctcaagttggcattttgtagattcccactcttgagttttctttgacacagcttcttgaattttttgctcttgttcatctcttgcttgtctcagctgcctgacacattcctttagtgccccatcaagatgacttgctcgatcttctaatgatgagttttgttgaactgcagcctcaagttgttgctttaaaattgtcacttcattttcagccttttcccagcctaaaatgacaattgacatttaaccattgagtatgttgaaatgcagaaaaagatagaaaaatcactgttaaactaaagaaaatagtttggacaagaggcagtttacagaaaatctcaagtctgagacattattggcaaaatccattgtccttaagttattcactacaaattctcaaccatttaactctcaaccatccgcacctccaccgaaaggggggaaagagtgtgtacttacaaatgcataaacaagaaacagatttttcccttttcctgagtcgtgtagtttttatggaatagaaaaaatatgacatcccttgaaattataaatggaagaattaaaatttagattttcagtgccactgtacaacactttacaccttacactttacctgcaactgcttcttcagcaactttggcatgctgcttcaccaagtcttccttggcgctaacattgacaagagctgctgataatctctccgtcagagtcttcacactataattaatgtcttctgattttaatgaactgtcatccgaattttcagtaacggctacagctttggatgatacctcgggctcaagtgactgagtatagtgattaggagaccccttaattgcatcctgctataattagagaaaaatgaacaaagactaaaacacaacttcgattccatgtttttactaaagcagacacttcatcgagcaagaggagaacttggaggattttgtgacaataattcagatattctcatataagtacaaacgttgtacaagtgggttttcccataataaactactctttttttctccttctttagagcttgaaattgcaaataataacaggattacaccatgatgacggatagtacttttcagtgctcagaaatcagaatgaaaggataactataagactacgtttcaggtgtgatataaaagaacactttcaaagctcaagtggttttaatctactcaaactagtcatgaagattttccaacttgaatctattgacattataatcattttttttttatcaattctcagtgaggctatatacctcttactcatcttctctgtcaacatctttctaccctttaacataagaaatgacatgaatgccatatcaagccaaccgagatccaacaaattggcatatgggaaaaagtatgaagtctagctggatcaagctccaaagggatgcaacctaaatattcagtctttcttcccttttctttttcttttttgtcagagtggaatttttcatattcttagatgcacaaaaatctcttaagtagtatacaaaagaagaaacctcttacctgaactcaaatcatctaaactaagccttgaatatttataaaggctccaaaacattgaatacggctcaaatatttagttttagaaaagttatttgtttttcactgctacaacttagtttgacgaagcaatcttttagagtagcaatagaggtcttcaaccactacagcctataaaattcatcagtaaaagcaggtttcttcatatagtaagtatagggctaaactgttgtacaatacaacagcagcaatgagagagcaaaagcagcagagaaaaaattccaatgaaatcaaattaaggtcttttttaagaggtcaattcaatgagcagcaacaaccaaagcagaagttcaagccaaagtgcattaaatacattaaaacaattgcaaaaagtaaaacatctctaaaatcttgatatacttgagctaaggtttcagtacctgatcatcagacaacctctcggaatgggaagatacagaaccagtactttcggattcacaagggctcctctcagaagactttctcttccacaaccatttccgtttttccatcttcaggtccttaattttaacacagctaccacatcaaggtgcatacatctgcaagcaaattaaatacatatgctctctcactatgttctcaaacggcaaaactcattatatatacataatacatatatctataaacaggaagcgtgaaaagaaatattcccaagtaccaaaaaatggtcaagctttttagaaatacaaaagataaacagttaaacaatggagaaaacgttgctttataatattctcccagcttcacttcaaatctatactccttcagcttaatcttctaaccccaaaattattattttttttagcttaagagcacaaaaagagaaaacgttgagaacccacttacacgttagtacatttatgaagatatgtagctccacaatggcaggaaaaataaaccacctttgaatgagctatgaaacactctaaagctgtgagcttaaagaaagctttgtcttcaaattttgaacttcagggaagccactgagaacgaatgaaacagtagtttgagggagaaagaatgaaggatataattcaaaaatctgggaaacccaattcgaaagatctcgaatataaacgacccaccaaagagaaaatggggaaaaaatgaggaattttaaattttaaataaataacaattaggaaatataaaataataattgcagtttattattatagaataatggagcaaagagaaaagaaatatttaatgatattatatatatatatatttgaagaaacaagacccagattaagtacctttgactggattgtagagacaagagaagagaacatacaagcaataaatttataatttcaaagcactaataataaatgaatagagaaaatgggttgaaagaggcttgatatttaagatagctgagcatatatttatgaaaaaagtttacacaatacaataagtctgcacatatctctgtagaatgtcagttgggccttttttttttttacagataatattaagttataataataaaccaaatgaatgtactatataacagataatatagtattggcatgcgttttctatttcttgtttttcactttaccttacttatttgtttgaatacaactatattctaaaaatccaaactcattaaaggtggagcatgtgattgtggactcgaagttgtcaaattcaagattgacacttgaaaaaaaatatatagaaactttttcagctttttcttataaggctccaagcactaacttgtttcgtcattgagttttcctttttccttgtttcgttggtgtttggattttgaaattgttcccgcccatgactatagtcccaatggattttaaatattatatcatattatataagtaggtagtacattttgatcaaaatgcatcaaataaacattatattaactaagtagagcttaatgtggagaggagcataaatttgaactttttggcatatttacctttgtgtgtgtgtgtgggaagggtgtaagtagctgtgttgtctggttgtggagagtgtgagtgggtgtggggtctgtggtttgctctcagcttttcatatttcaacgctgttagttggcgtttcagcatagtgaaggaatcttagtactagaaggtgagagaaaaaatggacggttgagataccatcatcaccctctttcatatatcttaattttacattattatatctctggaagaaattgattgttttttaaaaaatgaagtaagaaagcgcgagacaaatttatatgctattagcaatatttgagtcataaatatatttttaattgagtaatttgtggtataaatatttaagtttaattttttattgtaaataaatatttaagtttatttagctatattaagttgtatttttagaattgtgtaactatctaattgttgaatgttaagtaaattgctacctttgattggtccaagtcatgaatttttattttttttaaaaaaataatttaaatatatcaataataaaatgatacgtggataatgacttgatatttaacggtcacgtacttgcagaattctaaaaatataacttaattattattaccgccaaaaattaaacttatatatttatttaaaactcgagttaaacataaatatttatgctgtaaattactctttttaatttcatacacttatatgccaaatattttttttagacgaattaaatatggaaagttacattttacctattttcgttaacacaattttgttaaatataatagagattgatattcatctcgcgtgttactctattattagtccatgtgatattatttttacacattattactttatttataaataaaaaagtaattataaataataataaaaacataattataataaataaataatagtaaattgcgggaaaatccctcaatactttcacctcgctagcaattaactccctaaacttaaattttgtcggaaaaactcccaaaacccttgttctgttagtgttatccgtattttccaactagagacacgtggcatgattagaaaagaagatttgtcaacctcccggatcagcagagttaactaccaaatttcctcgcggaggtatctcggtaatctaagaggagccttatggatattcgatggggagagtcatccccagctcaagcagcgtctttgggacacagaagaaccatattcgtccccaactcaaggaagtcttagaacacggctcaagtaaatgacttttgggtgaagatttctacggactagtcgtggattgtaatcgctatctcaacgtgaatggccacgtcaactccatatggaaatcgacctacagacggttacacatttttttgacacaggatcagatcttatccgtcatgcgaggccattgtagtgcgcatacgaacctctagacatgtctttttcccaacggcctgtctacagagtattctacaaaggagaaacctttgagcaacacgtgtcttttatccaaatggtataatccactgcctccgcgcatcgcacgatcaagaagtttcttcaatgccggacggttatatttacagttgtattcttttacccttacaataggcagtagtacgaaaccctaggtgggtaaagggaatgcccttacccacatgtaagcctataaataccctcattttctatgtacaaagggtgaacaatttcatacttaccgaacctatgataaaattcctactagctttcttattcttcaagaaaaacaaaaggaataaagagctagggcttatatagtaaacacttgtaatattcaaatactcgcatgtaaggttaatacaacagacttgtgaactagggattattaatgcccgaaccacgtaaaagtcacatgtctatcatttattattttatttctttcttaagaactattttattagttttcaaaaatctcgataaacaatttggtgcttccattgagagctgagaaaagtttgctagtcgccacaccacctcaaccattgtgaacacttgaaagaacgtaagaaagaaaactcctttggataccgttgtggaggaggcagactttctcgcctccagtctctagccagacgatgtaagataagaaggtacaaccaatgctgagaaccaaagagaggatgccgagaacgtgttcgatggcatcaacgatgaccaaaaccctgaggatagggaataggaggacgacggcgatggctacgtgaaggactggtattacaaagatggttaccactatgaccaggacccgaacttgctatgagtgaccaaagaactagaggctacacagacagagttagtaaaatagaggaagctcactaaaaaaatgaagagaatgatggaacacctccaaaacaagttcaaagacttggcgaagtttgacaatgaccctttggtggaagtaatggccaaagagcttgctcacaggcaaactgaggtcgaaaccttgaatcctcgcaagaataaaggtaaaggcaaggtaaataagcccccacaaaagtttgctccaaaacctcctttgaaagacacaaatctggctggccagccctcgaggacacagaaggccactggtgcttttgagcctggacgcccttctgatcctagaggcaaaatcgtgccaaaggggaaaagtacaaaagcacctaagctcaaggggcggaggaaccaccctagcaattctgtcaactaggacagaaggataactattgggaattttgaggacagttggtccactatagacctccgacgacgattggacgccaagtacgagaggtataaaagtgaaaaggcaaggcc

SEQ ID NO: 15524 - DNA, 6816 bp, Cannabis sativa
taaaaataaagggcgaaagctaaaggtcatggagaataatgtgagtctctgaattggtaacaaacaagactcattatcatctttcttctttcttattcatcaccaacgactacaattcactacttttaactacgaagatattatctcataaacacaacatattcattctctctctctgttctgagttctgagctctctgttttgttttcatttctatcttcagatctttttctctgaaacccacaacggtttttgctcagaggaagatggttttgtgtttaagatgtttgttttgatcgttgcgttgtgagatttttctgggactttcttggtgtgagtgagttgtggagctgcttgctgctattgctgtttagtggggaccgagaaggaagaaaaaacaaatatgacaacaatggcgacggagggaacattctcgttttctgttgtgtctgtagtggaggatgttctccagcaacatgggaatcgtaataggggtggtggtcttgatttggaatctagaagagctgaggaagctggtactattttaacttagcttattttctacttcttcaccatgatacatacaatgtggtcttattcaattttcactactattttattaattaagtacccttcataccaatcaatcttagtttctaagctaaactcatctttcttatatattttgattatttttactaatgttaatgtactgccctttctctttctgatccacccggtttcattaggatctgactcttgagaattttggtgtttggtgtttatggccagtacttgtaatcttccaattttgaaaattttctgttctttttttccacatatatatttaatttagtttcctaattgtgtcttttatgtttttcctcagcttctagaagaaatgaagctgcagggtggctgaggaagatggtgggagttgtggccgctaaagatttgcctgcagagccttctgaagaagagtttaggcttggattgagaagtgggattattctctgcaatgttctcaataaagttcaacctggagctgtgtctaaggtcactttatctaagttgaaaaaagagtttatacgccatggttgttaatatgatgtttatctatgctatgtatattattcacatgtcttaattcattttcaggttgtggagagtccatgtgatgctgctttgatccctgatggagcagcattgtctgcatttcagtactttgaaaacgtgaggaactttcttgtggctgtacaagatatgggaattcctactttcgaagcatctgatttagaacaagtatgtcttgtctttagagatgaacaactatggttttgaagctaagaacaatattatggaactggaatttgacaaaatgtttttgatctcttttatgttcagggaggaaaatctgcaagggttgtgaacagtgttttggctcttaagtcctactctgattggaaacagagtggtggaaatggtgtctggaaatttggtggaaatgtgaaagttaccacgtccacaaaatcttttgtaaggaaaaactcagaaccgttcaccaattccttatcaaggaactcatccatgaccgaaaaaactttgaacggtctctcttctgatcttgaatataataaaatggttggtaagcttagtttttttatttgttggtttctaatgaaaacctttgtgaggtttcgattagttaaggatgttaagcatgttctgtttttgtgtgcatttgcagtctgattctggctccatgagtgcacttgttcgtgcaattctgttagataagaagcctgatgaagttcccatggtgtgtaatgatacatattcaatgctgccatttactaagtatcaaactgtgcaatttttttttccttttttacaaacatttttcgttttgttattttgtttgaacagttggtggaatctgtcttaagtaaggtggtggaggaatttgagcatcgaatgtctggtcaacaatatgaaacagtaagttagttttatcttctttagcaagtttaagatatcttatgtctgtactgttatatataaatttaactaactagttctttgtttatgacttactatattttatagctaaaaccaactccaagggacatgtctatttctaatggaaacaagtttatagccaaatctacttttggtgatagaaaggtactcttttctcatttaggcctattaaaacttcaagctgagaatttttgaataaatgagttcaattgtaatgtaagcaactcattcttatcgttcacttttgagtattgtgattcatcaggtagaagaaaaacatgccaatataataaaggcagagcagttccaaaagaattgtatttctgatgaggagtcaaaaagaaagctactaaatcaacaattgatttttgataaacaacaaagagatattcaggtatgcaaagttgagatataatatgtcatgttacaaaattgaaactgtactaactaaggtacttattttagtttctaatttttaatttttacaggaactaaaaagtaccattcacacaacaaaagctggtatgcaattcattcaaatgaagttccatgaagagttcaacaatcttggtttgcacattcatggcctagctaatgctgcatctgggtatcatcgagttcttgaagagaaccgaaagctgtacaatcaagtacaagatctcaaaggtaaataagatcatccattgcctaaagtccaagtattgtcttcatcatatttctagccctttgaaatacatagactaattgcatagttttttttttttttttttgtgaatttaggaagtataagagtttactgtcgagtgaggccatttttgcctggacaaccaaactctttgagcactgtggatcacatagaagatggaaacatcacaattaatgccccttcaaggcatgggaaagggagaaagttgttcagctttaacaaagtatttgggccatctgctactcaaggttagtaacattctcatgttgttgctctcttaattgttgccaagttatcttgttcttattttaatatcatcatcattatcattttttgtagcggatgtattctctgatatgcagccacttattcggtctgttcttgatggttacaatgtttgtatatttgcatatggccaaactggatcaggaaaaactttcaccatggtacagtacaagtgtttataaaattcaaatttatacactgtcttctgcaatgcaatttaacattttctttttctttttgttttctcttcatatgtctagactggaccaagggatcttacagagaaaagtagaggtgtaaattatagagcattgggggatttgtttcttatagcagatcagaggagagatactttccgctacgatgtttctgtccagatgatcgagatatacaatgagcaagtcagggatcttctggttactgacggaactaacaaaagatatcctttttaacttgtgtttattgagctataaacatatatctatattacaagaagtatataagctacatgaaacttgtcttttataattttatagttgatagtatggatacctaagagggatgactgaaataggtggtatgcttgtttagagtccttttttgggtactgcatagtgattgttatagtttattaagcagagtcttcctactagggctgttttttcttaactaataacacattagaaatccgtgttagttcccagacaggactaagtgtaccagatgcaaaccttgttcctgtttcatcaacagcagacgtaatagatctaatgaatcttggacataagaatcgtgttgtgggtgcaacagccttaaatgatcgtagtagtcgctctcataggtaacaatctatttatctctttatttgcgtacttgtgtacgtagtttttcccatgcatggaaaaatttcatgtcaactagctgacgtagttttttaactaatgatcacatgcagttgcttgacagttcatgttcaaggaagggatttgacttctggagctgtccttcgtggctgcatgcatctagttgacttagctgggagtgaaagagtagacaagtctgaggtaacaggagatagattgaaagaagcacaacatatcaacaaatctctttctgctttgggtgatgtaatcgcttcccttgcccaaaagaatcctcatgttccttaccggaacagcaaactcacacaactactccaagattcacttggtaaccatttatttgtttccattcactcatgttttgttctcttgcttttctttcgaaatatcctctgatcattgctttgtggttcttgtcaaatatctataggagggcaggccaagacattaatgtttgttcacataagtcctgaacctgatgctattggtgaaactattagtacacttaaattcgcggagcgagttgctacagtcgaacttggagctgccaaggtgaacaaagatgggtcagatgttaaagacctgaaagaacaggttgagttttcaattttaatattctcaaaaccttccctttcccatccattactattgttttagtgtttttgataactctgactggtgcagattgctagtcttaaggcagcattggcaaggaaagatgatgaagatgaccacaaccaactatctgtctctggcagtgctaataacaagtacaggacaaaagctagtgaagtatctccttttcagtccaaacttcagagttcagacatagaagtaagaattttttgctttatcagtttttgcacattactttcttcatctacttattcctaatatgtaatatctggttttgtacaacccaattggggtagctcaaattgttgtattttcctgtcttcaaaaatctggtttgtacctgattgtgtgagagttggtctatatttatctggtttctttctgatgctgcagaatcataaaaactcttcactgaggcagaagaggcaaagctttgatcttgatgagctactggcaaactcaccttcatggccacctgtgaatagtcctggccataactatgtggaggaggagaaagacatgagctcgggtgagtgggttgataaagtcatggtgaacaagcaagaagtaagcagggttgaaagcaaccctttaggaggatgctggggaacagacaatggaaatttatctgacatgttgtaccagaaatatcttccagattctacaaaactctatcaggaccaatcctacaacatgttcatgggaggaaacaaccgattcaatggcagcggtgttagtactgatgaaatggatgatcttgatgctgccaccagtgactcttcagagccagatttgctttggcagtttaatcagaccaaactctctggcataaccaatgtcattgactcaaagaccaagaaacttaatacaaacaagattgccaagagcccagaactaaggtaaagaaaagacccttgatctgtataatccattatttctacttaaaacaactaaacatgatttttctaacaagtcctcacatttaacttctacagcaagaatttcaattcttctctgggcccttcaccttcccgaaaagcttcaaatgcagtcccacatcggatagggaggcagccagccccggttgacatgaaacgcaaaaccgggaacagaaagtagaaacaaaagagtgtcacactatcgacacattgagtggtgaatatatctatgtataatttttttatttttttttttttttcatttgttacagagaggtttctttttttgttttttttttttgttttacttcatattcttcttcttttaaatttttttatttttttattttcttatatagagtttaactgcagcaataaatccagttgcttgtatatttgtactgagttgatttacttagaaaaaactcctgcctgcttggtgtggatgacatttacacagatgatttttggtcatagaatccttgtgttccactacattatttttattattaatgatccaaaatgatattctgagaagtaaaagttgtgacattgtaatatagctggctactactactactaccatttatacatcactgaatggaaaaagcatatacagacgggagaatatggagaccattagctagagtaacaaaaggaccccagaggagattggaaattctatgtgcttagtgtcccaattgaattaaaaaaattggcccataacgttaaattgttaccaaacatgcactgtgcagatgagatccgtgatgtgattggttagtctatttttttttattttcaaattttattaaggcaaaaaccaaataaaactaaggccaaatacaaatagggagatcagaccattacacttatcagtctcaatagacagctaatttggtaagagaaggagctgtggagttggctactctgttacaatgaacaaaagataagctatgtcatgtaggtgtctaggattaccccttttacagagtattccaccacttgttaatcacctcttagatttgaaaacaatctgtttctatgataattgattggtatccagctgcttacacaggagatcctgtggcacgacaggcttcatccacatgaaatttggaggtttgccaaagaggaatagcttaagaacccaaaactccacttagttgcacaagaccactcctaacctgaacttgttttgaagagagtagagctattcaggggggtagcattgggcctcatacataaaatccgccactgaaaagaagccttaccatttttacccaatgcctggtggttgtctaaaatttgatgggtgcgaaaatgaaga

SEQ ID NO: 15525 - DNA, 15854 bp, Cannabis sativa
  modified_base (52)..(69): a, c, t, g, unknown or other
  modified_base (15797)..(15810): a, c, t, g, unknown or other
gaacgcatttttgtttttcaaaattaatttttttaaaaacaaaaattttacnnnnnnnnnnnnnnnnnnaaattaaaaaacaaaagtattaccaaagagcacctaatattttcataatatataatagtgtaatttaaagtgtaattaataaactgtaatgaggtgagagttagatgaacattcctaatttcagctcagatattacaaaatggctgctatgtaatttgtatacttattatcagagtctcaaataatggaatggcaaggcgtggattcctcaaacaactctccggtgacctctctttcgttgactccacacccttcgccaagctcctggattcttgcgccagctccaagtccgctcgccatacacgtcgtgtacatgcccgaatcatcaaaactcaattttcctttgaaatttttattcagaataggctcattgatgtgtatggaaaatgtggctgtttggatgaagctcgcaaggtgttcgataaaatgcctcacagaaacatttttactgggaactctattatatgtgcgttaacaaagtctggttttcttgatgaggctgtccggatttttgagtccatgcctgatcatgatcaatgcacatggaattctttgctttcgggattttcccaacatgaccgatatgaagaagcagttgaatgtgttattaatatgcaaagacaggattttgtgttgaatgattactcgtttggtagtgctcttagtgcttgtgcagggttaagagatttgaaaatgggtattcaaatccatgctttgatatcaaagtctccttactcttctgatgtttatatggggtctgctcttattgatatgtactctaaatgtgggagtgtgattttggcacaaatggtttttaattggatggaagaacgaaacattgtatcttggaatagcttaattagttgttatgagcagaatggtcctgcaagtgaagcacttgaagttttcctgaaaatgttggattgtagtagaattgagccagatgaggttacattagccagtgtggtaagtgcgtgtgcaagcttgttggctataaaagaaggacttcaaattcatgcccgtgttataaaatgtgataaattgagagatgatcttatactaggaaatgcattggttgatatgtatgcgaaatgtggtagaatcaatgaagctagatgggtttttgacaggatgccaattaggaatgtagtctctgaaacctccatggttagtggttatgccaaagcagcgagtgtggaagctgctaggttaatgtttacaaagatgagtgagaggaatgttgtttcttggaatgcacttatttcggggtacactcagattggggaaaatgaagaagcactttcactcttcctcctcctgaaaagggagtcaatatggcctacacactatacatttgggaatctgctcaacgcttgtgcaaatattgctgacttgcagctcgggaagcaggctcactcacatgtggtgaagcatggatttcggttccaaaatggtgaagagcctgatattttcgtagggaattctctaatagacatgtatatgaaatgtggatcaattgaagatggctgtcgtgtttttgagaaaatgttggagagggatcgtatttcgtggaatgccatgatagtagggtatgctcagaatggatatgggactgaagctcttgaactattcaggaaaatgttggcattgggggaaaagcctgaccatgtcacaatgattggagtactgtgtggatgtagccacgctgggctggttgaggagggccgtcgatatttgtactctatgaccgaagagcatcatttggttccattgaaggaccactatacatgtatggttgatttacttggtcgggctggtcatcttgatgaagctaaaaatctgatagagacaatgccaatgcagcctgatgctgttatttgggggtctctgcttggtgcttgtaaacttcatcatagtattaccttagggaagtatgtggcggaaaagctcctagaaatagaacctatgaactctggaccttatgttcttctttcaaacatgtatgctgagctcggaagatggggtgatgttgtaaaaataagaaaattgatgaaacaacgaggagtgatcaagcagccgggttgtagttggattgaggtaaagggtcatgtacatgttttcttagtgaaagataaaaggcatcctaaaaggaaggaaatatatacacttcttatgtcacttaccaaacagatgaagagagctggatatgccccagattcatgtgataacgaggtttatgaagaacagagtgactctgaagttgagcatacctcattctacataatgggtatgccacaagatgttgctgctgctatataatttctagtcaattgttatctaaatattctctaaatgctaaagcctccattaatcatcaggcagttatatctgttatattcaaggctttagtttggagtttgtgttgctgtcttatgttgccacatcagcatttcaccttttaactaacctattggtaatataacatctgttcataagaactggttgttagtttttgtgtttctagagagtgaaaaccgaatcgatttgagaggatttttgagtttgtaatttgagttctttggagggtgtatcacgtctgttctaatactgaaaattagagataaaatcccttccttggatgtagttttctcataccgaaaattccaaatcaagtagttgttttcttctctttgtttctctagttctctgtgctttgcttgttgattggtttataatagcaagatttttgcttatgttgttcttcacaatttgtattatattgttgttctattcaattttaaatgaacagtattactatcaagacttttctgtattgattgaaagcttaatagtactttgatcattaagttgtatgatcaagtgttttttcttttatataatatatattatcagatacaaacaatttacattatgtaaaatctaacattatatatctttctttgtagtgttgagtgggagatgataggtatggttggttccttaaagcattatttattggtcacttaatttagtattgttggtgagctaagctaaatatatagtaaaaattaataagtaaaatgcttgttgactttaaacttaaaactaagaatgaggtcagctattattcaaatgcatatgtcgtttgtttatgaatccttatcacttactatgttgtctttttcatgttgtgtgtagacttttagaaatttatcatatgatataacaataataataagatctaagttaacagcttttgtcataaacaaaaatgaaaattatgtaatttgttggtgacatattcatacaacttttacagtccattgagccagtaatttgcttctataatcattgttcttgatcctcattcattccctagcttcaacatggctgctgagatggttgctggcgctttgctctctgcttcgcttcaggttttgtttcaacgattggcctccgaggagataccccggctgtttcaggggaagaagctgattttagagcagctagatgagttgaacattgtgttgttgtctgctcatgcactactcaacgatgctgaggagaagcaacttcaaaacccggaagtcaagatgtggcttttcaatcttcaagatgtgatctatcaagccgatgacttggtggataggatcgactatgaagctctgcgatccaagcttggaggtgatgaatccagcagctcctcgagcaaggtatttaaacaattgaaatcccggttaccttttttgtcccaatttgatgaatctgttaggcttgacaccgtggagatccttcgtaagttaaagattctcgttgatcaaaaggatgcacttggcttgagagaaggtgctcaaaacaaactttctcaaaggccaccagctcctttagtagaacaagctgatgtttatgggagggctgctgaaaaagaactcattgttgatctattgttgaaagatgatgttgatggtggtaataagatttctgtcatcccgattgtagggatgggaggcgtgggaaaaaccacacttgctcaacttgtttatgatgatgatcgagttcaaaaatattttcagataaaagtatggattactgtttcggatgagtttgatatttctaggataacgaaagaaatatatgagggggtcatttcctacaaatgtcatattgagaactcagaagaaattcggaggagattgaagaaagaattgaagggaaaaaaatttctctttgttcatgatgatgtttggaatgagtcttattctcagtgggacactttgaaaagttgtttcaactctggggcaaatggaagtaaaattatagtgactacaagaagcacaattgtagccaacactatggcaacttgcaagattcatcaactacaaactttaatgaatgaagattgttggaaattatttgtcaaacatgcttttggaaacaaggttgatctcaatgaaaaccaagaccttcaagtaattggaaggaaaatagtggataagtgcaaaggccttccgttagcaataaaatctctaggtggattgttgcgttccgaacgagattctaaaaaatgggaagacatacttaagagtgacacatgggaggagttgtacaagaaagagggttctattcttccagctttatggttgagctatcgtcacttacctgcacatttgaaacgatgttttgtgtattgttctatttttcctaaagattatgagtttgatggaaaaggcttgattttgttgtggatggcagaaggttttttggagactgataaaaaatataaaaagatggaggagcttggagaggaataccttcaagatcttttatcaaggtcattctttcaacattcaagttataagaaagaatcctttctccaaatgcatgacatggtacatgatttagctatgtttgcatcatctggtttttgttttaggatggataagagtaatgatttacttggcctttcaacaaagattcgtcatttatcatatatgaagaccgagaaatacgatgctagaacactcaattgcttaagtgaagctaattgtttgcgtacctttctagcattaccattcgaacaagactctgtagataactttctaccgtatgatatgttgctttccgcaggaagttgtttaagagtactttctttaaacaactcttctatcacgaagctccccgattcaattggcaatttaaagcatttaaggtacttggacttgtcttgcactgcaattgaagagttaaacaattcaatttgtactttgtacaatttgcagactttattgctgttaaattgttacaagctttctcaattaccgaagaaaatgggaagcttaatcaacttgcgatacctggagattgatggtgtgcctttgaaagagataccagaagatattagtaatatgaaacacttgcaattcttatctaatgtgattttgagtgacaaaaatagtggtggatttaaaatgaaaagtgtagcaaagcttgcaaatttacgttgcatttcagggttagaaaatgtcaacaatgcaacagaagcttcagaagctaatttgaaggataagaagggcctttcaattctaactttgatttggaatgctaatggtagtgtggctgatagttcgcaaaaagaaaaggatatactcgatgcacttcaacctcacacaaacttggagcatctcgggattgaaaattatagaggtacaatattctcagactggattggaaactcttcaatttctaatttagtattcatcagcttattcaactgtaaaagttgttacactttaccaccactaggacagctaaagtttctcaaagatctcttcatttttggatgtgatagtgtgattttaataggtgatgagattcatgacaaggaccctctatttcgttgtctagaaaggttaaggattgaaggtatgttggagtggaaagattggtcatttagtagtgaagttgtgcaagaaggtcaaatattccctcttcttaaaacacttgtcatacataattgcccaaagcttaatgctgtcttaccttgttatcttccatccttggaatctcttcgtatcttgagttgcgaacaatcagtggttttgcttccaagaactcaacaagctgtcatagcccctccctctcttgtctatgtaagaataagtaattgtccagtgttggaatcgcttctagacttgacatcacactcgaaagtaaggagtcttcatctaaattactccaagacgtctttccagaactgtaagaaatgggatctgcatagactctctagtttgaaagtcttaactatcaaagattgggaagatgacttctttcccgaggagggactccttccgaccactctgaatagactcgagatttggtattctagtaaacttgaaacccttaatggaaaggcctttcaacagcttacctcccttacaaccttagatattagtaactgtgaaaggctgcggtgcttgcccgaagaagggctgcctacttccctttcttatttatacatatttgaatgtcctttgttaaatcaacgctgtgagaaaggaggagaagattggcctaagattcaacacatcacagaagtgtggttagatcatgagcttatcaattaaattcccaaatcatgtacaggtacattctcttcttttccttcttttattgttatgttggattatgtaataaaactaagtaaatgctatgatgctatatttgctctattgatatgtagttctcatctcagatcagtttcatttcttagtgttcttcatttaaggttctttattttcatcgtctacagacaacgaaggatgccctctaacagtatcagttattacaaatgatgggctgagtgcaatattgtggtaatatgaacaacattgcaactccatgccatgccaattaacacagaatagacatgaaattgtgatcaatatttgtttcgttgttcaaggagtttcggaaaggctttcaccaggctagaaaggtttttatctttcttgatgaatctcatgaaggtattttcattttctttctttgctgagacataaactatgttgttgtctagatctttgacttaaaacaatattgtacaagtgtttttatgggattttcatttgcaaactcctatttataaagtttaaatgtcctctacttatccaccattgtaacttgtcattgattatgatcctcaggaaggtgttccgcgacactagtgttgcattgtaaggatgatgattttcgccccaaaagattttacaaagaatgttggttgtagcggttcttgctgaagcgctcgctgctgtgcaaatgcgttcttgtcggctcggttgtgtataggtgtgtgaggtggttgttagggagagagattgagctgtggcatgtgatgtcaataggaagagtagatgcagctgcagcatgagttgttcaacatcattagcatgagttgtggcatgtaatgacaagctttgagtttcagctcagataacaaaatgactcctatgtaatttgtatgcttcttactaaatggttgtttgttccacatagactagtaataaaaattccctaatccaaatgctatataaatataaatataattataatagaaaaacatttatgcacacctatatgccaactcacaaagaatcaaacaatcttaaatgaaattaaactcttatgattgttataaaaataataaaaaaaaagtcaaatcataatgttatagcaaataattctaatgcaaaaaagcaatttgtaattttgagaaatttgtggccaaacctttttatgtttcaattgttaaacacttaactctttatctttttttagtggtaatacccttatgtttgattctgtttgcaaacatgatacatttgttaaatttgggtgttaagtgcgaattaggattggcactgtgtacaaatgcgtacacgtggcatgttttcattggttcaaataattttaatgatttaaatataattaaaattattttataattaaacataaataaaaataatatatattcttttatttatcatatacatttgttatttttttttattttatttttttaaaaaaaaaggattaagtgtttaacaattaaaacataagggaagtttggccgcaaatttctcttttcttaattaattaattgttcgaaacattattgtttgctaaatgctaactaaatgcaaatttacaaattacgtcagcactaaaaatttctcgaaccaaagtaaataacattcattaagaattaaagtcatgttacaatattcaattcataaatcatctgaacataaagtaaattataacatgaaatgaaaatccaataccatgtcatatacgttattaagagttactgtgctgaacaaaactatgaaaaggaagaaaagttatagttctaattagcataaactataagatagaaagtggtaaatattagtgctgtaaatataggttgagttttttgatacgacacgaaatcggtacgagtttgagaggtacaagcatgaccgaaaaagaaaaaatatgggtttggacacggcacgacacaatactacaaattagcatgatacggtatggaaaagataaacttaagcacgatgaactcgaaagcacgacaagtaaacacgaataaactagcacaaaaacaaacatgttaaaaattcttataatttcataactataataataatacatatgtatttagtaataaatattctaattagaatcattctaattaattttttgtatgattatgtagaaaatattgttgaaaattttataaaaataattgaaattataaaaataaataaataaatataatttagtgattaactcattaattatatataaaaaaaaatagtgaaaaaataaagcctgaaatgaatttgagcccgttagaaaatgagctagcccatttatgaaaaattggttagcctaaagtacagcatgagtccgagcacgtcaagaaaatataaacttacgagttgtgtcgagcttattctttaaaatattggcatgacatggccatatctttttatgaacctgtacgacacgatctatattattgcagggtttttaaaatatgggccgcaccgaacacacatttaaaactatggtagacattaagaagtatatatgccaaaatagataacatacataccataacaggtgcaaaatctaaaaatgcatatcatatcaaagcaacaataacctaacttataaagtacatattatgttgttgtctattttttgcaatacatgaactagccttcaaaataacatgtctcctcatgcaaaggattcaacatcatatatacttattctatatcaaggttggtttaattctaatgacacaaattcaaaatttggaaagaatataaggcataagaatcatttttagatacatgggtagttagctaaagcttttagtagcttgattaccaataatcagaacaagaacacttgccatcactaaactgatgaaaccgaaaaggatctctcaacactattttccggccaactatttcgctcacaaacttgtaaactgaatggcaatcgccacaaactcgaagatttttgaaaactttaatggttgaaccttctggtgtactaattaatgcaaatgcaagagcaattctttcactgtggttccaaagattttgctctttttgctcttcatcagtgtcatgtagtgcatagcttgtatcagcaacatagccagcttctctaatcattttcatgagctctctcaacttgttataaatctgtccaatctgaggatgagacttctctcccataccgaatttacttacctgatttttcagcttaacccagctacaagcaggttgtttcttaatattgtgtgaccccataagagtccttacactctctacatcctcccatcttccggttgctgcacagatattcgaataaagaacataagctgaatcatctgatggatctaacttcaatagatgttctgctgctttcctccctagctccaagttgcgatgaatcttacaggacgctaacaagcttcgccaaacaaggtcatttggtggtactggcattcgttgaatgaaatcttcagcctcagtaagccgtcctgatcgtccaagaagatcaatgatgcagacacaatgctctattgctggtgggacactaaacttggttgtcatcgaagcatagtattgaagaccatcgtccacaagacccccgtgactgcacgcagataaaagtgagacaaatgtgacatgatcgggtttttctccccatttcaacatttcatggaaagtctccctagccttctgaaaacgcccgtgtcttgcaaacgatgatatcaaaatgttccatgataatcgccatctgtttatcggtaagggaagtacacttaagacatcatctaattcaccacatttgccatacatatccatagttgcatttgtaacataatgatctgattcaaaaccaagtttcactactaatccatgaagctgctgtccttcctccaatatagccaagtcagcagtaacagaaagtcccacggatagactgaattgatctaaacacaagtcattgtttctcatcttcaatataagtttcaaagcttcctccccataaccatgatgagcattagcagcaatgatggcattccaagaaatagagtgcttagtagataatctattaaacatgaagttacttgagtttaaatcgccacacttggcatacattgttataagtgaattttgtacataaatatctgaatcaaatcctgtctgaagaatttgtgaatgaattggagtcccctgttttcgcaaagtatcaggactagataaagaaccgagaagattgacaattgttatgtaatttgctggtatatcttctcctttcatcatcttgaaagccattagtgcctcatttgcttctctcttctcagcatggcaaccaatgagggcattccaagttacttcgtctcgcttaggcattagttgcaatacttttctagcttcagctgtaaaaccagattttccatacatggtaactaatgcattgcctgtgactaaatttatttgtaagcctgcaaggattgaaagagcatgaattatctttccctcgacaatgaattctggattcgaacaggcagccaatgcactggttaaagtcacatagttcattgtttttctcatctgcagcattttggcaaaaagctccaatgctatttggctttcctcattctgaacatggcatgctaccatggagttccaagagattaaatccttctcgggcatcctttggaaaactgacttcgcatcttcagatctcccagcctcagaatacatacctataagagtatttccaacacaaacatttgactctaatcccattttcgtaactagtccatgaattcccctaccccactttaagttatctaccaaactacataccgctaacaagatcgaaagtgtagtagaatttacctctttatgagcatgtctcatcgaatgaaaacaccttaacgattcttcacaaagcccattatttgcattggctgaaataatcgaattccatgatattgtgtcaagctcatccatttgatcaaatacatgattggcctcatgcacattattgcagctaccaaacatagctataagggaattccccacagaaacattagtctctagcccaatcttcattacatgcccaagaacttgaagacctaagaactcatcccctaaaagcccacaagttttcaggacaacagcaattgtgttctcattgcaacatgactcttcataccccaaacttctatacaagtcaataactttatctaactctcctttatctaaatacccaaccatcaatgaagtccaagtaacaacatttctttcaggcatatcctcaaagaccttatgggcatcaaaaaccaatccataagttccataaaaatgtaacaaacaagttcccacaaaaacatcacttaataaaccaactttaacaataaatccatggacttgcaatccttcatcaaacatggaaaccgatttatcacatgccgttaccaaactagcaaccaaaaacccacttgacttaacaccaccttcaagcatctctctaaagaattcaatggctttcgagtaagcacggactcgaacataacccgacatcattgtattccaagaagcttcatttctctcaaacatatcatcaaacacatatcgggcatatgttatgtgaccaaacttagagtacatattcaccaatgtattcccataaaatacaccaaatggcacaaaacccttcaagcacagcccatgtaaggctcttccagtgatctctttggttatttctgaaaaccccttttgagtaaagctcgaaatttcgtgatttggatggcaagagagccatttgacaccattttccgggacctcttctaggagtggaaatgagatagcttgagcttgtgagtggctccggcaacggaaaacgtgaaaagaagagaaggttgaggccggagggattctgcagtagcacccaaagacatgaacagaaaatagttttctgatattcattcccattcccattaccttccattgatcattgatcagtagcttagctaagtctctctctactttgtgttctctaagaatttatataaaaatgaactgatttcttagttaaagcttacttttttgtttttgaatgtttgaaaaaaaaaaaaaacagttattctcgttagcccatcacaataattatatattaaatagttattaaaaaaacaattaattatttaattattttacaattttacttactttttcattcattttggtaggagtgggatatataactaaaatatgtgatatttggactttgatggtttcaaaaatttaacaatttccttcagttttcaactgtctacaaaatttaagggcatttttttatttgttacatgtagaaacttagggcaaaattcttaattattctcccatgattttcttttcttttttttttttgttgaaaaatcattcatattaaaggaaagaacttatagcacgattactaaattgtatgtaaaattaaaataatcaataaaaaaataaataggttgaaaatataaaataattagaaactatgttgtttactaaaatataagaaaaaaataagaatatatttatctttttaatttttaattaataaaataaaaataaagtaattaaaaaaggaaaaaatattctttataaaaataaatggaaaacatttcccttactatttttcttagtttaagtagctccactagcttctatttttcatagatttaagaacaaaaaaaacttatttttttttttacagagaaatgctaaaaagaaatagtggtacctaatacctttttatataatactatcattattgatttatagtatcgagtcatatatagtttaacgtaataacttgagagaatcgtgagcaaaataatatgtttagaggtacttcataccgctagtaccaaataataatactcttttatatactattatgtttaagtcattattaagactaaacttgattgtataatcctcccaaacacaaatattattaaaacaattaatatgcaattaattattattatttttaaatgttattattattagttgtataatatttgtacagtaatactaacgttaacacttatataatatattaaattatgtactaatcattattaattattaattaattaattaataattcttttgaagctgagtttccttaacaaaaattccatgaaacccataaggaactcttctcggcaacttcacggaggagacgatctccagctccggcgacttcgcatccatcacaataaatctcgattctcctgaattctcatcatgcaaatacgacaccagatatccatcgtcttcttcatcatcatcaccaccatttttcgctacaaagaacggttctccaccatagcatcccggtccgtacatcctccgaccgacttcggcgtcatcggaacccttagacacatcaagcttcactactccggagatcttaggcatcggatcacctacagccgcgtaaacgtacttgttcctctttccgacgaagttagggtttataactgcgaaatctagattgctcgccgacaatggctgcctggaaaccacacctgttttcaaatcaatcctcactttctcaaccagagcgtgaactaagtcgagcctttctagagtgtgttctacagagagtatattgggtgcaaccattacaatcgcatcttcatcttcttcgtcccacgcgttcaccgcgtgcataatgttgaatccaggtacatcgaaccacttcatctccgattcgtctttagcgtaacgaggaattattccaactctcgataccttcgatggatctgctcccacaggtgatcctccacctacaatcatctccatcggattcatccccaattgaatttcagtaaatatagcgtattttttagtaatcgcaaaatcgtgaagaaacgaaggactgttcatcgagaatataggtacatcttgttgtttttcgcctctagaatcaaatctaaagtaggttagaaaaggaggaattggtccgtaacgaaaggcgaaagtctcccctgtttctggatcgatcttcggatgtgcagtcatgttcatattaagcttaccattaaaatcatggcggccaacagttcgaacatctccatctttagtgactctcacctcataagggagatcagattcgccgagcgcgaagagtcgctgggcgaaaaaggctaagctagtattagctaagcctattccattagccggattgaattgtccggtgacaattctagcggcggagagagctcctctcgtggcggcagcggttaaaccgttgaaacccgaaaacacattagggattaaaggctgtcctgctctgcgttcaatatcgtatttgtatgtgttaacgtatctgctactgagtgtggctgatttgcctgattgagtaatgtgaagacaatggagcatgccgtctccgtcgaagagatggtacgggccgcgcgggaggaactgagggttcgggccgttgcgaatgtaggcgccgtctaggcaaggcggtaaggcggtgccctgctcgatgtggcatttggtgggcggaagctcgtctgagacgggggcgaaattggccgaaaggactaatttagggtcgactgaagggcggagcggggggtctatgaatgtgttgatgatgtcatcaaacacattgaatagtacccccgaaagtgtcggggacgaacgaggccgcagcctcgttcgtgttaccgaatagggagaaggagtaggtgaagaagtaatagtaggcttttttgttgttgttgtttttggtggttgttgttgtgttgtagtagtagtagtggtggtggtggtggtattgggcttgtcttcaattctaactgaggtgatgagatgagtaatatttggtttggtagtagttagaagagaagggtggttaatgacatggtttgaaaatggtgtggtggtggagacaaaggaggaggagaaggcatccatttttcagaccaagtaagtatactttgttaatttagtagtgttgtgttgttatatgtagggatatgttggtggagtggggatggggatggggtacacaagaagatatatatgctaatttttttttatgttatttgaaannnnnnnnnnnnnnaattaaagaaaaaatattattaattattagagatcggaagagcg

SEQ ID NO: 15526 - DNA, 4950 bp, Cannabis sativa
aaacatgctaaagaaggaactgaaagctcagctttctggtttgcgcttggaggaaaacaaagctacaccagtaaaaaagtttctacagagacagtcagagatccacacttattcacattctcattcaataaaggtagtgattctcgttcaatcctgtcaaatcgttagcagtgttcttctttcttgagataatgaattgatatcttggtttactagtttaccagctgagtactttctaactttctttttttccatcactttccttgccacatggatcacccaggaaagtttcaggtgagtttggacataaaaaacaactcaaacttcattgtattttgattcaaagtgcttgtggttataattaattttgtatataattggcaggtggaggaagtatacaacttctcacaagatgatctgttaacagaagacatcttgatacttgacacacatgctgaagtgtttatctgggttggtcagtgtgtagattctaaagaaaagcaaagtgtttttgaaattggcgaggtaatatgtaaccaattggcgttttctcatattttccctattacgaactgcttcataaatggttaatacatttgcagaaatacatagagatggctgcatctctggagggattgtctcctaatgtgcctctgtacaaagttactgaaggaaatgaaccttgcttcttcactacctacttttcatgggatcttgcaaaagccagcgtatgtgcaaaatctacaaagtcaattcttggtttatgcttttttgtttttgtttttatggctgctaacttgatgtctataattaaggggaacagaatacctgaaatggcttccctacttaataggggaacaccatgctatttatatataaaaaaaattgttttcaaatttcacaggcattattacttgttgatgcaagatgccataaaaaagcactgttctttttgttcattaagcttttctaaactcatgtcacttcttccaccttatgttaatttagttgcacttaatattcagttaatttttataaaattttgaatttcttgactagatcatgtgtgaactatatttccaagttacattgaaatcctacaagcaattccttaaattaagtggttttatatgtaaacttagagcatctgtaatcttgaatgtcccataatatgttggtcaaatgatcacaagggttcttgttcttgaattatcttttgcaagtaacgaatgtagccaaatttctctctttcatgtttgttgcatgttctaggctctttaaacatcatctcttatgcatggtttttatgaaatgcagattcagggcaactcattccaaaagaaggtgtctatcttctttgggtttggtagtactgtggaggtgagcaatacaaaatttgcttaatctatttgcagaagcatctattattcaggacatgtacccattgcaaaatcagtttttcccactataaatgtaactgattctctctttttacgcttaaccaggaaaagtccaatgggaatcaaggaggaccaacacaaagggcttcagctttagctgctttatcttctgcatttagtccatcctctggaaaatcacccccggtaactaaatatccccattctggttatgatgttatcatgtcttgatctaataagtttcaaatcgttttttgctcagtgttttgtctcattaacttgttgttaactgcaacatctttgtcgtgcatggcctgatgacttcccttaaatatttcctcatgaaaaacaataacttgtcctatcaagttattccggcatggctcatttgccttttgtttttcgtttttcatgtttgcatatgatggtagaggattttgtatctattaatattattaatttaatgcatgtgctataatcagggccaggataaatccaatggttctggtcaaggaccaaggcaaagagctgaagctttagctgctttatcatctgcgttcggttcatcatcaggaaacaaatcttctgctcctaggcctgctggccccagtcaaggctcacaaagagcagcagcagttgctgctctttcgcaagttcttacagccgaaaagaaaaagaagtcacctgatgactctcctacccaaagtcctccctcagaaaccagtgcccctggtaagagccattcacttctgaattaaaaaaacctatgtttactcttgtaactgaaattatagatctcgacacatttcaattcttccagctgaagccaaaagtgaaactacctattccgaaacagagggctctcaggatggtggggaagtcaaagaagcagaggaagtagcagctgtatctgaaaacagcagtgagtcaccaaagaaagaaacagtgcagtttgaaaacgatggtgaaagtaaccttagtacattcagttatgatcaactgaaagccaaatctgaaaatccagttactggaattgatttcaagcgaagagaggtcagtctcattcccattgcaaatgtttcatttcatttcggtacttcaatttaatgacattttctattttttttcccttcaggcctatctttcagatgaagagttccaaactatatttgggaacacaaaggcagccttctataaactgccgaaatggaagcaagacatgcagaagaagaagttcgatctcttttgagactgaatttactaaaatcgagtgcgttttctgctccttttgcatcctaacttaggggtgcttcattcattttgataaaataatatttctttgttgggtagttgtggttttttttttaattggtacgcaatgccttgccttgatttccatattagcttcttcttttataattttcctttgatgaacatggtacttacctggttagattgattcggtattgattgtgatgccgccgagagtgattttgttttcattttagtattttttttccccttgtaactgctgctgcctcttgtaatggtcaaaatatggtagagttctaaaggcagtaataggcagaggtataattctttcatttggtcattgtgtattacatatatatatatatattgtggttatttgactattattacttatctctttattttttggtcctgtgaaaaagggtgtatatgtatcgcttttgaactttgtttaagaattaagatacaggaaatgagaaactgtttgtgttttttcatattgtactatgaggcctatttatgattcttgttttatttttaattcgaattaattattggattaaaatggacaaataataattgtcagtaaatagttgaataactcgagatgttattacacttaacttatttatgttttatgaattttggaccatcttacattttcttttaaaacatgtttaaagtacttttgctcaatattcttagaaggaaaattgtgattcttttttagtgtagtccattgctttttgtttttaagaaagaatcaattgattctatgtttttcttttcttttgttagttcctttaatattgctatagttgctctcatcttttgaaaagctttcatttttctttaaacccttaatattacttctcacttaatattgtcactttctaattacgtatcccagaaaattagaattggacttaaactacgtggcttgaatggtatgaaaaacattaaaaaaaaaaatcaaaccagtcacaataaatacgagtcgtgttagtctagctcatttttttgggcttttcaaactttgggttactttgttggtcataagaaaatatggttcttgtgaacttacaaatctggtaattttgtgttgtactttattcgaggcaatttgtttttcttaaatatattaatttttttatataatgattaaaattcatgctctttatttttatatttttttaatacaattgattaattaaatactaaaataaatatgtattttatacttttatttttttttcaataattgttacacaatcaaataataataattataattattataatttgaatattattatcattttaattgataaataaatatttattattgttattattattattaaattattgagttttgtaatgtgatatgttttcgagctaatattcgtattaacgtgtcatgcttttgagtttgttgtgtcgtgtcgtgtcgtgcttaagttcttttttgtgtcgcgttgtgtctaaatctataatttttgaagcttttacaccacatactaaaatttcccactttattttactatagggcaaattgtttttcaaaaatactgtgtattgtgttaagtttttattgttgttccacggttgttttttaattgttccactgttgtttttaattgttctatattgtaattttacgattgttttataaagagagtatttttgtaaaaaaaattgcgtgtagcagtaaaattataaacttttactcaaaattcaatatttttgtaaaactcccataattttttgtgtcgggtcgtgtcgtgtctaagtacacatatatttgtaccgagtcatgttcatacttctcggtctcgtatcgtgtcgaaaagcccgacccatatttgtaacactaatcgtagtacaactatcttatccttagttaaaaaaaaaaagttacattatcaaataagctagtaacactttcactttttgttttttcaatacaaaagcaaaagtatttcttttgctcatccaagatttccactatgcatgtaaatgtaatccattaatcagaaaattatttttgcttatcctaacattatttattatggatagaatatttcattttcaaaaaacaaaaaccctaatatttcaattaataataaagccaaaattaaatattctgtgtcaacctagaggtaggcccaaaccagggatggaatctttgaagaactaagaagattagtcttatctttggaattgactagaggttgaagctcttgcacaagtgcaattt

SEQ ID NO: 15527 - DNA, 3277 bp, Cannabis sativa
tcgaatgcattctcaaatgtgatgataacaattatcaatgtgcttgcttctgttatcaaccaaaatattttttccaagtggaaatgttgacttgttttcaacacaattctaataagctcctcttgtggtacatcaaaattcttcatcagcacattatttcttagccaaatagcatgacaaacacatgaagttttaggaatgtatacggttttccaagtcgataatgtaacgattaattgcttctttcacatccaagtaaagtttgtgtttcccacgaagaacacaaatgccttggtgctctttctatcattgaagtctccagtccaatcgctattactatatctaactatttaatcaatatttttttttgtagttagttaactttttattgcatataaattgattacatcaaaaaaaactaccaaataaaaggaaatttgtaatcgacctaacctaataattattcttgttgctaattctatctatgatatatcccaaaattatatgaaaaaattattttcctctagtaacagcataagaaattgatggcttgccactctccaaatatgctttgttccaaggtcacaagatatgatatataatagcattaacatcaacaatgatcacatttctttagaacttgctcattttctatttattaatccaaaccaacataccatgtagattctactaccttgttatgttctataaacacctaaaatcttctgaactacaactagaactgaaacgacaaaaagaagaacagatgctcatagctctcatcatgaactccacatatcagataattttttgctaacccaaaaactttctttggtgacgcagacaataatgtttgacacatgacataaaggatgatgtcatagagttgagtaaacacgactcataacagtcaacctagttggggaccctagccctatgaccaggttcactccgggatctccaggatagaagttcagaccttaataatatgaatccaacaaagtatatttcaatattttgtaccataaagacatggagcaacctactctaagtcccaggagcaaaaattacacgaattgtaacccggaagccaacttggacacctagggtttcactcaacgcccatgttgacatccttaactagggttttattttccgggaccatcttagtgcaaagtggtcaaaaaaacttatattcagacataaactagacatgccacataaatatttgaggcatgagaattagaattagaggaagttaatttttttcaatctgggtgccttctaagtgtccgatcggaggtccaacatttgcatcgtatttgtctttataaaaaatagggaaataggtccttccatagtaaacataaaaattcttgggcacaaataatagggcccagaggcccaggttgacattttgggctggccatgatgtcaaccttggccatttaaaatgaaataattttagaaattattttcatcaacttctttgtcttcaaataatattgagagtcaactatttttgggtactcaattcccacgttgacactcgaggctaggccctgtgcctaggttgacatattatcaaccttccttgtttttgatcaagttcaacaaaaagtttttcaggaattttttccttcattaaaaataatggagattcaagtaaaattggggggagaaccacaaacccaagtccctggaaatagggccttgcacccaagttgacatagcgctagcctagtacccaagttgacaatcaacttgggactctaccttcaatttgctcaaatgccaaatctgatgcgaccatttaatcccaagtggtgaagaacaaggtaagagaccttttcctcaagtttagaaaccttggaagtatcaaaaacaaaatccaagagctcgggagaaagggcccaatgcccaagttgacaaaaggcctggtgcgttaggttctgcttatctgaatctaatgttgtttggaccgtccatctagtttttcacaattacaatgatctatgaagtcagagtaatcaaatttacaattttgcatttctcttttctagcacacacaaaaatgaagagtttccagtctctcatttctgcaaactagtaacatctctgagaactagatactagcttcactaaaatatataaatactaagtagtatcaaaatatcacttaggcatcgtaaaatacatcgcttggaagttcttacacacttacccaacatctaggttgagagttcagtaaaattaccataactcactcaattttgatctgattgatgcaattcaacttgcattttgaagataattcaatgctatatcaagttatgtatcccacttccaatgtaattctaaagttattgttgtcaaaattcaaccccaagggagttacaaaaataagctcctggttacccgcagcaggacccgtcgagtaccaaaattggccttcaccaccataagctaattttcactattaaatcatcatcaacagtaaaaaaaaatcttatttatatattttccctgtttttgtgggcctacttcacttatgaaaggagagctcctttagctcatttttcacattcagaaactacccacaaggtcagagcttctctctctacaatttagagcttctaacacctagtctattgctataattaccatctcgcgagaaatacaactggaagtagaggtagccccattactatcacaatatagagggtgagctactataaataggttgtgtctcttttgtttactttactacttttttcattctctccaatctaacgagcaagagtggcttagaagtctagtccatatttttgagtcaatatttttgtgtgctttcattgagagccaaagctcaagaaagttactaaacatgatggttgcaacacattctacaagtattgacaagaagactctaggaactggctaagtaacttatggcacaccacttgatggagttggagtcgggaccacttgtgcactctagatgctaggagtaggccttggaaccagctcctcaacttattgtccaaggccaacataaacatctcttgggactggcaccaatgaccagatcccacctagggagccataggtggagataaaagaccctgaagagatcgatcctcaggtaactccgcagccaaattgtggctcgcttgtcacaatagctataagactctctcaacggttacaacattagttcctggaaaactggaagaacatgttggaaatattttaccaggatctagatttaccaaca

SEQ ID NO: 15528 - DNA, 7443 bp, Cannabis sativa
aacctgtgaatgcgattcttgagtttggccaagaaagtttgattatgttggtcaggcaccttgatcagtttctcaaccaaactctgtttttgttgaatactaagatggtgtacatcaactgtacaagtgtctagtatttcttgttttagtcgttcgtatgttggaagcctctcaattgctgcccaattaagaacttctttgtcatcaccttctactctattggcaaaagaatccatcttccttactttatcacaaaaaaaataataataataaataaataaatctcactgcacccttatctctctaaattcataaacaaagttatcaatataaaatttttacaactaaatagtaatgaattgttgaaagattatcttttgtgattttcatgtttaatgtgttaaataataatcatttttaatgtgttattattattttcatacaaaaacaaaaccatctaagaaaataagaatgcggagagaaatctgatcaggtctcaaggataagagaaagacgcaggggactcgataccaaaagaaattagtatttcttcactttccattatttttttttttcttatttgtttaattaattaccatctattttggtcaatctcgtatagctttgtcccagtggatgtagatttcttttctatatctttcatctttacttaccttttgcgtgtttttcctgtttatggacaatttatttaataacggggaaaacactgaatatatttacagcagagtatggaataaattaataaaaaaatataatataataaatggagaataattagaattaatatttgtaatatattacttgttaattttcttgaaaaaataaaataataataatttatattgtaaatatattttaaaaaacaaaatcgtcattatatattagatattaattaatttatgtatttattgtttaaatttgatttgttaatgctcttatggcgcgttttttaaactgtaactgaaatcagaataatcaatgggagaaatgaatcggtttaatatagaaaataatcgaaatcaatattttactatactgtgtggaaagaaaatcataatcacatattattttatttatataactaggaaaggtaacggaatactttaattttacaaaattgtgattgttagaacatctaattattttttgtttataaattttaaaaaagcatatttgtttatttttttcatttttaattaataaaattagaattaaaataaaataaattaagaaagggaaaggtattctccaaaaaaaaatggagggagaaccttttttttattttatccttaatttgtgtaaaatttaataaacaattggatgagaatcaataccatactattgatttctattccctctaagtaaacatgccattaataaaaaagtgaataactgtacaatataaccatcaaacactcaaacccactaaaagcattaatacactttctaccctataaaatacaaatcacttatttgtaaatacatctcaccaataaaatcaaattacaaaattaccccttaaaattatatttttatttgaaaaaagaaaaactaattgaaatataattattctcacatcaatatttgtttgtaaatccggttcttggaggtcaatcaagttagcctacaattaatcactatattgtctttgtatctcaaaccttactttgagatgagatttaacataacacccaaaaaaaaaaaaattccaacggcaaaggcacaattttgtcagattgaaaaacttttattcatttgtcgctagtaaaaagaacacgtgtaaagtctttatctaaaaataaattaataaataaatctatctacatgactaaaacataaaaaaaaaaaatctaccaaaatttctttaattaattgcgggtttgacttcgattatattacattaattaattaatacaagaccaagaacactaaaaaggcttctatcaaaaaagaaaagaaaaaaaacactaaaagaggcaaattgcctttgcctataagaactaccctataataccaatacacaacttcgattgcaatggaagatttgattccataaaatcaaatgaatgaagaaaagtgcatcaactcacaaagactcgggacttgtcgatggtctgattcttgagggcatccgcaggtgttcattaaaaccacccgcaaaccggttcttcggggtgatggacatttggttcagagcattgtcaaactcatcaatatcaaaatcttcgtgattcccttcaatctctgtattcacttccacttcttcatcgctgctatcttcttcttcgtcgttatatgtaggtctgaccatggaccagtatacgtagtttggtcggatgaagcttcatatggagaatgaagataaataatttcagaaaaccaataaaaatatgtttgaaatggaagttctaacaaaaaatatatatatacaatttagagtgaactcgtgttacttggggagcaagtatatgatatctcttatttcctatgagaaaataaaaaggaaaaaccactggattcaatcgaacaaaaggagaggatataaacctgtcacttcgttttagcaaacacgggtcaaatggaaagaacatatctagtctctccatccctccgaaagctttagagaattctgattctgattccaggtactcgtcaaaattgaatttctcagacgaggtgaacaaatcagctgcttttgattgtcttagaaactcagttacgatagaagggagacaaacctgatcaattagattgaaaaagagaatctattatcaaacacaatatatgccaagtatattttaaatttaaacttgtgtagaacaaacaaaaggctaaacagtcaagcctcggaagtaaaggatgtgaactcaaaattccttccttttcttttcttttcttgatttcctttttttcaagacaaaaggctactattattacaagaaaatttcatttcgtgcattgagattgcaacacaaaataaataggatgtaactaccaatatgccacatagatggcttcccattcaacatcacaagtttaatcgaaatttactaattttgtaagaagtaacaaattctattaaccaaaaaaaaaatctaaagggataatcgtttgaaaattaaaaaaaaaaaaaaacatcgtgtattaataataaaaaccttgtgcaattaatcattagggtatgtttttcccgtttgatataagaaacgacataaataaagtaattaccttcaatggactcaaattatgagacaatatcaggtttataggcacaagaagctgtgatttgaaccaaggaacacccaccaaagatctcatacgaaaacacaatacatacataatggcctgcgaagcaaaagaaaataatttagcagcataaaccagtaaacataagcattggttcacaaagtattgaagattctgacacaatcactgttattgaattttcttgtaattacaaatatatatattaaaaaaataagaaatccattagaaaaatctttgaaaacaatgaaaaggtagaacttgtaataaagagccaatgtatatttagtcaacttagagccaatgtatgtacaaaacattttaatgcaaataaaaattaaaatcaaggccactcgtcatactttttactttttatgtttaatattttgcttgtcacttttaaaatagacgagggtcctcaactttgcaactctaacatcattgatattattaatagagtaaatctacaagtgaaaacaaaatggttttaactgttttggcctcctttcatcatagtattaaaaccaatgtcaacataaaagtcaaaaaaggtaaacactcatttggtaccatgtgttttagaggaatacatctttcataccctatattttcaatactcatttggtaccagtaacttgaaatcttacataatatgtaccctggactcaaatttgattattgtaatagtatgtgtattattaaaattttattaatcaaattgagtgtcaaatatgtaagatttcaaattgaggttaccagatgagtaccattgaaaacataggatactaaatctatatttcaataaaacacatggttatttacccaaagagagtgattcattgtctccagacaaagccatcaaagaaaacatatatctagaagcaggtataaaggtttgatgaaaagaatgctcagatgtgtacctgacatccagagtaaaaaatcctatgagcctttgggtttatttcaccttcatgcgaattgcagtaatccaagcaccattcaaccaaactgaaacaagattcgcacaccatatagtcagcaatataaagtgatattactcattattttctatcttatcttttagtttcagttgcaaccttttcaaggtttttgcaattgaagatgttgacaaaaactttccacgggacaaataactagcaagataagccacagcactcatcctgcaaaaaaaaatatacatgaattcagtatcgaaatgttcttccttatataatataaatatattttaacaaccacttgctgataaaatcaagtgaaatgatgacaaataccaacaaactgatatgcatattgcttctcatatttcataaacggtggattaattgaatatcataaatcttttatattaattgaataataataaatgtttaagattgagattattagaagttgtgggaattaaaagtgaatatttattttcattatattggctttggagaatgaatatgtgcacatacaaattaaaaaaaaaatagattttttaaacttaaaataattcgaatctgatttatcgctttcttttactttttttttttgtaatgctttatattattttcccattgttcaaaagccatgttgccaaacaaaaaacaattggggcaagtgttataaagaaaagctatgttcatatgtcaagctagccaactgttacaatcttaggacggaatgtaacataaagggggatttttcaatagtttccatagttcaggggtatttcatacaagtaaaaaaatcagaaagcaagagtcaatcagtttcataattcaagggagaaaaaccgatttatcctttaaataatattccacaaaactaacagccctataaaataaatcaaatacaatatagtatcaaagtaaataaaggcaccaactagcatatgcacatccaatcaaacgaaagatgaataagaaatctaagggtaagagatccttacaagaagaaacaatgacctagcaataataaaaatgacatagtaatgaccaagtggcaagagaaataacctcaaaattgggggatgagtattacaaacaaagatatctaaaagcatctttgtaaatctacttccacagttctcaggatccagagcacaagcatagaacattataaactgcaagaagaaaaatgaaggccaagcatttatttaggacaagcattaccaaaaaccacaacttgtattatattgcagagacaataccaaatgtgcaaaaatagataaacattagaattcagacaacaatagtgaacctgagaaaattttgacttgtatgcagtcagaacagtcttctgaaatgattggagaagatttccaaatacctagtaagagcaacatttacattagaaaagtttagtaacagagagcaaagagaagatcaggcatgaataaagcacaggagactcaaaatatacctcatttaaacggccaccttcttcacaggaattcaaatgctcaaagactaccaccatcaagttatccaacttctcggcaaacagatttcctactaagcccttccggctcaattctcttggaagctgtaaacaatagccggattactttacaaaatcatagtaatgcaaccatagataatcaaggaaatcaaaatagaatataacaattaaaataatacaacgctaaagattccaaaacaaattggcaacaaagtatttctgctgtaaaaattattcaaactctagactatgaagtaaatttaagtgatccttcaaaatgattacaagataatttgatacagcatatgttatactttgcattaaatatactagtgtacagctcaattaaccctttccatgaacaatgaccttaataaatgtgtagcaacaaaacagttcaaccagagccaaaggctcagttgccaccgatatgctccatatacatcatgaatcatctacaagcaaaactaacaaaagaagaacttctacaaacaaattttttaataaaaaataggatagttgtcaaacatctacacacatgaatttataatgtccttccttagaggcatgcgacttctaaattaaaatgttgtgatatatcagaatttgctcttcaagagaagttcgcaaactcatcctctaaatggtatacttgaaaaaaaaaaaaaaagcatctcagaaccctcaaaattctcatatttttaaacctgctgagagtaccaattctaattcctccactaattcatcatcgaattggaataattagacatacctcagagctatccatcaattcatcgtctgaagcctcatcaatatcttctagctccatattaaaaattcccttagtggagtcatcatgtaagatgtcatcccacccaatctccacctgtaaaacgtccaccacaccatatcaacacttgaccttaacaaactcaacaagagagaaaaatgggaaaagaatcttacatccaaatcaaccagcaaatcaatcaaccctgaaagcattgtacttctaacaagctcaccaaaaatgcagctttccagttttaacatgttttccgcataaacaacaagactctgcaacagaacacacatagttacttccactttctcacgccagcaaaattataaattgtaaggtaagaaagcaaattcacttaggcaatgaaaagaaatctatgaaataataataagtgaaaagcaacaaatcaaattccagatatagagacacgcttcataaacatatgtggcgcagctaaagtttcacatgtcatacaaaaaaccagttcttaaaaatacaatactccagcatagggaatcagtcaatgctacattattattattattccaaaaataaaatgcaacatgtattattaatgtataaggtaatacaagaaatatatcacataatcagaaactttacagaggcattacaaaagaaaagttccataagccaatgctaaattttatctgtaatccaaaaaaaaaaatatcacatttttactacaagaaattatgtttttaaattcttacaacatcaaagaaacacaaataatataactatttgaggaatgtaaaataaggtgatgaacaaaagcaaaaaaaatgtatggttcacactgaaaagaatctgatcttcactatgtatagaattaagcaactttatcaatagtttggtttcatgaaagg

SEQ ID NO: 15529 - DNA, 6252 bp, Cannabis sativa
tattgaaatgagttttattaagggcataaaacccaacaaaaagtacaatgtctcaaagtgatccatgtgtcaaaagttcctgaagtcatccgaagaaagattgcaagcttcggtcactctcaagttttagaagtttggggggtaaatgtcatctatgtttctggatgggcgagacatggtatgatcaaagtgtagttggtctgcataagataaggcccaagccttctaacatacaaaagcccagtctaaattggagacaggcctgggcccatctaaaccccaagaacatcgtcttcagagacgagacccttttgcttttggaagcccattctgccttccaagagacgaagcaaagaaagacctctagacaatttatgaggtttatctggagaagaagtccaagaggtgcctccgaaaggcccttgtagggtgacgtggagaccatctaacgcctagtcccaccaaatcagatcttctcccttatgtcagaacatgatagtacgtgcactaccaaagggagtacgtcctctttttcaatcgacgcctactgacattcttgtctactacagcagtgcccacacgtgacacttgtctagattgcgtggtccccatatgtacagaaccctttcccgcacaagccaatctcttgtagtggacctcaaagtcatgtattctatgtatttacctcaacaatggacctattttgcacaaaaagcttaaactggtcacgtgtatacttgaatctgaaacttcacctataaaaactcttttactccttcatgcaaggggggcagataaaaaaactcctaagttctctttaagctttattcttcttctaagagaaatcgagagagaaaaataatatagcaagaattgtgattcttcaaattgtgagactcatttgtaatacattaaattttcttaggccaatacattgactcttggactagagttcattaatacccaaactatgtaaaaattctcatcttattatttattagctcttatttaacttagtttttaaaaatctcggtaaacaataagttaatatttaaatgttacttataacttacattgcataataaaaatgaccccaaatagtgtttaaattttgatattattttttttttcaatttttttattagtttatcattattttttaatgaaaatattgattgagatatctaaactagaaacattaattaaacaacttttttgttagaaaaactattgactatattttcatgtttttcatctatatgtaaaaagtgtggttacttattgatattatccaacaaaaatcattgatattattttgattaaaatatataaatttaactctttattttattgtttattagaatataatttatattataatttaaaagtgttaataaaattagataaataattttttatatagtaaatataaatttgaattaaaggtttaatcaatcaattaattagttttttaatatattcattcattattttgcttaaaatatttaaatttaatttttttattttattattaaaaaataaataatataattatgtaaaagtgttcattaaattagctagataggtagatactttttcttagtgcaaatttaaactaaattttatatatttaaaataggggctttttctattttatattttatgtttaaattttattattttatatatttaaactaaattttatctgatggaattgaattaatttaatttttatttattatttgaattaattattaagtaaaaatagcatgcaatgaaagtaaatttttatcaataaaagtaaatataggtgcaatcttctgcctagtatgtatgtatatttatatctagttatttatggagataatatatgcatgcatgcaattgtgttatgccatccttttatttcatgtacagtacagtaagtagtcatgttttggataattagaatgtgtataaatatatatatttatatacgttgtaacaaaaccaagcatatgtgaatcttttaaaaacaaaacttaattaagtgagatactattttgaacttctgatccatgctagctattaagggccgaagctcataataaatatataagctcctacacggatttatatttgccttaactatcaattaatatattaccatattttccatctggtgaatgaattatgtaaaagaaaattgttcagaaattaatacacaatataccttgaataaacaaaaactagaaatacccaaagcatccaatgtgtatataaatatatatacttctgtaaatgttcaagtatatttatacaccagtatgtgatatatatatatatatagagagagagagattaattaattgaactacattgggtttccatataataatatacctatttttctttcatcaattttgatttttgtgttctttttttcttttgtttttttttttttttgtttaccctcgaaattaataccatatttctgtaatgtaattttgccccaaaatgttaataattatcacttgaacttcagtacgttatctgcagagactgatctaacaaaaatatcaggaaaatgagattgaaatgaaaaaacaaaacataatatacaaatacattgatatatatacagataattgtttggcgaacaaaataatcatgttaagtacagtactcatttcatgagaaaatgttcttgcagaacacagctccacgcatacacgctatgcatatatatatgcatatatatatgtgtgtgtgttggagagagagaaagagatggaacgttgttctcaaaggaaaaagttatataaattaaattggccgaaaatctacatatacatgttaataaactcaattttacttcatctattttgccttcaatatagatgatatatatttatatatataaatatttcaagcattttcctcatcatgatgattgtaaattgtaatgaatcaaaattctaataaatttgccttacaaaagaaaaaaagtaaaagaaaactaaaaaaaaacattctaataaattggattgtagttctactactaattaatcgacacaataatgaacatatatattgattactagaaatgatagatcaaatattgatccgagtccaacaaataaattaaaattctaagatatttctccggataaattaggactatactacacattacacaattataaataaaatgtccatatttgtaggaaaataatagtaatataaactagagagctaatagctatagttaataattaattaaaaattttaaaaactccattaactttaattcaaacctaaataaattaagaacttattttttatatatttatataatataataagctaggtagctagagatgaagttaacccaacaccaagaaaatctataaacggcacctgatgatgatgatgatgaagatcatgatctttgttttctttctgagaagccatatttcctactctcatcacctgcaacatattgctcttatggtttccattaataacactgctattactctcttctattcccattaaacctgtatgatcacgattattaccatctttattgggaccatgatgaggaagttcatcacgagtagtagtactagttgaataaaaatcccttgtagtgaaactagtattattattactccctgacatacccaaattagaattcgaagtcgaagaagacaaaattccccaaattctcattttctgacgatgatcccgggcagtagcaaggtcaggagttttgaagttgagaagccctaatttgggactggtattattattaatattataataaggtgtagaagtggtggtagtggtggtgggtttagaagaagtagtagtagtagtagtagtactaagtatatgatgatggtggtagttgtggttgtggttgtggttgtggattaagtggtgggaattaggtgaggaagaggaggaagagaaacgttctcgtttccttctggccatgacgacatggtaatgattcttgacagcgttgtcagttcttccatggaagtacttagcaatacaagcccatttgttgccatatatccgatgagctgctagaagcctctcctcctcttcttctgtaaatggtttcttgtttatgtttggatccagttggttgtaccatcttaatctgcaactttttcctgcacccaaataaaaattattatttatatttattaaaataataataataaggtagctagttagctccatggcagtaactacaagtactatatagtagttatatgaaaaccccatttcttaaaaccccagcaaaattaattaacctgatcttccttgtagatgttctgcgatgaaattccagttttgagggccgtaccggtccaccaattctctcagcttttcatcttcgcctggcctccagtgccctctatagcaatttttcccaaccccaccaccatgatcggagctcatactacttgaagatctttccatcatcggatgatcaaactagtgatacatatatatatatgatgagaatgagatgaggaaatatatatatattattaataaattaattattacatagttaaaagcaggaaaacaaagaaataatatatgtttatatatttaggggttggtcgtgggattgggttatggatgggatgtcacttttgttgtattcacacgattgggtcaccctatatatatatatacataccaacgtacgtacatatatacataatatggtttcatcagacagtaaaaattaatatattttatatatatttacaaatgacccatttagtttttattaccaaatatttgttgcccaaatatattcttattattaattaccacttggtcaatgtgctaaattgagtaatatagctctactctcggctggaaaaagaaaataaataaactttgtaattatatatgctgaaacactagctagtactatgttagtttcaacgagttactatatatatgtattatataactcgatttaactactggccagtttcagttctcaagagtaagtaggcaattatttgttttttttttaaaaaaaaaaatgaagcaagctactatttgtgtatatttatataggtttcatttattttattgttaaaaataaatatttttattttttgaattttgaccaatacaaaatttggctcccttttattaatttttttttttaaaaaaattataatattctattaattcaaaaaaaattaataaaaattattaaaaaaatcggttcaaaatattaaataattaaaaaatattaagtttattttaaaaaaatcttaattatttctaaaaaaaatattttcaaacttcattttatttataaacacgtatcttaaattttatttataaacacgtatcttaaacaattaaactaataaaactattgaaatccaatatataatttaaacaatttttctttaaaaaaagatcaaacttatttatatttataaactcatattttgaaaaataagaaatatttaaaatttcaataaaaatataaaattattttgaaaaaagttagaaattaaactagaaaaatgttatgtttattttaaaaaaaaaaatctagaattttggagaaaaaaattgacacaagctcttattcccgtaaaatttagtttttacaaaaattaaaatttaaaatatatttttttaatatctaaatgaattttttcataaaaaagaaataatattttaaatctcttaatttttaaaatttttaatcattcaaaataatttttttaggatctaaattaatttttttgagatttactaaaaaaatatttaatattttttatttttattttgagtggtatggtttaatggttttcaaaatttaggggataaagttggtaattaacaaaatacgtcagcatttaaacaaaataatggaaccgaatctaacagaatgactaaatttctgtaaatgtaaaagttcaaaaaaaattcttaacaaaccatatattttagagcaaaataaaagacaaaattgttaattattgtatattataattcatttatgtgaagtgatattgatcgaaacctttttttttttctttttaaggaaagatgatacaaaaaatattaaagaatatgcttgtatattatttatttataccaaatagaaaatgttaaacatcaggactcaaaataattaaattaattaatttaataaatctgttaataagaagaaaaaaaaatgcaaatttctttttaattttgaatgat

SEQ ID NO: 15530 - DNA, 2299 bp, Cannabis sativa
ccacagatgggtagaattgaaagagcatatcagcttcattttaattcactacgttcatttttttttttttgtagttttcggaattattgttactttgaactaactagtttttttttttttttttttcgggtttgtcattacagtaacagatttcggataattgttatccaattcagagtagaatatccacgtcagcagcagaagttgaccaatcaaaagtggacataggatcgcgtgtccattgcggaccaatgaagagaaatccgacgtggcacgtggacatccacgggctcaaacatttatctttgtatcttcttccgactcttctcatttccacacacactctattgttattctacaactgaagattgtagtacagaggtttcctctctctcttggtgaaatggcttctctggcagctggttcctcccttggcgtgtcggaaatgcttggaaagcccctcaacttcatcggcggggccaggtcgcctgctcccactccctccagccctgccaccttcaagaccgttgctctcttctccagaaagaagcccgcaccaaaggccaagccagctcctgttgctccggctgatgacgaactcgccaagtggtatggtaagtatcactactttgattaccacctacagctatttctttgtaattgtattgtattattatatatatactttatgttttggttcatttcaggtcctgatagaagaatctttttgcccgatggacttctagaccggtctgagatcccagagtacttgacaggagaagttcctggagagtaagatataatgtctttctttctttctttcttttttggctttaacaaattgtgatagtggtggctgatatgagatcatcatatatgctttaaatggtgtttttttttcagctatggatatgacccttttgggttaagcaagaagccagaagacttcagcaagtaagtacttagttcctctgtttcaactctataaattaatagatcaaggcttattcgtgttgcttcggctgttgtgcaggtaccaagcttttgagttgatccatgctcgatgggctatgcttggagctgccggcttcattatccccgaggccttcaacaaattcggcgccaactgcggtcctgaggctgtttggttcaaggttcgaattttaaacaaacttaataaatagaagaaatgagttaaaaacattacgaatcaacgatcatccttgtgttaatttgcattaagtctctgaaaatagaagagaaattcgagtatagatgctactgcttaacttgatacatgtttgtatatgtatatgaattcagacaggagctcttctccttgacgggaacacattgaactactttggcaagaacattcccatcaatttagttgttgccgttgttgctgagatagttctccttggtggagctgaatactacagaatcaccaatggcttggtatgctactttatgtacccgagtatctaataaaacataactatcattaaatttagttttgaaataatctaaatgtcgattatgttgtgaatggaactataggactttgaagacaagcttcaccctggtggtccatttgatcccttggggctagctaaggatccagaccaggcagcactactgaaggttaaagagattaagaatgggagacttgctatgttcgccatgctcggtttctatttccaagcttacgtaacaggagaaggcccagtggagaacctcgctaaacatctcagcgatccttttggcaacaacttgcttactgtcattgctggaactgcagaaagagctccaaccctctaattttctttcctatttttctcatgtttgtactcacttgtgatgaacatgtcaatgcgctttgtgtctgctcatcttcgaaatcaagaagtgtttttttgttattgcttttttctttttatgagcaggtcatgtggagtgctatttatgtactatacaagtatttcgacatgtgcaattgtgattgactcgtaaattttattcaccaatgctgaaatttcaaccaaatacttctacatcctcaagcctgattttttcgaaacaaaagcgtgacctgaatttcgaaacagctttatgaccctgtgatctaaattatacaagtgttaacggtatggaatcaaaagatttgaatcccatgaagcattggcaaagtcatatcctgttagcccaagaatggctcctaaaaggggtgaatcagcaattattatgaaaaaaatttctagcaacttaagaaattttagcaataaatggacagaaaaca

SEQ ID NO: 15531 - DNA, 8871 bp, Cannabis sativa
  modified_base (1851)..(1854): a, c, t, g, unknown or other
  modified_base (4941)..(4942): a, c, t, g, unknown or other
tcatccagttcggagatgtgtcaatcatctcaatttcttccgtacaggtgatgctgggtttttcaagaaattgaattgggattagaatagcctcatcagttatattgttgcttgtaagtcgagttaaggcatcagcagttgtattttcttctcttggaatttgcttgaggacatagctcttgaattgtgcaagcaggtcatgtattttgcttagataggctatcattttttcttcccaagcttcgtactccccagatacatgatttactaacaactgtgagtcactgtagatctcaatgtgttcggcatgtagttctcgagcaagttttaggctggcaatgagggcttcatattctgcttcattgttagatgctctaaacccaaacttgactgccccgtgtaagtgttgccccccaggtgtgataagggcaatccctgcaccggatagttgatctgtagccgaccaatctacatgtaacttccaggtaggtttatcttcattgttgctcggctgaggtccttgtactagctcaaggttgctttttgaaatgttttcttctttgcccgtactctcaactacaaaatctgctaaagtctgtcctttgattgctgtttagggttgaaaaattattttgtactggcccaattccactacccatttgagtaaccgtccagaggcgtcaagtttttgtaatacctcgtgtaatggttggtcagtgtacacccgaaaatgatgagcttgaaagtaaggccttagcttccttattgctaagattaggcaataaatgagcttctctatcagcagatatcgtccttcagcttcaacaagtcttttgctgatgtagtagaccggatgttggatattgttttcttccctcatcagcacggcagttacagcatgttctgtaacagctaggtatattcctagttcttctacgtccagaggttttgagagtacaggagattttgcaagttgtctttttagctcttgaaaagcattctcacaatcctccgtccattcgaatttcttatttcctcgcaggatgttgaagaaaggaacacacttatttgttgactttgaaataaatctactaagtgcggctatccgaccagataaactttggacttctttagcttttgtaggcgatttcatattgaggagggcttgatttttttttttttttttggatggcttcatacctcgtccaagccatctatatgccccccattcttcctggatttgacgaccatgtcatccacgtatacctccatatttcattcgatctggtctttgaacattttgtttaccaatctttggtatgtagccccagcgttctttagaccaaatggcatgaccttataacagtatatatttgttcgaaaacttgtatgttcttgatccggtggatgcattttgattttattatacctcgaataggcgtccatgaagcttaagatctcgtgcccggttgttgcatccatgagctgatctattcttggaagtggaaaatagtctttggggcacgtcttgttgaggtctgtgaagtcaatacatactcaccattttttgttgggcttggataccagtatagggttagctacctaggctgggtagaaagcctcaatgataaagttgttattgcgcaacttttctacctcttcttttaatgcttgtgcccgttctttgtccaacaatcttcttttttgctgaacgggccggaagttcagatcaatgtttagggcatgtgaaattatagaaggatcgataccgaccatgtcctcatgtgaccaggcaaaaatgtctaggtttgctcttagaaattttatcaaagctgattttacttcaagcannnnaccttttccaattttgagtttcctagtcgggacatctgggtcgatttatatctcttccagttcttccactggcccaacatttgtatttggttccccaagtcggggatccacatcttcgtccccgccttgggcagttccctatttggcaatgcttttccccctgtctgaactctggccagaggatttttcctttttggccttggtcagggcaaggttgtaacattcccgtacaacttgttggtttcctcttaggcaccctaccccattctttgttaggaacttgatgcacgaatggaaaattaatgtaacagcttttaagtcatataaggctggtcggcctaacataacgttaaaggctgatggaacatcaattaccaggaattgtgtcatcacagttatgctcctcgaagcttgtccaacagtgaggggtagacgaattttccctaaaggtgcaacactctggccggagaaaccatataccgactgggtacaagggattagatctttgcgttggagccccatcttctcatacggtgctttgaatagaatatttgctgaggctccattatctatcatagtctgggccactgttttattcgctatctgtatctccatgactaatggatcattgtgcgggaagcgaacattgacagcattttcttcagtgaaggttatagtgggttcccctacctgtgacatttttagctttctttcttctacggccagaaccacttcctttggttcgtgttgtgaagttcgggcaaacctctcctgagctttgcccgaatctccaacaatatgtgggcctccgatgataacttgtaaatgttcgtccactggtagaggcagtagcaggtcttggtcgttatctgcttgggcggcccgttgattctggtcggccttgacatacttttgcacatgcgggttatttttccttatcaggaattcaatttcccacttcaggttgttgcactcattagtgtcatggccatagtctccatgaaaacgacaaaatttggacatgtcctgcttacttatgtcctttttcatgggagcaggttttttgtacgggactacagactgagttgccatgtagattgtctccaagtcgtcagtcaagatagagaaagcagtgatcttggaaggattttctctaagggtctgttcggttttgcctgcgaactttccctttttcccattgccttgtctgtcgttgttgttagatcttttgccgcccagatttaaactactagggtattgggggttttgagctgacactcctgccgagtgagcctctggttggcccgatctaggctcgacatccgcccgttgaatggcctctgcaagtttgatgaaaccgtctgctcggtcaagaaaatccgccatagagtctagggccacttttcttgatatatttccatagttctcctagcacttcgatgccccccagtattgcggccagcctcccctcttcagttaatcgtgctactttcgtagtctttgtcatgaatctgcttatgtaggctcggaaaggctctcctggtctttgcttcacttcgaccagatcttttaaatgcaatgggagttggcgagaagaagagaactgtgcatgaaactccgagaagaaggctttccaggagttgaaccttcctggtggtaacttgaagtaccactacagtgcggcttttgaaagtgtggcaggaaatactctgcaccgcacatctccttgtaccccttgcaaatctatttgcacttcaaaatacttaaggtgtgacaagggatcttattttcttgtgtacattttccaggtcggcattttgaacttgagggatagctctaaaacattgatcttaggagtgaagggtgatctgtgtgcttggtccaactcgagatcagcgagtttttgaccggctaggccttggaacatatttttcaattcatccaactgtgcttacacagatgggtgaactagttgagcctcttggtccatctgtgtcacgtcaggatctcttagaattggatcctggacgcggataccgggctgagtggccggttgaacatattgttcatccaaacccctcctattcaaatcattgctgagatcatgagctgttccacatctgttaaatactgagacaccaagctatctcagtgattggttggtttggccagtcacctagtcaaaatcgctagtttggacggagttattgggtataactccacctgattaattgccagataaggtctggccgcctaccacttggcccacaggtggaacctgtgaccggagattggacggctaaccgttaagagtttgggcagtatgcccagtgggatgctggacattacggctggttgttagttagcaacttggtaggctttctgtatcagtacggtagcttgtcatcttcggtcgtcgatggctgcctgttgagcctttaacgtttccatctccatatccctcctctcaacgaactgacgcctctgctcttcaaacgccaggttcactacagcacggagctctttcggatcgtgatgcaaggtattagtatgatcttgcataagtccaacagcattgtagaggttctggatctcagtatcatctcctatagtcgtctgaacattgattgcgaaagggattccagtgttgggagtacccagatcggctgtcgaactagtgtttccagtctcttgcacactgggtgtgatcccagccagaggagatgtcataccttgacccacagttggtggttgcgtgtttggttgctcaaggtcgatgattggtgggaccattgtatttctaggagtttgcagtgtaggatctgccaatagcggatcaacctgatcaaacatgtctctgcgaatttgcaccaccattttgtgtgtgataaaacttaaagtaaagagcaaatttggattattactctcaatgaaagcaccaaaatattgatctcgcttttagccaacgacaatgagtcaattaataagcgataagaaatgtaattaagataaggtaagaaccaataaacagtaaagaatacaaaattttaaaagaggttcggtccctttagttcggtaatagcctannccccttagattgtattaactcaagaacaaaaaatgcagtgttttctttcttaaagctctcacaatgaaatctctgaatgttttctcttagatagtcagctaaaagacaattttttcttatgctaaacgttgaactagacaattagtcaatcataatctctgaatatttaattagtcaagcagggtaaaatatttcatattgaacttttatcattatttttcagcccagaagctcttgcgatgaccaagtgttttaacaaacaaactaaatgaatacaagtatatccattacatctgattcagtgccagaagaatagtgtaaaataatgtccaaaatttgattaaaaaaacaaaatgtaaaccactgctatagtgcaaatgaagcacaaaatgaagatagctaccagaaatatcttcctagagtggcagactgattatatttttcagggaatgaaggcagagattgctgagaaaaattaaggaatgggataagatacagatatgcgcttactacacactatacataaggtactacgtacccttctcttatttgagacctttgccttcatcttcattcaaaatccggttcctgaaatcattcaccataagaggcagaccctcccttagtggaatctttggctcccagttcagcagctcctttgccttgctaatatcaggtttcctcttgtgtggatcatctgcagtattcggcttaaattctatagttgcacttgaatcaatagtttctttgacaacctgtacattcggggaagagagtgggaaaatgacagtataaatttccttgtgtatttaataccaaccagcagataaccaagaaatttaaagcaagctaatttttatcaccatgtgtttacttctcttttgacttttaaaccaacccagcagaaatgggaaagaaagacaaacctctgcaagctctagcatagtgaactccccaggattaccaaggttgaaaggacccacatgttccccttccattaaggccaccagtccatcaacctgtcactcacaagggaaaaaaaggttaaggatctctccctacaccttaatcagttcaaattgccagcttcttttatgttagcaaatttgaaatgggaaagaacaagtttcaaagtattcaaccactgactttattggtttgtatgagatggagcagactttcatgctagccatatgacaaatataagatcttacataattatattgtaaagaatcattataaaatatgatagtgttcaacaaaagaaatatatactgccattgagaaattaaaggaggtaaatgttctactataccaagtcagacacatattggaagcttcgtgtttgtttaccatcaccgtaaacagtcaatggttctttgcggatagcctgcaaaagaaagctactacattcagcaaaatatgccaatgttgaaaaagaaaatctagaaagcatcccatatgaaaagataagtagagcaccataaccaacctgtgcaacaaaattgctaacgactcgcccatcatccaaacacatacgagggccataggtattaaagatgcgagcaatgcgcacctgtaaacagaaagcacaataacaagtctcgtgttatctaatatgtaacccaatcctatcttacattcaactacatcaactataacttcttcatgagagagacccttcaaatcaagtagattgggaaggtcgtgaaggtaaatggctaatcttatgaacttctaaagtacttccaaaaagacggcagcattgtgaaccttctgaaagcacaagtgtaagtttggggtgtaaaagtagttttaagccattttatcatttcgtattattgctagctcctccaactgtctaggtcaatctaaattacatcatcagaatatatatttctgatctaaaattaaacaaacacaaacacaacttaagcataactcaaaatttgggcagtctaattataaagtcttttgaacttttatcaaggattcaggttcctatgttaccatatgttaagaacagtatgaaaagttccaacttttatctccatctcattttttagaagttattatacgcaaatgtcataacttagcaattagtataagtaaactgtatctgtgcagaagaacaatttgaagttgagagttcttgtaccacttgttattaataagaagattataaaatttagtttgccacaaaatttaaaatagctcatcaaggcttaacatcaaaatttgttacctcaacatctgcacctcgatggtaatccatagccagggtctcggcagtcctctttccctcatcgtagcagcttctctcacctattcatttttcaactctataaaatcaattgtcatatcaatcgacacttatgtataacattcatgctcaatcttttagttggcaccttacctattggatttacatttccccaataagtctctttctgtggatgctcaagtggatcaccataaacctcacttgtacttgtgagcagaaacctggccccaatcctctttgcaagaccaagcatgtttagggtacccatcacattggtcttgtaatcaataatcaaagttaaggataatccagaatgaaacaatctcaaaatgctcaattgtaaaccgggtatcaaatattaaaaatacacaaattacaaattcaaacaatactgaatcaagaaaaacatatatactaaaacagatcagtgatcaacgaaatcatacttttaaaccaaaaaaaaaagaaaaacaatatatggctttcaaaggatatgatcgttttaacaggattgtacttataatggactggtgatgctgggcaagccaaatgatagatctgatccacctccaagagtataggctcaaccacatcatgacgaataagctcgaaccgagcattcccaaaatggtgcaccacattctgcttcctcccggtaaagaaattatcgatcacaattacatcattacctcggtcaatgagtttatcaacaaggtggctccccacgaaaccagctccaccagtgacgacaatcctcaacctccgttgcctgagtgccaccggaacccggccacccaccttccccggtccaccaccttgaccgctaccgaaaaacgatgtaaccgaaacctggtcatgggtcgtccctagactgccctgaaaagatctggctataccggaattggggtcggagggtccaattcgagacagggtcggctggagaatgaagaatgtggacccaatcaatatacccacaaggataaagagaagcctctgttctttgaagaggtaattaatcgatctgggtagcgatctggggtgttttagggttttaggtgagtatggagatgtcgaccctgttgccgccatctcctcatcccgtctgtgattcacgctcgattgcttatgtaactgcttcattcttagatttctggcttctgaatataacgaatttgagctctcctaacactccaagctctgaggagagagactcactcgagcaatgtccgtattttcaaatgttataattcgccatagccacgatatgcgcctgagtgaatttgtgtgatggaaaggctagagatggaagaaatggatggatctgagagagaaaatgtaaaaatgaaattaaaaagtaagaattattgtcttttttttcatactaacaccatgacagggtccggtcaacaagatctcgtccccctctcttctgtgctaatctcagttctctacttctcataccactgtaattatgtacctcacccaattgtatttcgccacctgcgtgtatgatgtgggaccactgcctgatctttgctgttttaggggattataaaatataggaaaattctataatgcacccctttaaaatggatatattgatgcacccttatctgttttaacatccgaaataattttttagtca

SEQ ID NO: 15532 - DNA, 8040 bp, Cannabis sativa
agttattttagaaaatataggattcattttcgcgagtatccagctggactgcgagaatccctcgtttgttcctctcagcaagtaaagtacattcaaaggacggtacgggagaagtaatgagagatgacgtgtcactcaaggaccaagacactgtaaatgcatttaatgcagtatggggaagaacatcagatgtcttactctgacaagcgtgtttaagggtttaagcccattattttctaattttattacgtgccggcatgcatcaatcaacgatctcataaatgagtcgtcaagtcataaataaaggataaattacatcccaccaaacacctacaaacaaggcaattgtgtcctaaatcagatttgagaaattgtgctaagtacccccaattgaacacgacaatggtgacattttactaccattatgagcctataaatactccaatgatgaataaaaatagggatcggccaagaaaaagctcagataaatactctcataaatatagtgactcgtggactaaaatttattaatgcttcaaccacgtaaaaatcttctcttctaactttgactaaatacttcatataactttaattattgattgccaaaaaccttgatcaacaatttaaaatatatctatacatatataaaaattaatattaaaattttactttttttaacaatctaatgcaataaatattagatctaaaaaatttgatggatctgatccaatagaaaaatattaagtctaaaatattagataaatttgaataaatagatatacatcaaatagatagaatcgatccagatcgatcaaatgattgaaattaattgaatcggattataaagtaaattttaatatctaattataattggatcagatttagatagatttaaaaatattaaatttggtctaataaacacatctacaataatcatactggccatacaacaccaagacatgataagaatatagtaaagaacaagtatttttcgtttctaaaccataccacaatctaataaagataagtaacattttcttaaaaatatatttgagataaaacaaagaattatgagtataatttaaatacatattgaagatgatatatatgggtgcactatacacaagtattattaggaaaatttatgtttttatgtttaattttactttctaattaaaaataattctctcatttttatatgggttgaggttgttcaattggctaagagaaattaaaaaaaaaattaaatttgagttaaatatctttaatataatataaaaagataattttttttaattaaatagataaattaagtatagaaactcaaattttcttttaattattgatcatttttaatatttttaaaattgatatttataatggttagatctatctatattcaaagtataataatatatattgttccaaaaacaaagtataataatatataagacaatcaaatgaggtatgcatgtttgtgtgtgtcaaagacttgatacaagtgtttagtgtatataattatttgagaaaaaagaaggacaactatatatgggaatgataaggatttatcaagagaactttctaatgagaggttaacaaaagaagaagaccccaacggctctaagtagctatgatttatttatttattattttatttcttaaactcattgataaaaaatattaagtatatatgtcagttatagtatatgacagaatattatactctcatgttgtttttttaagggtaattcttataggtaaaagagaaaatacgagaaaggtaaaagtgaagagatttcttacatccaaaaaatattattatctttcttaagggtatgttaaccagtccaagagacgtgacattaatgttacgacttacataaaaaagaaatgacactgatgaaaagttagacagtctaattttaatatcaaaaaagaaatctctgaaatataattttaccctactattatatttacgaaaaaaaaaatcaaaatcaaatcatataaataataaaaatatgaaaatattatactctcgtgttaactcgttatcagtttttaatattactctaaagaaataaaaaaaaaaaaacacattcttaataataatttcaacatcattttctatgtaaaataaatttgaaaggctcaaactaagcaacaaagcttgtacttcttttgagatataagattgaagaagaagaagagttttacttatctagggcatcaccaaagcaaaaaacttctttatacatgaatcctaagcttcttcattcacaaattgttttacacatactaaatatcttcctaatgaggtgacctatgaccattcccaatcaaagtgtgaaaataaatcccaacccttgatatgaattgaatgttggttttcaatattacaatctttgtcattttgcatttcaatccaagtagaacaattccaagtgtaaagtgcaactctttttgagatgttgctttgtaaaagtttcgcacttcgttatctatataattactaatcaataagtggtgcgattttaatcatacactaacatttatctaattatcaaaatatacatttctcactttttagtagtagggatctcattttcttctacgggacgaaaattcctaaccctaatgagctagagattttctatttaaacaaaatcgaaaagatacaaaagccatttttcattcctaattgttaaacgagacaagagctaggatgatactctatcttgatggagcatccacttcaattttcctaattttgttttaaaagagaattcatttttgaaccatgatgactctatctacttcaataggaaccacaattttcttttgtctttagaagagtgtggtgcatcatcatttgagtactccctttcagcaaaataacccttattgctattattttaccaatagaatctaccttttttattcttttttaaccattttaaaatatatatacatatatatataaatgtaaagaataagattgtgtactattaattatcttataattttacaataggttctacctaaataaaaagtaatagaccttctcattttgaaatcatttaacataagagggggcctgacaaaaaaaaaaatctactggtcatttcacaaaaactttgtccaaaaattgcaaggaaaaaacaacaacaccaaaattcaatcttttgctaatgcaaatcatgaccatagcccaagtgttgtgagggccgggagagatcatattcattgtagcatcacaaaaattaagaccaacaaaaaaccaagacttgaaatttcatcattaagttgtcataagcctaataaaccatagtacaaattttaaaaaaagaacaaagaaatgaagaaaaatgttagaaggcattagtaatgttcaatactacgagttgtaatgcaattatcagtataattaagtattgaatctcaccccaatccaaaaaaaacatatctatattgaacatcacaaattttaatttaataattattataaaaaatcattaattttatgatggtcttgtgcctactaacaaaggctcaaaagaaagaaagaaaaaagaaagagtgacaagttggaagacaaaataaggcttgtcattatgtttttattatgacatgatgatgatgatgacatggcctccttgttggagggcaataataatttctcccactatagctctccctttcactctcattcaacttttttcaatatgcatgcaagtaccaacaagttaggatggtgagttgaatgaatgaatgaatgaattcacttttatcctatatatatggccaactactacaacttaattaagccaagtcatcatcatgctcttctttctttgaagagtacttcactagtctactaggacactcaaacttctatcccataaaaattatttggtatctatctatctatctatcttatccctcccttaatagggatctaaagttcaatggatttgaatagtttttctaaattaaaggatattcatacctggtttgaattgatacacatgaaaagttgaacaaagagaatatatagaacatgttgcccattaatataattatatatcaatcaaaaatattacattcaagacttgcaaaatgtcaatgaaatgagacaatcataatgaacaatcatccaaattatataaaatatatatatagaacatgtgtacatgtgcccattatatcaatcaaaatgcactctagacttgtaaaaggcctatgaaatgagacaatcataatgaaaaatcattcacatatatgcttttgtctttatgctgtttttgttgaatttttaactttcaaaagggatacagtaagagatggtcaaattctgtgatctgtagtcttatgctcatattgtgtacttaatagaaaatgaaagttcaaatcacattcaagcaaatggtcaattacttcataataatcaaatagatgagtcaaaatgacacacttacatcttgattcatttccttgtgatttttttggcattttgcttttgtaacttaatctcctttgcattgcagcatgagattaggtgcagctaacctaggcatcaagaaaaagtcatatcaatcaaaagaatccttagagtgtcaaaatgaaaaatatgcaattatttttccttgattgacaaagaaaatgttaataaactgaaaatacagcattagatgacatttcatgatcttcattcttgagctaaaaaatttcagcataacaaactatagctttaaattcaatactcataaaaatattttggaatgatgaattaaacaatttcattatcattgaacaagttgttccaatgttgaaaccacatgttgccactcaagcttgtctcttatgaaaggattttccattcacctagctagtcgaacaagataatgtcttagctaaatttggcaaatttacatgttacaatatattcaaaaagcattgcaccaacttatttgcctatttgaaaagacattagtgattgatttggtccattaattttcttattcaaatttctctgctctatcctaactcagcagtcggtttcataactcgttctcatctcacatcacacaccactcattgcccgttgatttcggccagtgttccatatctaaaatcttctagctactttgtttgtaatcttcaagctttctaaacccaggccctgctcctccttggactgaaaaaggacatgttacaaaagcaagatttgtagtatgatagacccaattattgatagcacataatgtatataggccaagaggaatgagggttagtgagatagagtacttgttaggccgcaaaacatgatattgtttgctttaggtctaacccgtaccgatttgttattgggtacctttccaaaaaacttaatattaataaagtaggtgaatatttatatttaatgcaacttttgcttatttttttttttattatgtgggatttggattgatagtttgacagttataatgagttatttttcccatcaaaacaaaaaaatgtacacttattattattagtttggatttaggggaggttgtgactgattaatttactattttgtgatttgattgaatatgaatttaaacataaaatgatccactttctttgatgatgcttgccaatcactagtgaaaaattaaagcaaataaatataaatcacaaacttaaatacttataagttatatcattttggactctaactctttattttgttaaatgataaattagaccatatttttttaaaatggtacaaaataatactctgaactggttttttatcaaaataaaaattaataataactcgatctgagttgttataacaaaactggatacatttctgcatctaattctgctagaaattgtcttgttgattatactaaaaaaaattatcaaaaattaagctcatggtaatattttacaccattttagaaaataaatgatctattattttgttattttataaaatagagtatccaaccgaacttttacaaaacacaaggtccaaaatataattacttgtataatttagaaaaacattcattcaaagccacctatataatacattatttatatatgtaagcaagaaaactaaacttcagaagagaaagagatagatcattcaacattgcttggttggttctcttgatcttcactcattagctcttgattctgctatcaacacttaaatgtggtcattcaaaaatcaaaattatacgagtgtgggaggtaatttaattaacaagtaaatagggattgacatagtgttagttaaagtttgttacatgtagctagtattcagttacaacaagtaaatttcttaaaagctttaatctcgacagttaagtcagttggggacaattttgtctttccaacactcttgaataatgcatttacataccaacctcttctacatacagaaacaactttcaaaacttcttcttcctcctctccaaaattctctctgtacggaaatgaaacctataaaactcgatcttcttgtgagttcatagttgttggtgatcatcaccattataatatcaagtgtgaatcaataaagattgaagccaaaggttgttctatctagggagtaaactgttgtcaccgccaagcaactgatcaaacttcgttaaattggtatgatttgatttctattttgcattttatgttttttcattctcttgattagttagttcaatttattgcactaattgtcatctctgttcttgattgtcattcgaggtgattaaaacacacagtatcgagattcaaggatcaagatttggtgtttggtgatcaagaatcaatcaagatgtattcaaaaaagtttgaaattgacaagtttactgggaagaatgacttcagcctatggaggctcaaaatgtgtgctttattggtgcaccagggcatatcagaagccattgaactagaagaccttgaagatatcaaggaggataacaagaaagttaaagagattcaaaagaaggctaaaagcaccagtctctaaagtcttggagatgaagttctccaagaggcatctggtgagaccactgcaattggattgtggaataaactatccgtaatctatttgaaaaagactttggctaacaagttgaatctgaagaaaatgttgtacaccttgagaatggaggaatctggtgaactcagaatgcaccttgatgatttcaacatgatcattcttgaactcaacaacattggtgtcaagattgaaaaaaaggatcaaggaatcgtcctattaagttcactaccaatagcttatgaacattttattgacacaatgttatatgggaaggcgactttgataatgtctgaagtcaaagttgcactgaattccaaggagacttagatgaagtctgacgacaagaatggatcaaatggtgaaggtctaatggctcgaggtaggtttgatataatgaaggacataagagcaacaactcaagtggaaatcaatagaggaatcacaacaacaagggcaatggttatagtcaatcaaaatccaagttcaaggctagaaagttctacaactactgcaagaagaaaggtcatctcaaggatgaatgctacactttgaggaacaagaataacatggacaagagcaaagacaagaatgacaaaggtaacaagagtgaggttggtctaactattgatggttatgattctgcatgtgtttttttataaaaacacaaaattaagaaaagattggatcttaaactctggatgcacctttcatatgtgtccagacaaaactttattcaattctcttgaagagaagatttgtggaaatgtacttcttgaagataacaaggcctatttggtaaaaggtattggtactatcatcatcaaaatgtgtgataatgtttcaaagaacactaacaaatgtcatgtgtgttcctgatctgagaagggacctattatctattggatcacttgtcgccaaagaatgcactgctaagattaatggtaacactctcaagattatgaaaggatatgtaattgtcataaagg

SEQ ID NO: 15533 - DNA, 5294 bp, Cannabis sativa
  modified_base (4519)..(4539): a, c, t, g, unknown or other
cggctccagcaaaccggaatcccaccagacgtaagtaacgagacagaggagtacaaaaaggttaaccgcggaagaagctgcagcgacgccggctacgccgagcttgagccgagtcacgagaagaaagttgagtgggaagtggagaagtgtcccggcgagggatgctaaagtgagcgggactgtgatcccttgggagcgaaggtaaatgcggattgggtgtatgaatgagttggtgaagaggtcagggagtgagaagagaaggtaagtgtgagccatagttgtgatacttgggtcctggttcaaacagaagaggattctggacatgttgagccatagaaacgaaatgggtaaggacgaaacaaggaggaagatgattgagcggtgtagggtaatggagaggagtttcggacgttgggccccaaaagcctgggaacacaggggctccatacccaaagctaaacccgacaaaacagagtagcctgtgatgttggcgaaggcgatggcgagagcccctgctgcaagttggaaatcgccaaggtgtccgagaaaaagcatggagattattgagcgtgagtagagaatgagagctgtcaaggcaataggaaaacccaagttgaagagagatttggcttcagagattatgtcagatgtgaaactgttcggttgttggtagtgatcatcatcaggttttgccgaggtggtcttttcttgatctttaatattggtgttggataaggataaaaggtcgagaaatagatgggtttgtggctccttaatattatgctctgtttctttggttgttgtagaactagtacaagtattagtagtaggattacacataatgatgatcgaaagaaactcgaagagtagttttgatggaattacaatggcgtttttccactacacttaaagagatactctcgtaaagagcactcaaacactctctcttaatcacactttgacttcctcactcgctcctatatgtgtttaatgaatgggaaataaagttttttttggtcttcagagatacatagacagatagataggttgtctccgcatatgaagagcggggttgtattaaatagaggctgtggaggtggggtttcttctcttttataaaaaacaaataattaataataagtatcaaaaagaaaagaaaaagaaactcttaatacttgtttataactttatactaaatgggatcaaattcgtttatctttttttatttttttttcttcccttcccctgttttcttttcattttttttccgtcccaacaatgaaatgataatatttttgttattttatgtggcttagagagaaagacgtcagattgtcagaatttcctgagggttcaatttcccataaatgaaatggtgtttttacgagagaaaaactgagaactgagagtgagatagagagagaaaagatcagagaaagactggctttttttttttctgaataattattttttctcattttatctgatcagtttagaagaggacgatgagatgttaaacacgttttcactttgctaacattaaggtactatacgtgaaataataaggaaaagtacttgagaaatggttttgtcatcatagatcaagtaccattttctttactgcaacaggacagtaagaagacaatgataacccttaagtttctggtttggggtaccccaattccggtctttttctaaagcgtgtaagaaaggagcattttggtgtttttttttttaatggagtcctaaacaccatttcattatatatttttttttgttataaaacccatttttagtgaaatgatcaaattaaggccaccaagtatggcttcgggtgttccacttatgcaaagtttcaggtcagtgttggtctgaccaagatggcattttaagctactacaactgggagtagtgtatagtgttggaggggtagtagtaataagtgattttggtcacacgtgcatatacgaatgcaacatttacttgcataataaggacacacatacacaatagtgaagtaatagtacttggttgtgggaggtgggtgggtcttggtggcatttctggcaatatgattgggcaactagaatttctgaggtggaagtggaccccataagcaaaggagaggggtgaagcctcacacgtcagcaaaaacaacagtaaactaaacaagttttctacggccaaaaaagctttgctgtgggactttgtatcctcccaacccatctatcaaccacgtcattattcgtcattttcccttcaatcaaaacaaattttaatattttcttttaataaattttcaccaattgatattaatgcatggatttcagaaaactatacagcagaagagtcagtgaatcctaaggctctcttacccttattttatttctcttattttttacatgcaagaggttgatacgtgcgggacgaacggagtaagagaaaggtctcgctggcatttccacaaacagatggaacgaaggagacagcaccctcataattactatacccatttcttttacgaattacgatgaccactctctataactatttctttattttgtgtgtgtgtgtatgtgcgtgggttattgcttctttctcccttattttttctttaaatatatatagaaaaaaatattctgtttctttcactctcactatctatctctgtctagttgagttgggtttaattgactgttgttgtcggtttgcataaaaatgtttttctttatagagcgaaacaggggttgttttgagctttgggtgtgggtggctcagagtgtagtcagaaagccaacccccccaaaaaatttgtaatgaatatgacacacacatttattttccatgaaacccttttctttttttttttcttttttctttttctctctgtgattatatctctttctttctctcttgttgcaacaaacgggagcgctttctttgattcctgtatgttccccgttccactttcacacctctgtgatcacacactactgcaccttaacgtggaccctacactaacctaccctaccccacccttccatatatatttccattatatttatatatatgtgaagagactacgatgtatcatggataagatggtattggtatgtatatatagtttaaatcaaatattcataattgtcacaattataaacagaaatatctgtatcaaattactattatacaatagccataaggcgcatgcccaataatagacttaacatcttttcattgtaattaacattcattttcagggacgtcttagtaaaaaaaaaaatggggggctctttgttgacttgtcaaaacatataacaatatgtgtacaaaatataagatgtctttaaatgtgttcttgtgtttattccatataagtatcttcttttttattttgtttttttttttttattgcagcaggatagttaattgtctaagtctaattaaaggatatgtttagccaaatcaaaaattacattcaaaacgttgagaaccctcacttgactaactatatattcccaataaatgtagacaatacaattataagaacaatttaaccagcacgttcaatgcaataacatattatgaatagtcaataaatatctacaaaataaaataagataataataaaaaaaaattaacaccttaataatatattaataaaatgattaaagactattctccttatttaaaagaaaaaacatccctccaacatattgtatttaaaattgaacttgtcgagaaattttttataatcataggctcacaacaaaaccaaacccaataatgaataaaattttactatcacacaatttaataattaaaatagataatgtgaaagaatgatagtaaaataatttaaattataatatatgaaaataataaataaaagacttaaaatatttatttgccaaaactaaaaattcattaagaatgaagctatgagcatataatggaccacttttcttggctatggcttttggggatcatcacatgtttgcatggatcgcagcagaaaattaccctaaacaagtaagagccataattattgtcacaaaatccttttttttttaacaatgaacaaatttttattgaaaaagatcagcgttgagtacatcgaaaagaaaatatagaaaattctccatccaaaatagcttaccatctaccctgagtgcatgcacagttaattcatgagcagctttattgacggaccaacgaacatgaatcaggctagatcttttctccattctccatcagaaaattagacagtaaactagaaagatcattgcaaagagaagatctcttagcaaaagcaaagattacagctaaacattcaaattcaatagaatagagagaaagtcttattcaaagtgactagtccaaagccaccataagagctattacttcaatttgaataatttgaataactgtgaaattctttacaaaaccaatatagaacataatatagctcaccaagaagtataactatactactagtgataataataataataataannnnnnnnnnnnnnnnnnnnntaataataataataaagaaaattagaagggctaccttagaccgaagggatacctcccttcagactgtttaaaaattgaaacaggagaaagggtataatttatttatttaaatattacttattattatttatttatttatttttgaaagcacaacaacaagaaaagtaaatgaaatttattcatttaattaaaagatgacttggaagcatgagatcaaaatattttggcaagtaaaataaataaattatagttgttaacccgaaaatttttctagtgacatggacatcaatatttgacaggtgacatgaaggacgttgtcacagagttcagtagacccaagtcatagcattcaacctgggaggggaccctagccctacactcaggttaactttaggatcgccgcgatggaagtttggactttaataacttgaatccaacccactatcttccaatattatgtaccatgaagacatggagcaaccgaattcaagcctcgaaagctgaaattacacaaacctacaacctagaagctaacctgggcatttagggtttcacccgacgtccaagttgacattcccaactagagttttggtttatggtaccgtcttagtgcaaaagggttaaaacatgcattgtgacatcaactagatataccacagacatatttgagacatcaaaattagaatcagagcaagttgatttttgagcacccaaggctctagggccccaagcactgttaggttatttttagccta

SEQ ID NO: 15534 - DNA, 8940 bp, Cannabis sativa
aaaaaaaaaaattatctaaaaaaaaaaaaaaaaaacccaaaaagcccccaaaaaaaaaaaaaaaaaaaagaaaaaaaacagggacggggaagaagttcaaatcaaacaaagcagcagctaaagaaagcctaaaaagtctccattacccgtaattaacacaaaatcgaaatttttttgcttcgaaattgttcaacgccttctcactcgaaaatggctcgcgatgatacacaactgagagcggcgaagcgttcgtaccagagcgccaagctggaagggaaccaccaggaggaggccaagtgggctaacgttgtcggccatatcttgaaggaccgaggagagtatgtggaggctctcaaatggtttcgtttcgattacgatatctctatcaagttcttgaatcagagacaatgcctcgctagttgccagtctctcggtgaggtccatcttcttctcaagcagttcaaagatgctcttttcttccaggtaactgggttttcttatttctaattcttcattttttttgatacaatctttatttagttgaagcaaatggatctttcctaaatagagccccaattgatgttgaaatatttttatgtgtagttttacacgacagtttgattttcgcaaaacattgctttttatatgaatatatggctccttgaatacacttacagatagatacttgcattgttatttattctgacagaaaaagcatttagagcttgccagggatgcgtacgacaatgttgagcagcaaagggccaacacccagttaggtcgtacctattatgagatgcttttgaattctaaagatgataatcaggtagtgctgagtgccaaaaagtattttaagtcagctatggaccttgcacaagttctgaaggagaacccaccttctaatacttgttctttcttgacggaatatattgatgcacataacaatatgggaatgcttgaaatggagcttgacaattttgaggaggctcaaaagatcctgagtgaaggattaaagatatgtgacgaagaagaagtgacagaacacgatgctgggcgtagccggctccatcataaccttgggtttgtttatatggagttaagggagtgggataaagcaaggtttcacattgaaaaggacattttgatttgtaacagtatcgagcattgtcagggagaggcaaaggggtacatcaatcttggtttattgcattacagaaatcagaagtatgatgaggcacttaggtgctacaaaagggcacgtgatcttgccaaaacaatggaagatgaggattccttagttaatgaaattgatcaaaatattaaatctgccaaagaagcttcaaaaatagagaaggaattgataaatgaagagcagaatcttaagaagcttattagagttttaaccactgcaagaggaacgcctcgagaaagaagttgcctactgaaacaagacacttctcttaattgtctaatcgataaagccagattaataacttcatggtcaaaggtacagtgtagacctagcagttttcgctgcatttttttttcctaatcactttattgttgttcacataaaacaattttcttacaataatgtcaaagattctcctggtctcctttttctgtcacacattgattcatgttctgatggtgggagtaatatgctcttaagatgtcttgctcaactatatactattccagaatgttctttgtatgtcatctaatgcttttgaatctctgtcctgttgacgaaatgggactgcgcatggttgtcaacatagaaaaatgtgattccacatttgatgtgtatattttcaccatattacagccattttaaccatgatgaagcatcatcagtagttgaccatgaagaccagactgtgttcaagtatttacttcgtgccttttttacgggctggtggtgactaaagaagtcttagaactgagcagtcttattcatcattgtgtcaatagtcttaaatttttgtataacactatcaatattaaagtgtttattacactttataccacaatatatggaatagtactatcattatcaatttttgattataatttatattacgttgccattttatagaagtcattgaagcctgttatgcatttctagtgatttcttaactgtgttactggagggagaaaaagggctaatgctctgcaactaattggtctgaattattgtagtcattagagatgaatatgacctgcagataattcttgttgtgatagaatttgaagttgcttatttcttctgttgatattttattgtagcttcttaaatatggaaaacagaagaagaagatatccaaagaacttggtgacgaagaaaaattgagtgattcatttttgtttattggagaagcatacgagaacctcagaaaattcagcaaagctagtaaatggtacacaaagagtcgagaaacatacaagtcaattcgcaacctagaggtaagatgttgttcagttatgctctgatgtcaatagtattactgttatttcacaaggaataataggcgagtacatattttctaataataatattcgaattattcgtactacaatttaagtgtgagattcatagttcatttatttagttactttcatgaatttttactctggattataacatttcaggggcaggcaatggctttacttaatattggcaatgttttggatagtgctggtaatctgaaagaagcattgaaaacatacgaagaatgctataggtctggttcttctagtgggaatttcttatagttatgtttttgtttcttttgttgtcctttggagtttgaaggttacaaatgagaacactattaatcattaaatgccgtgcatattcaaattctaaatgcagactcttaatattgaaaagattctgatacatgttccaaatggtttagagtttaatattgtattgaattagtttatatatataatttattcgtggctgttacttgttgctggtttcattttacatgattgtggtttcattaattgttttatgaaaagaaaagagatatcctttttatattaatctacacatataattttgtgtcccaggatttcccatgaagctaaactatattctattcagcttaatgctctggagaatatgaattacatccacttgataaggtctaatgacatcaatgaggccaggtaaatgcggttcatgtaaccttctcactagtatcaactctagctttaatgttctatgaggaagttaaagtcaggatcttatgttgtaccgaaatattgttctctatttattaacatttcactggaaggggtgagttttgctatctccagaagcaaattaaggggcatttatttggcttttgcatagagaaatgccttgcatgagtcttttcactgattaaagaaactttcgccttacagtaaatatcaacttcaaattaaaaagttgaaggagtcggaagataaagagcttgaaaaacaagatatggtggagaattactgctcagaatctgacactgaatggagcgctcatatctcaagtgacagatcaaatgcatgtgactcacctgacaccttggctggcatagatgagatgagtgatgatgcacctttgatttcacttattcagtccacgaggaggtcgcccaaaatcaagccaacttatattggaaaacaaaaacaatcttcaaatttcaataaactttcaccaaaaggttccgctagatcaatcagtaatcaggagaccattggtcgtaaacgtgttcgtgtagtgctttctgatgacgaggatgaaacatttgttgaagtggagcattctaatggcaggactctgagttaccaagcagaggatgttgctacatctgatgaatgtaggttttagtcatagctgattcaagacttcaacaatcatttatttgaaacagaatactgaattttattctaattggttgcagttaaaaataaaagtgatgcagtcaatcctggttgtatgattcaggtaaaggagccactgcgctataattagaaagcactattgggttattgtaatgggtatatgaaagcctaatgctttgggttttgcagggtgtgtcaggagttgtttccaaacacacaaacaggtcctacactcctgttaacattgaagaaagctccagttcatacaaaaatacaggtccttttgtttccactcaacatgacgaaggtcatagatcttcaagtactaaagaacatgatgtgagtgattctcttgctccttgtgatgatatgttaatgcagtcctgaatatggctttaccatattgtgtagagagctcaagtttttgttgctttacttttgttatcgttttaagctgtactaatctatggttgcttgtactaatttcagcaatgcgttgcagtcaaggttgacacagagctgatacatgttgaagctgaaaaatttgtggctacagataaattgagtattgagtctttgaaggttgaattggcatgcttatactacttgcaacttccggttggaaagcaatcagaaggcaggttctggattttgaatttaacatgcttcttattgactgtaattgctcctaattcaatgataggtttgtttacaggaaaatagctaaacacagtaaggattaggaagaacacagaaaacttgcattgatgtcctatgaaacttgagagcttggtctgtcctaccccatacaaagctcaaattacaacctccctttctttctttcttagctcaacatgcaatattccagctatatccttccccaaccctcagagagagacaacccactcctatgctaataatttatgagaatattccctgagggatagccaatcacactaagatgatgtttccttcttatggttcctcctagcatactgttacgccccaagtaaattcacacacggcacataaatgattgtatttgatcgaccacctatctcccaagataaatagcttctaattgaaattcatacaatacatatccttttagtctcttttactataaatgtataaagttcataaactatttgaaagttttttacacttccccaaaaccacctgtggtcttttaatacaaaccatacctaacattcttgaaaatctttaacactttccgctacgcatcattgaattgtctgccattaaataataatccaaagggaaactgacattgttggaatgaaattgtttttaccacaactgaataattctcactgcacagaaacaggatggcaaaagcatattttttgatataattttattctcacctatggaacattatcgtcaaaatatgtttgccactagagaatttacttgatgactgagacgtagtaagttgccacttggactcatagaaggcttctcttatcaatgacgttgatgctgaaatattctgattctaatttttggaattgaaatgacttcagatcagttgctattccctgttgcaaagatataatgcttttcataagggcggtattgtttttctttggcctattaggccatatcaagtaatgtaggatttgctgattccgcacatagatttttgtcatgtttgtgcattgatactgtctatttatggaagtgtatctttaatattattctaatatctaaattttcttttgccaggtttgcttcccataattcaccatataagatggggcgatagagtgatagaatccttggaagcaattgaaactataaaggatcaaatgggaaaagtcttggttgaagctttcttagatggtagatatattgctttgagcacatttcttcacgttttattcttgtcattgttgtttcctatcgtgtgagtgtatcatgttggagaattagatctcgtggggacaatttttatttcctacatgcaagtttgatattttcctttcatctaaacgtgaccttctaatattttgtcactccaagtagttgttaagacctcaggcatttgtcagactatgccgtttcctgttttgttgtaacatcaatgcacttttatcagcttactaacatttcccagcaacaccattgagcaatttttcttttttacgagttaaatttataataatattacatgactgttgcaggatgggttcaaaagcgtttgataaaactctacatagatggctgcaaggaggtatcaggaacacccaatttgaagttgttgaagaaattatatgatttagaggtaatagttgaattacgtgctaggggaaattgtttgatgctctttcgatatcattacattatgtagtgctagggtgtctgttgtactctctttatgaaaccgtgttcctataagtaaaagcttttttaactaaaaaggtgaaacttatattttataatgtttctctttatttgtaagaatttgacacacttacttgatgcttaatggcaatgttgaaaacatgatggatttagaaaatgaatgtatttgttgggtatgacaggtttcagatgatgaaatttctgtatctgactgtgaattgcaagacttatcagtaatccctttgctcaacgccttgcaaacccacagaacatttgcaatgttggacctctctcacaatgtattaggtatctacatctcattgatagcccctttttagttttgtggtttttacgaactctgaggatgacactagcattttcttcaacgctcttaaacgtgcccagtgtggcgctactcaactaagaaataagtagttatccatatgtgagtagtgttatccatttactcattgttccccaggaaatgtaactatggaaaaactgcaacaagtattcacatcctcaggccaaaagtatggtgggttgacattggatctccattgcaatcggtttggtccaactgctttgtttcaggtttgtaaccattttcagcttgttaaagtctttatgtatgattctctagaattacttatgctttttattcaacactagctacaattagtagactagtaggtttgaaattcattctaaattatcctttatggagccatagtaatgatatccccaggtcaaaatcaaatattggttccataaaattttaattttgaataaataggactttttctctatgactctcgtagtgttttgtccttttgaattattgttatttttttttttcgaaaaaaattctctccaaactatgaaaatagttacaaatatttccttttggttgcattttgcttgatctttttaaataatttgcttacagtagcgttgtagcacgcctatttaactaacttaagctagttgaaatccaatttattgatagacatataaaaaataattctaaatactgacacattatcccaaaattcgttacttacccctatttatgcatgtattttctgttcagattcttgaacttttccagattagcatcacattagtgattagtgttacaagtgttacatcagttacatcaacaaattattttttttaaaaaaataaacagaatataaccaaatgggaacatttgcaacaatttttatagttggagaaaaatatttttacaagaaatgtgtagagggtgaaactctacaaatgtcatagttgaggaaaaaaagcctagctattctaaattttaagtaagctattctccttctctcctctcccatcaagatttcaacagacctcaacgttcttttactaatccatttatatatataaatatagactagtggcaactccacgtgaaacactaacacatgtaaatatgtaatcaaactcatgctataattgagaatctcactattagttttgacaatttagtgaaattcatacattctacttataaatacaataaaacataattaatatctcatggtgatcattctttaaaaaataaaattatatttcacggtgatcattagtttctccaattaagttattataattgatgtttttgaaataaatcataatagtaggcgttatatatagctagtttctaaaataagttggtatactttgctgcctttattatactatatgaagagaaatgaaagaaaataaaactaaaattaaatagttgtgtttaattctatgcctttaaatgcactatgtttattaagacgattaaggtatttttttcactctgacaacaatttcagtcatctatgttttaccttctttgtctttcgtagtcatccaccacatgttcatctaccagtgccaccacaatcacacaccatcaataatttgtgtacaaatttcataactttgatcgtatcaatatatgattatatatatgtttctattaatctattttgtattattaagttcatatatatcttgctttcttaattgtaatatcgatactgaaaaaaaaaaaaaattgtaataagagttgttcgatttttttttttcattacttttaacttttgggaatatatatggtatttaaacaaataattgaatcgataataatttcatgtatgatgtatggtatgtatatatattggtactgatgaaaaacgacaggtgtgaatgattcttctatgtactgtaaaagacctaattacctctaacaaagcataacataacaataaatttctttctcataattcctaggacaaaataaagaaccaaaatctttagatactatattatctcataaatttttaaagttttggcatcacaaattttgtttaagatcactcatttttaaatctctcatgttgcaactttccatgttatctttggcatcttatcacattttctttgacaatttatcacaaagttgaaggagttgatcaaaatattgttgatggataagcgaatgtgttgttaaaaagaatgtgtaggtgcggtataaaatagcttttattaatattattacttttatttgttttgtgctaaaaaattacttggaaaatatcgagttgatgaattttgtcaaagttgacatctttaggatttttt

SEQ ID NO: 15535 - DNA, 8593 bp, Cannabis sativa
gtaatttctgatataaatatttaaatttaaatatcgattacaaataaatatttagatttaatttttaaaggtaataatacttaacttatatttttagaactcgactaagtgttaaatattcatgtgtcattttttttaaaatttaatcacttaaactaattaaaaacagtctcagttaaataattacaaaagttctaaaaatataacttaaatattataacaataatttatgtgcaaccaaaattaaacttgcggcaaaaaaaactcttttttaactatgattttatggtatcgaatgaaaacaacaaaattacaacaattaataaaccttaattttgtaaaatttcgtacaaagtagtttttatttatttatttatttactattttgggtatgtatgaaaaaaatatctcattttttttttctaaaaaaaaataaatatattccacgtgcgtgtccctaactagtatatatatatcatatttcgtacttcgtcaaatatgctttcttatctttttcctcatccactcatggctctaaccatacccaacggtggaggtggtactagtggagcttcaatcatcttctccggcaatcccaccaaaaatcccaactacacccacttccctattcgccgccaccttatcttccctcactcgtccagaaacctccacgtggcagtgtctgccaagaagttttcctccagaagcggaagggtcgatggcaacaagaacaggagaagcaccaccaccaccagggaccaagaactagaagagattaatcgaacggctgacctccaaatgggtcttctcgaaaacgctgctgctactggctcagccgttaatggcgttgatgatggatatttcttgcccaagcttccgggtgaggaaaaggacttttgggaaggtgaacagtgggattggcttgggttcttggtcgagtacttgtgggctttcggcatagttttttcggtaagtgttttttcttttctttcctactctgcatttagatgagttatttgtgtgtttaataaagctttgtttattttgaattagtttgttattcaagtgttcttataggcaaattttgtgatatttgaatgcttagcttttgaataagaattactcacaagggttagattttgcagaaggataagtactaatttttttatttttaagagagaaatcttggtagattatcattgcaagatttgctgacatgctatggctgctatagtttttcctggttttttaagtataagattttctgtatgtcaaatcaactgatgatgtttcaagaaattttgatgcaaatacaatctatatatgtcttaattaaggatagaactttaccttttatcaatagtgtgttgtctcttggtgtgataatggtgaagaaaatgcatgctaccatcctaaagcctttcttagctgtccaactagaattacctgcagcagcatataaacgtgtgagaatggaatagaactcaatatatagaatttctataaaaagtgaagatagcctatgcatatcaatgttaatttctataaagacttatatcatgtgagaagtaaaacgaaatttttatggctgttagttctaaatatcacagtaaaaatcaactaatgtagcagattcataccgcataaggaatgttttcattttatgttaacattcgatctatctttgttcttggcagttagttgcttgtggggttgccgtttccacttacaatgaaggagctaccgatttcaagaacacacctgtatacaaggagtcagtccagtcccaggagcttttagaagaacccgatgcatccaatcccgatgtatttgaatccaacccaactgaggtggctcctaatttggaatagcatacctgatgaacaaatgacttttacaactggtatatgactgtgggattgttttcgggctcaatacccctttacaatccccaggggaggtgaaccagagcgagaggaagccctcgtagtcagtcccccctagattgttcagttggagctgttgttaccatactgttgtttcaaaaactatctgtattgtataatcctactgaaggaaacaatttaaaaaaggtatgttaatcaatttgtaaagtgttgtttccattgtaatgtttaataccttgatacagagaaagtctttaacatgcaattgagttagtagcaaatttgtgaaaaggagcttcacgttattagttcttatatttggtgttaaacaaacgcctcttgaaggcattgatcagcatacgcaagtatagaaaagatgcaactttacacaaatactccaatgaaaagaaatatctataaagacatttgggtacaagcaaagtaataaaatcaaagttttgaagcatatattgtttcttccaagtgttttggtcaacttttactaattcacaaatgtaaagaaagataagtacctgtttcatctctccagcacatttttcctccagactccagaggtgtcaaaccatgtctccagcatattttccctccagaggtcttttcatacaagttaatgtatcaaaaactttattatgcattctcccttctctccttttttttagggaaagatcttctattataaatcatggaccttcatttacaataacaaagtaaatgcgggaggaaatatccttgaatgctggttaatttactatccaactctatgaaagcgtattttgcgaggccatgagcaatgttattggaaagcctcctaacaagagaaatatatataaataaatacacacaacataaaattatttctacaccatgagaaacatcttagattaaagataatattaaaacacattcaaaatcaaaagtaatatacagatgcatgggaaggtaacattttttttaatatatgttttattagatacacttgatctaatggtatttttgtaaaaagattatggaaaaatatgagtccattgaatctgtatataaagatatatacgtgtacactgagtaggcaggcatacaacgttggttggcatggttagttgtcttgtaattcctctcacagagaaagaatgcacattgcattgttgtgtgtctgaagacgccctacgaattctcagttgtgatgcccaatttctcaacttcatctctttcatcaacaaaggcatctgctgatcaagatatgtgataaagaaaatactcttggaacattcttccttgcagacaagtatcatagctaagtcgatctgatcattgactcgttattcacaaaaaaggcatctgctgttgtgagtgtctagaagattccaagatcaaaacttggacattcattcacatcccatgcacaagtaaaattatccaccgaacaattcttttctgcatcaataggaccacaagaagtagtagaggaacatggcatatcagaacataatgcttcatcacactgtttagaatcgatgtccatcttgtctgtcttaagctgctggagtaataagcgagcatgtaatgttacaaatttatcttggctggctaagtgacactttatattttactcaaaagccaaagacacatagtactttcaaattagagtatatcttgtgaatgagggtgttgagaaaatgcagcattagactattttccacagcagttttttcttaatttagttcaagaatgagcatatttttttagccatgtatcatttgcgtttttcttttctgttatataagtattatgtcatcttagaggattataaagcaggacaagaaaatatcaacggttttagctttataaagataaaacattaacttctcaaatccctcacaacatgtaagttattaattgctaatccaacatgtattcaagcaattggtgcaaaggaaaccgtagcagataagataattaagatccataccaggtgggaagttccattatcgttgttatcattcaataactgactgtcatcaccactggatattgctgcaaagtctgacaatagttgatttgttgttagatgctgaaaatatgtaaagaaaaagagatgtcgtggtatgtaatgttttaaatttgaaaattgaaagttttagaaaactagccttcggaagacatatgaaatggtttcttaaggtccatatgttcttttgattccatagcatcaacactttcacttgattgatcatgaagaactgataattctggtgttttattatgttcagggaaatccatatctgcagcgtttgcaagtagtggctcctttgtaggggtcgtgtttttattgtctactggaacattattttgaattctgggtttttggagaaaagacaaaatttgacgggctgcagaaatagatgaagtaaactgtaaggttcagataagtacggtataaaacattctcattaaccaatataggcaattctcaaaagtgcatttgcacttaatctcaatcttcttttattgctaggtataatcaaatagttataaccaagatatgtctaaacaaatgctgaaacttcctggtgaaaaacaaaatatgacacctgcagaagcaaacatttcacaagaaaatccaatatatttaccaaagaaaaacaaaaaacaaaaaattgcctaattttaatatcgttgtgtaattttaagacagtcgtagacataccattccgcagagggtttgtagtagctgtactgccagattcctttgagtctattttggctgagaagctaatatctgattctgtagctttcctcaaacaaggattaccagaaggtttgtctgttatgcataccaaaacatcaaaaggaagattaaggtctatagctctatgcaataatgactctaagatgataacacttgatctgttctagtaaaatgaaaagaacacagtttcccttgataaccatggctacattgtcaaaagcataaatctgatctgctggcctacgtgcataattctaactaactaacgccattataactcttttagatattatggaccaacagcaaagggacacaatgtaaaaggaaaggtgtgataattacgattgtgcataagaaacaaagaaaaatgaaggattcattaaataaccaccagaaagggaaattatttaaatggatatcacacaaaccttttaaagcggatttattaaatgcaagagaactttgctgtctgtgcattttttcaatatccttaacaatctcacaacagttttcctgagcactggaagcagctataggttcattgttttcatcaggctgtccaatttcaaccaaataagcatcaaatacaaacgacacgccagttcttacaacttcatctcttttcaagaatccactattcaagagatttctcgtttcatcatacagcattccctaaccaaaatattggtgtgttaggatcaaactaaacacaacaagaacacacaaatagcaagaaagtcaaacgtctatgatggtaaattacataagttactcagcatagaatgggtggacatatttgtgggaaatgaccaacatttaagacagtgatcaaagaaagttcttaaagaaatctagaacagaacaaatacccgcttcctacaggagccactatttgcaagcctcaagaaaccatcgtgaaacttcttggacttttgagttaactgtgatgtgtacatgacctgccactctgcatgaaaacatatttaattagaaagaagattaatgattaggaaaaccaaaaagagttgaaaatgctaacctgttgaactagattgggttgtatcttgactgttatgagatgccccagatttaaattcactcttgacaaactctggaatgaagtaaaatattattttcagtatgatacattatttcagctgttctggagcaatgaatacaaaaatacagaaagacaggaaacactataagatcccacaaaaactatacatttacaaatatttccagaaaaaaacaaaaacaccagcaaaaatgtattgaacaataaatttcataaaattcataatttgaaaagtaaatgtcatttgctaaccttctttagcagttttaaagcctccgtgaccatagtttcgctgtccattcatgattcctgtttctctctcaacattagaattacttcctccaaaactcttgtgatctccttgaggttctccaattcgaactaaatgagcatcaaaagaaattgttgctccagattctatcttctcatccttttttaagaacttactatctagtgtacttttactttcatccaacagcatgagctgaacagagccaaaatgggggcagcatgagaaatcattcagtcattgaacacttaaatgtaatggaagtgagcaagcacaataaaaccaaatagaccaaagaaagaaacacatattttgtgggggcttagccactttatcaagatacaatatttacaagttagttatgacagctagttttcaactgttatcggcgttatgtttgttaagtagttagaggttaatgtagctcttgatcacagctactcaaagcctacaaaagagagtctcattcatttatgtcatcggatgatattgaagagaagacaacctaaaataaagagactttagacgaggaggagctggttttgctcgagtgtgttgatctcttgtaatagatgaaggttgtaatcggagttagtctccataagatacttgtaccaaagtcatcaataaagtgctcagcctataaggctattcttctcctgctgattagatccaagtctcatagacttgtgattgaaccacttgagttctctttgtccattttataatttatgttcttagcattcttgtgatctttttataattctttgttattgtttctgtgtcttgattggtgttggagacaccacatatattgatctatcatttcttcaaattacaccaaaaaaaaaaattagtatgagaaccaaacctgcctccccatggatccccgaatctcgagctgcacaaaaccatcatgaaacttcttagacttttgagtaagctgtgttgtgtacatggcctcccattctacattatcgagtaactgaattagacgaaaactaccatttaaaactacatcaaacaggacaaagagcacccaaagaacttggtaaaactcataaaattgaaaagaaacagcagaaaatgacaaaactacagttacaaatcttaattttcaagcaacaaaaccaaacaagcccttaaactcctacaaatctcaatttagacaatccattttgtcgttttcctttcacttgaattctcctttcatcataaattagaagatttttgagttaataaaatgctacctgtaatgctagactttgttatatccggagttctttggctctgtatagctacatacttgcgcacttctctcttcttaaaatctgagaaaaagtttcaccattacataaatattcataaactcaattagtatctttcattacactaacctcttataatcttctgcgacggactcaaactcaaactctgtcgctgctgcgatttgcttttctcatctctccgactatttctcccaatcgaattcaaatcagatctaacttcgtgatctccctcagcatcattaacgtcgataagaaaagaattgaatgtgagactttcgccgcagctaacaacctcatcattcttcaaaaccttacattccaagagcttctcgcactcgtcgtacagtgaaagctgcatcaaagaaaaaacaacaaaaatttattcaagttccaaaaaaaaaaaaaaaatacctccatagatgttacagtagttggagttggagaccttattggttgaggtatgttgtactagaaaaccgtcttgataaaccttgcgcttctgcttcatatgccttgtgtaggtgacgctccatctcttcttatcctccattgatgcgaaattgagctgaggaatatggaaacctaatgaaatgggtttttgattgacgaagatttctggagaagaaagatgaaggtttttgcttcttttttgttttatataaatggcgggaacctctaatttattcgtggtaaatatgatatgacgaaattacccatctaatttttttttcccctaaatctaaattttaaataaaatttagtttgggtaattgcaggtgcatttgtgttttcgacatcgaatagttttagcttaatgtatttgtatgatagtttaaagattttatataaatagctaattaattaagattagtattaaattatatttttaaatttttaaagtggttaaaatttttactgaattattaaaattgttgaatttaaatatttttgtccaattttagtaaacaaaaatctaatatagattaaagttggagagatatgatttaatatatgtaaaagtttgatggacataattagtagatattaaagtttgggaaacatgatttagtacataaataattattaaatttgtaaaattgaataaaataaaaaaaaagttattaaatctaataatttagaagaaatttttaatgatcagaaaaatttatagtgtgatttggtacatattaaagtttaggaagcaaaaattttaattagtttatataaatttacgagaaataaaaaaaaaaattaacctgtcta

SEQ ID NO: 15536 - DNA, 9313 bp, Cannabis sativa
taatatgtcattagatggagtcatgttttcgacattttttcatctttctcttctttatattgaagaaaatagcattatacctcacctaaaattgaatcaattcatttttttaattaagaagtaatacctagcataaaaattaaaatttaattagcaaaataggataacattacttttaaaagagaaaatagcagcatataaaaaattttaagtttgtaaagagtataaactcaatatttatttttaatagtataagtactaatatttgtaaaattataatttttttcggtctagaaaaaaatatgtactattagttacttttaaatattttttttttgataaatttaaaacagaatctatattgacgaaattaaaagaaaattaaaattttataaatattaaatatttatgttgctaaaaaataaatattaaatttatcctgttaaaataaatattaagtttatactattttttttttaaaataataaaaaaacaaaaaaaagttgtgttggcagaaatttgatacgtgtgacttgtatataatgtgaaaaaagacctcagttgttccctctataatctatattttctttccgatttttctcttctgagaaacccttttcttctttagagttaaatcgaaatttggcttttaaatctttcatcaggaatcgaggatctcttactccaatctttgaatcagttctttttctgcttatttaaggtaattttgggaacactctgcttttattttgcaattttctgtaatagaactcactaggtgtaaattctatttcaatgtgcatttatttcaatctctatctctttacatacgatcatttaactaaattagtaattgtgatgtgaacttttgattttatttcagattgttcttttttggggaggggggaaattttcttatactgtattggaaacaagttttattgcatagagagcttagattgatgatcatggcaaaaatggtgagattctgtgatttgccaaaggaaataattgagaatatcatgttgtgggtgcctgccaattctctagtacaatataaagttgtgaacaagtttttgtattcccttatttcgggtttgattaacgacccaaaatttgtttccaaccacctcctcattgccaaaaaccaatcctctgcatccttactcttcaaatggccttccaaccatgtcgatcatagcttgatcgcatacaaattgttgactgtaaactatgatgatcgtggtgaggacgatcctcttatgtctgtcacagaacctctcattattcatttgccagaacctattggtgatgaaagctcttggtatagtagttatcactgtgatggggtaatctttttagtaaatgatgttggaacaatggcaatatgtaatcccgttttgaaagaattcatgtttctcccacaaccaaggaacttgatatttgaagggtctcttagctttcctaatggtgttgtgggatttggatttgattctgtaaataaggattacaaatgtgttgccatttggtgccataacaaatgcaaagttgaggtttacacaatgagttccaactcttggagagagattagcatgtctcaagacattgtaaatattataatgtctaatgttttagtctgccctttatattgggaaggagtttgttactggttggggcatgatttagacaattatttttatgactttatcctcagttttaatttgagtaatgagaaattccatctcatacatttgccacgctttgtatattgggacttcacttcttatttcatcgagatttcagtgtggaacgattcagttgtactgctatggagagatgacagagagaatatccttcgtatcttaacaatggatgttggtgaagatgcttcttgttcttggaccaaatatgagtatattggagatggaccactggaaaatatttgtttcggggtaccgattccgaagaatggtgagattctaaaggaagtaaagaaagatgggcataaacagttggtgtcttttaacagtgatacccaaaagataagaaatgttgtttgtgatgtagatagtaccagtcttttaggattgagggattgtttctttgtaaagagtctggtttctgttaggaggaggaggaggtgaggtgatattggagcctcaaagttatggaagaaactaaaaattgtaatggcatgttatgttactactatctttaattatttatataactctcaatatatgcatgtatgcattttctctgttggagtgattaagttgattaattgttctttaaaagaaaaatagttgattaattgtgatttggagtattgactctgtttttacaacatatatgtgactgtttgaactacatcatatgctatatacatgttattgatatatgtacatcatatatgtgagattgtttgttgtagcccttattaatgcttaaatgtgttcatatgttactccattaatttcttatattaaaatgaacttttatacttatgctcgagcctgcaaaagcctaagctgcagagtttgaggcgcttctggagttcatgttgagtttggggaaatggttggaagaggggaaagagaaggtgatgatccgaccttcctctaaagtcagcatcaagtttcttattgccatgaagaagcatggtaactttatttaatgttcacacttgtacttttttttgataaattatatcggtgagtttaagtcgataaccactgagctagaaaaattgttgttgagttgaattgaaggctcaaacaaatgtggggttattagtcctcattgtgatattggcgttaaaggaagttgaaggatggaatgcaaggttgctcccatcaagagaggttacccttacatcaattttttggatgatcataactgagctatattaataccattgaattagatggctttgcctagtttgagtgcatgtgcatcaacaatgttagtctggaaaaaccagaaaatccaattttatttttgtttctgttacttagtaaatccaattaagtgtgttatctgattattacatagtctagctacatgtaccaagataatggttcttactcttgatcttgatttgccaaagtggctgtagctaaattaaacacgccgaggagtttactggccggttgttgtgatagctatcgactgatctgcttaccgaacttctcacaattggtcatttatgatcttttttcttgggacattttatttttgtttctgtgattgagtaaatccaactgtgttatctgactattttagattgttacttattccagctatatgtaccaagagaacggttcttagtgcccttgatcttgatttgccaaagtggctatagctaaattaaacatgctgaggagtttactggccggttgttgtgattgctgttgactgatctgcttaccgaatttctcacaatttgtcagttagtatatatttttttcttaaatttgtaaatgagaaggaagagaagagggaaatgacataggatttagccatttcgcgagagccttctcttacattaaaaataaaaaaagaaaaaggctttaccttccaggcaagttgcattgattcccctgctgcttgcatctgttggtgcccacacttttctttcttcacctgtttcttggcatatttttgttgaaattaatatatatcaattcttcttttggtttatttaggggctctttagtaacccttttaacatgatttgattcagttgaaccttttgtggtcttttactccaatgtccaatgatttgatatagtgtgttgactaatttgatttaattgtgttgatcttatcaacatatcatttgaattttttggatttaatctctgaaatgagttttgaatttaatctctaaaataggttttgggtttcatgagattttggtcttttggatttaatctctgaaatgattctgtttagttcctttccttaccagttctatttatctttgatgttaaaatagttggcttatgttgcaatttgcatttatagtgatgctagaaagtcatcctttgcaaatatgatattcatagctccctgtgtcagctatgtgattctggctcatctcttgcatacaaattaaatatactctcattccatcaactgtaaatggccaagagtcatggtctgttgagcttgtgctagtagaactggtagtgattcaagtgaagaattttagggtggaacataagcattgcttttcctgatttttccccataacagcttaaaggggtttgtttctacaacaaacatgtaattagttagtactaaatgtgtgatgctctagagctctttggtataatgcaagaaatctatcacgttgactctaattttgtgaccttccttggtgctctttcagcttgttctcccatgctgggctgatagataagggtctcgagatctttataagcgccgagtcagaacacttcctaaaactgaagatggagttgatcttttgggacgagcaaggcgtttgaatcaagttcgggagtttgtaaaggcaatgccttagaaactcaactcagatgtgtgggctgctcttctgagctcatctaagattacatggttatgtagagatggtctgtatagctgccggtgaacgttttaaactcaattctaatgatcggttgtgctgtcatgcgatgatgtaagtgatataagggataaaaagaatgaaggtaagtgtcgtatctaaagatactgtgtttcttagatttatgcaaagaaagtgttttcatacaaatcttcttcatttttgaattgctttgtctctgttgcataagaatgtgagggccttaatcttctattttaatagcacaatcatttaatataggctctaacaccaatgtgtgccttcaaactcattattcgaactcagcaaaagatcaaacttagttttttcaggcatcaaagatgggccaaactttttgtttcttattaaattggtgagtatgtatatgcatgtaaacattttgacttgttttcaatttttattaaattggtaatactatagagtagaggccatgacattaaaatgtaacgtaggtgtgattttgtattgtatgaagtgacatggtatatataatcattaaaatgagggtattatcatggtttaaaaagtcaaagtagacaaatgaaaacttacaaaagaacatgatagatactttaaacctaattttttgattttctttttaggtagaaaagatctatctttcaaaggagtgttactgtatggctcagaaattctacaacaagtaatgtttgaacaaatgttaattgtagcataaataatttcactcatgatgaataaacaagatctccacaacaagtgataacatggatatcctcttattggtaagaagtcaaggaacagaagagctgcacctctaatagccacattgaatctgaggtccgagatatgtagagaggaatcaagctcataaaagaactccaagagggatacaatttgcaaaaatagggggtgaagtggaattgatagttcccaactttatgtagatgtaacgatttccacaactcaaaccatggttggatttggagcagttattttctccttaaataagcatgttaaacatccctgtctaaaccactacaaggttcttatacttcttaattatagagtttttcacccaactctcaaatttaataaaatgtagagtctaaccaaaagaaacccttttggtaactgatttattacaaataatttatactgaatttaaacaagattgatgtaatggaggtgatttatgttgcagggtttatatattgtcaatctttcacggagaagttgtagttcttttgttagaattaaggtgggtctaagattttagattacctatcagggatcgtctcagatttactgtctttggttttggcattcgagtcttccacattttaccagtatatataagttgagggttatcttatttgatgttaaagttttgttgtcttcttttttgggagcatggatcggtaaacatgcccttagaatagacagtgaactttcgtggacaaatataacctttccacctttttgcctaacacttttgaattatcttatttgtaaactttaaaagagtgaattaaagttatactctaaaatctttaatgatcaacaaatgatatagaaaattcttagacaacttcagatttagattcggaatcctctcatactccaattgactgcgtgcacaatcttcttcatgatgctggcaaaaaccgaaattctagaaattcttagcttttgtaagagttatttccttaataaaaaaatcacttgagtaaaatgaaagaagaacataagaaattcatttgcgtttaaacgattgtcattggaggactaagtaaaatgacatcaatgcccctatcaaaataactctaaaacttttgattatttggacaatactcttttttgcttgttaagtgtgaattgaaaaacacgtggcgatatattattggaccacgtattaaagaaactataaagaaaagatagaactgtaacaaaatcgtataataatatatttttgcgaccactttttagattaaaatcatatgtgtaataattaaaacaaatatcccaatatatataaatatgtattgatataaaataagagatgcatgtattaataagaatataaattatattgaaaggtaggagatgggaattaagctatgcatgcatatataattaatttagacgcaaaaagcatacaagagtgatattgattcggctcgtctctccttgtattgattcatatatgtatatatatagagagacatttgaagcaatcatatatgaggtatgagccgaaccaatatcacgccatgtctacttctgcagaactataatatatatttattatttatatatatatataggttttgttttgttttgttttgttttgatgaagaggtagtggagtttggttcatgtatatataggaaggaataaaaaagatgatattatattggtactctaaattctaaaacatgtgactatatactaagtataaggataagaaaggaaccattatcatgatcactctattatattatatatatatatatatattgtaaagaatatccttcttcaaaattaacaaaacttaattaataaagtaattaaccaaacgaactccactagccaccctctttttcattttaggaaaaatgaacccaaaaattataaaaagggaatatcaactatgcagagtcaatttttcttttttttatcttttttgaaattatattataaataacaatataaaaaaaataaattaatgttgcatcaattaatgatccttcaacgcacgtgaaataataagagaaatttgtttttcatgtaaaaattaattaggtataaattagtattggatgaaattagtaatttatgttcactttttcataaacttcaaattattcttcatatttcaaaattatttctccaaaactctctctgtttctctctctttcctctcgctcactcttccccttactctggttctcaccaaacaccatcactaaaaataccgtcaatcttcggtgaccaccattcacgaccctccctctctctctcttgttctctatgctgcgtgaccgagacccacgacctttcctctctctggttctagttggtgcatggttgatgacccacgacccatgaccaccaccgtcaaacggacggacaaatcgagtttgctttgtattttttgtttattgtttggtaaaaatcgagttttactgaaatttacattttttgtgattttttttgtatatggtacgatggggtacgatagagatttgatagtgggtacaatagtagtgtaatctggaagttaggaatgaaggtccgatggtggtctgatgcaggcccaatgcctttctattgttgaaatgagcaaaggttgaagatgtaggtacaatggtggcccgatgttacccataaatgtaggatatggtctgatggtggtccgatgcaggtctgatgtctttctattgttgaaattagtaaaggttgtagacataagtctgatatggtggtccgacggtacccatttttatgtacaataacataaaaaagaaaaaaaaaaaaaaaaaagggtggcattgagccactattggacctacatcgggcctacatcaaacctacgtcttcaacctttactcattttaacaacagaaaggcatcgagcatgcattgaacctgcatcgaacctgcatcgaacttgacataaaaccggttttctacccaaaacagagatccaaccaaacccaaccctaaatctaacataagctcacagatcacatagattcatcatacattttaatcctaaatcaataaactcatacaagtctctccgttcgtgacagtggtctctccgttcgcggttgaggagggagattggcgtgggataggacggattgaaatagagtcgagagggtcagtccgattgattttttagtgggttgagtggtgttggatggtggcagtagtcttggatggcgacggtagtcttggatggtggcgatggtcgtggcagttcggttctcttaaagagggcgagagagaatggatggagagagtgagttgaaatatgggaggggtaattttgggtttaatgcaaaattaatctaatctaacaatattgatacactaacaattaggggataaattttggcctaataaatgcatatgaatttaaatttcccaataataatcctaatattatgtatggaatgccacatcatcatcaccacatattgatgatgcatgcgtatgtttaatatgtatgttttatgttaaaaaaattaatttgataaattttgtatcaatttttaatattatgttctaatgcacacaattgaaaaatttaaagtaaaatttaactaatgtttttactcacaatttatcaaaataataattttgttaaacaatgtgtctttattttttattaaacgatctgttgctaattgctttgttagagcatcatttttttttatctaaatttaatagaaatgatgtttttattgagttaaagtgttgtttgttgactaatttagaaaattaataaaaaaaattaatttgcattaaaaaataataattttatattgcaagtaataataaaaaaatagtacataatttcatattatagttaaatatactaataaaattataaaagtaaataaaagtaatgtatttatggcaatacatattttaccttataaatatgggaaaaaaacaaaaaaatacaaaaaagga

SEQ ID NO: 15537 - DNA, 6325 bp, Cannabis sativa
aaaataacactttcaccatatcaattattgtaatatataacattaatattattatgacacatttcttttttaattttgaaaatatttttgtatttaattattgagaataaatagtgtgatgagcctggacctgaggaagggaccaaaccagaccagacccaacttgggtgggattgggaacattaaagccaaattaagatcatgttttctggggtttcagatccccaggtggtccatcaattattatttttattattattatacagttcaaaatcaaactccatttttctagaacaaaataatctagctgtcacaatattatataatattacaatttttgggattgacccaaaatgacacaacactgtgttgtgaagatagtcatagtcatagtagagtataacaagttaacttaacccttttcataacttggtcaaacaaaaactacaaaaattatgttatgttatgcttttataatgcatccagttaaaaaagtattaaaaaatttaacatgtcaaaaaaataaatttttactgcattaaattttagggaattatctatatattatttttttaatttttttttttttaatttacggtttaagtttttaaagtagttgcagcgctagttgcaataggagaaactgtatgattttttattgcaatttaagttgcagcgctaattgcaatttaagttgcagcgctaattgcaatatgagtttctatatagaatttcgtaaaaatataaaaaaaaccctattttaaagtgtaaaaataaaaaaatcccttaaatttttatgaaccacttaattttataaaatgttttgaatatacattgttggaccctatttgtagaatttttgttatgttttgaattgaaagcaaaagaacacaagtcaaaagtttttgtttttgattttggggtttatgtacaatttttgagaggtccataataataaattcttctgataaagatagtgacaaatttatgttgtggaggaaaagctgtaaaggggtatgactttttattttgttctttgtttttattgtttagtttgactgtatttttgttatgcttggcctttaaaggcaaaaagctttaattaaaagacacttggaaagagaagaaatgaaaagaaaagcaaagcaaagcaaagcagaaaggcaaggatctgggttagttgacatttgggtatattgcaccaatactctttaatctaaactgaataaagtcaacaagtaaatgccaaagggcttttctaactttttcactcatattttcttacctcccaaatgtaaaaacacaagattattaaattcttttttgtcccaaccccaattaaaaataaataaaagaaaatcagccaaaatggagtaattaatttacatatatataagtatttaagggaccttctaattgaggttatatatatatatattcataattttgtttatgatagttcataatcgagttttgggttcgggtacggatcagggtttgagtcttaggtttggatccaagtctcgagttctgggtcgggttcgggtccaggtactggatcgaattccgagtttgagtgggttttaggtttggttcggtccagttcgtgtcgtgtccatccgaattcgagtctctagatccgagccagctaatacagagcatttgttatatattatataacttatattgtattaaaaattttagtcgtaataatttatacaatatattgcttgatctaaatgtaatgttatttattatataatacaactctacatttatacaatgtactaaacgagccaatattatatttgattttttttattcttctccatgcacataaaaaaatagttgtttacactttgatttggactaaaaatttaaaaaaatatataaatgctatgattatactaaacaatatcataaaaagaaaatattaaagtatctcgaagacattcccaatcagatgatgggaacaaagagaatttatgtatattaaggaagacaatagaaagaacaaaaagaacccaaataagaagacctaacctaacactcaactagtcaaaataattactaccctttcaatttcaaccaccaaaaaaataaataaagaccaaagttaataaggtgtggccaacaataacaaacaaaaacagtaattagacccttctagagattctttcaattacaaatttaaaaagaatacaaatattaatttgttgttttcctttttctttttcaaaaattgagctcaaactcattaatgtgtctttttaccttacttttctcaaaatttgcaaaataaaaagcttgttttcttactctaatcccaaaaaaacacactcagctagctttcaatttaggagaagaaaaatcatgcaaaatttcaaatttagatatgatagttaacattgtaattatttaaaatattttataaatttttcaaaaatttaaataatttaaacatgctacgaaaacataattcaataatcttttataattcttatatcatttttatgtgatacatatgtaaaatatataatttgaatattattatttatattgtaaattattgaatattcaataatttaccgcataaataattatggctaaatctcaattatataaataaatacttaatttaacagtaataatatttaaattatttaaatcacatttttaaaactttcgtaaatatttaactattaaatattaaaacaatggccacataacactctttttgattcaagtcaataaatttttatttataagaaaataacaagtaaataataatttcacttaacatcaagtatcaacataaactctaaaaatataattttagtacttatttgcaacccttaaatatttaagccgtaaattattttaattctcaaagatatcttaaataattaagatatctcgaaacacgaaaaaggtgcataagtgtatttttcataaaggagtgaaaagcacccataaatagtggtatgtagttcaaaaatcccaagagcaaatataaaaattaaatagaacatagtaagtactaataatccatttcaaacatgtacataaaagccatgatagaaaatcaagtagattgagtcatcatcatgaatagaaaatggagttcaatatcctattctctccttacaaaataataaatagctaaaaatagacatccaaaaacacttgttcagtcttagtaagtaatcattaaacaaagatcagtacatgaatggaaatcaagcaaatatgctcaaaggacctgtcttgtttgatgacccgagtccattttccgcatttcgcattcctgtaatccatgtcctgcgacgaaaaacacgaacccgaaatcagtttttactcaagtgacaaaaggaatgcatcaaatattttgttcatttaggccttaccttcccacatttttgttgctcgaatcttctgctgctataatcgtcagccttttcgctgtcttcataaaatcactgcaagaaaacacaaaatcgttacactttacgaaaaaaatgaagccccccccgaatgcaaacaaggtatcatttcgtagttttgctctcacctaaaaggttcttctccagtttgtttaagagtaccggtagcatcatggtaaaaaactcgggtgagcatctcagatctttcaatttcgaacatgttagccagctttctgtacagctcctcgtaggaaccgagagcagaaaggtctagagtccgtccaacatcttcagactccataaacaccttacaatgaccggtatccataccaaattcggtagcttggtgaccttgatgccatgaaaacccgacattgttagatgatttttctgatgaactattggagagaaactttgctttgtctgaatgggaatcggctgaaatttgctgttcggtgagtattcgttgaccaaagagaacaaactgatgtctctttacactatcagatttctcagcatttggactagaatttcccattgtgagcaagcaagataagctttcgttgttgttgttgttggtggtgggagtggtgtcagagcggactcttttgagtccagcgctcgaaattccagagtgttgattcaactgctggtggaaactggaagacaacagcccgggttggggttgcagcttgttgttattgctgttaagttggagatccgataaagatagtccaaatagagcatgcctggctccctgtatgcctgcaggtgtgttatcgggaagaaaacacatggggctgctgggccctaaggggttacctaaaaatgaagacactgggaaatgtccatcaaaagtaaagtcggggtgttgcgttgtagggaatcgcaacttctttctcggtggtgaaaaggatgacatgtggatgattggcatgttagctaccgattcaatcaaccatggactaacacatttcacattctgaagcaaatctggttcatcccatgtcacctgcaatgcaattactaattcaaaacacatacaaaaccgaaacggggcaaaatttcatttgcaaattttacaattccatgttcttagtttagcaaatttccactcaaatggtaccaataatctcaatcactccaacatgtttaagctaatcctatgcctaataacatgtcatacaaaacataaatttgactgaaatcttagtgttaaggacataaaaaatagtacctgaagaagccgccaaggggaattaggccagcggatagggtcagcaactttaacagaagctatagttcccataaaccagctaattcgagacgaatcctcggtttcaaacgccatcttaaacctcattcctgagctccattgaatcctcatagcggctttaaccgaagaggccttaacacagaactcaggagtgctaacacgagggtaataaataatctcgaatggctcgccattggcagcacgagcagcagcttcaacaacagcttcaggccttactcttctagtccctctgaaattcccaccagcagtaggaccagaattgccaccacaacccgagtttcgccccattttgttctcatcttccctcatgaaaaccgaaaaaccaccagcataagatgaaccattgttccatccagaagtggtgtctgatccattaccaccaccaatgcctctcttagctctcctaatcccaacacaaatgtcaccagttttagtcctgagaaacacaatcgaatcgccagcaactaacttcttctggttcacaaaattactccaacctgttgttaacaaatgtctacgaggagtacctctaaagatatgcctaaatttccacatctcaccatgaacatccttagctataacagtctgaacaggtggatcagcagtgtaatctaaaccaggaaaaattgtctcagcacaatacctaggaacagaaaacccaccaccattattggcatcagattgagttaatgtcttagcaaaagaagtgggcttttcatgatgattttcagaaccattatcatcagaacccgaagcaacaacaactacttcatcatcttcttcttctctaaaatcgttaattcctaaaggcactaatctcatcttagcaaaaacctcatcactttctgggtctgccatgaatttcagagctgaaactctgcagagaacgaatggagggattctgatcgaaacagcggagaaatcgacatgggtctgggagtgttcggcgtggccttgtggaaagtagaagactttagagttcactggtggtatattgaccattccaccggcacaggcctgccatagctgaggatccaagcttttctcaaggtctttcatttggggcttttttactattattactatcaataataatggcggaaataacggcgttactgaggatgttttcaagctgtaataataaataggaacaagagaagtaaggtttccattattgatcaaaatcaaaggttttgattgatactcaaaactcaactcaatttaatgctcaacaaaacataaacaagaaaaagatcaaaactttaatcaccacagacaattaaaagcattaattcttaaatttctcacacaattttttcttaaaaaaaatgaagaaaacaaataaaataaaagttgcttacttttcagagtccgaaaagaaaaatctttcctgtacattaaaaaataaaaagaagaaaaaccctttctttgtcttcctgattcagacccagattcaaaaacttgaaacccaaaaaccagattcgaagaaaaaccccagaaatgaagagaatcccaataacaaaaaaaaaaaaaccaagtaggaaaaatcaaactgatgaactgaaccgtacccgaaaaagatgat

SEQ ID NO: 15538 - DNA, 5888 bp, Cannabis sativa
gaaatcttctcacctgttgtaaaacaagcctcaattagagcaatcatggccaaagaagcttctgaggatctagaaattgagcaaatggaagttaaaactaccttccttcatgggaaactagatgagaccatttgcatgaagatgccagaagattttgatgaagataaagacaatgtctgtttgttgcaaaatctctgtatggtttgaaacaaacaaaaagacagtggaatctcagatttgatgatttcgtgacgaaaagtggcttcaccaaaagtgcatatgatccatgtgtatacttcaatagcacactctttcttcttctctatgttgataacatactgctaatagggaaaagtaagagtgaaattggagaaataaagtcactgctcaattcagaatttgagatggaagacctaagtgaagctaagaaaatcctatgcattgaaattagaagaaacagacctaaatcactgactttggcacaaggaaactaccttagaaagagactacagaaatttaaaatggacaactcaaaacctgtgtcaactcctttagcagctcacttcagactgtccaaagatcaagcccccaagacagaaaaggaaagagaattcatggattatgtgccctatgccaatggggttgaaagtttgatgtatgctatggtctgtacaaggccagacatagcatatgcaatgagcattgttagtaggttcattgcaaaacctggagagaagcactgggatgcccttaagtggataatgaggtgcatcgaaggcactcttgatctaggcctaacctacaacaaaagctacaagacataggttgatatctcgggctatgtagactcagactatacaggatgcatagacacaagaagatccatcccaggatatgtgttcacaatgcaaggaggatgtgtaggttggaaggtaaatctacaaaaggtggtatctctatcctcaatataagctaagtatatggttgttactgaggcaattaaagaagttgtatggctaatgcttcattagagatccaagcatatagatatcaagatgcacttcattagagatgtaatctcaagcaatcaagtctataaaattcacaccaaccacaatcctacagatttgttcaacaaggcagtaacacaagtcaaattcaaacactgccttgatctaattcatctaactcctcctatcagaccacttactctttttcaactctctgttgattctcagattggcatgaaacagatcaaggaggatttgttgtggtgtgatccatctcatgctaattattgtacacagttagaagttagttaacattagttgacagttatttctgttaactgtcatgttagttacaagtttgtatttttctgtcttaattcaaattatataaatagttagttcctcattcattcattggagtagccttgtatagactttgttctctctctgtaatactctccattaaactcaataaatcttattcttttaatctttcttgttgtgtgttttgctgctgcgactctcttgtgcatagctcatattgagcttctaatcttgattgttattgtggtcgatgggatatgatatttcgtataaaaaaatcgaattataatttcttcaaatagatgtccctaatcaatccaatccaataccactacacaaaattgatagcattatatatggttgctttctataaatatatccaaactcaattaactaaatcatattataagatatcattaggcaaaatttctcacaaagcaaacgaagtagaattcttcttgattatttgagatatgtatatgctaccaaaagaaaatatcaaaacgaagagaacacataaaaaattaactactgtaaaattaaagaggtatagatacaacatattactccacaatactaaatctttcttccataaattttgatgagccaatttggtttatttgatatgatgaaatgtccaccaatcattccaacaacaaagctgcatacataaccaaccatgacagatttccaagtaaaaccaaactcatcagattcctcctcttggtgagtagtggggttgtcatcagtggtttgtccacattttttggacaaaggaaggccacataaatctacattcccttcaaaagaagaattttcaaatgtagtaatttggccaccttgtgggattggccctgtgagtttgttttttgaaaggtcaagatatgcaaggaatgtgagactctccaactcttgaggaatggtaccaaaaagcttgttgttagagagatccaatgattcaagttgtttaagatttcccaaggaagacatgacagggccttcaaagttgttacttgaaagattgagcacaatcaatgatggaagatatcctacacttcttggaatgtcaccatgaaaatggttgtttgagagatcaatagatgtgaagattgtcaagatcttcaccagttccatttctgaacctttattcatcactgtcactgagttctgataatagtcctctttatgctccatgtacactgtctttgatttgtttgtgctaggaatttctgtattaatggctctccagttcttgaagtagtctgatggtaaatttccattgaaattgttgaaggaaaggtcgacaattcgcaacatgtcaaaccctacaatcttgttgggacgccatatttggccagaaaagttgttggaacgcagtacaagaacttgcaactttggaagattttggagccaaaatggaaatttgtcacttaaatggttgtgtccaagattaataacctctaatgctttacatttgatcagtgatgttggaactttgtcttggaattggttgtggctgaggtccaatgtcatcaacttatttccatccataaatttgtgaggtattttcccattgaaattgttccctttcaaactcaacatggagagctctctgctcaagcttcccaagcatggtggaacggccccgcttaggcgattattggacacatcaaagacaacaagctcagtcaagtaacaaaacctatgatgaattcttccacttatattgttttctgacatgaagaagtattgtgtggacattggtggtaccacaagagaaccttgcatcttgttgaaacttaaatcaagaattctcaagagtttccatggaagaataaattggggtgtttcccaaccagtgagggagttgtgagaaagattcaaacgataaaaattctcaactcccatgttgatgaaccagttaggaatttcaccttcaattttgttgttggacatatctaaatactgcaattcctcttggcttttcaagaaatttggaaacgtactacttatgctacatgaagccaaacctaaagaaaataatttgggaagagtggaatttgaatctaagtatgttacagaaaaacggttattcgaaataaaaagatagcgaagattacttagctttgagaacatgcctaactcaactctaccactgaagttgtttgaatgaagtgaaagagaattcaagttctccaatttgaacaatgacttaggaattagtccacttaacctgttttgacttaaagaaagagaagtcaagttgaatgaagtgacattgtgaatagttaaaggacctgtgaattggttctcatctagttgcacctcactcaaagaagaaatagtaaacaaagatgaaggaatggatccactcaaagcattatgtgacatacctaaggactcaagcttggttaagtttgtaagtcctggtggcaactcaccagtcaaaccattatagtgaagagacagagtagttaattgagtgagatttactagtgatggtggaattttaccatttatttcatttccaacaatatttaagaagaccaattttttgaggtttcctagtgttgagggtagctcacctgtacaaccagcatgatctagataaatgtacatgagatttacaagattacccattgtacttggaaccttaccactaaaactattgtatgagaagtccatatagaacagtttggaaagatttccaatggaaggtggaataggccttgtaaaatagcaaaaagagacactaaaatatgtcaaagacttgagattgccaatggaatcgggtatctgtcccgaaaattttgtggaaaagagatccaatgtgtctagattgctgctagaattaaatgttgggagaaaaccattgaggttatagttgttttgcaaaacaatgacttgtatattaggcaaaagaaaaatattggttgggaagtcaccttgcaaagcagagtttataagagatagagatgttaatgaggacaaatttgacaaagattgaggatttatagaagaaagattcacttgaacttgcaattgtgaaaagtttttatgaaaatttgcagactcaataaacaaagaactacttccagtagttccaccatcataatcaaagttagcagagagatcaagagaaaccaaattgttgagccaagtaatttcattaggaacttgccctgaaaaatgggagtaagagagattgagatgggttaaccttgaaagttgggaaaatcttgaaggaatcttggaaaaattaaagttgttgtaggcaaggttgagactttgaaggtggtgcaaattgaagaggctgctatttgacctgaaatggccattaagccaactgttgctcaaatcaagccttacaacttgaccagttttcatgttgcatttaacaccaacccaattgcaacactcatttcccttccaaaatttcatctttggatatgatgaaagagtctcatcatccaaaggttgtgtcaacacaaactcatcccttaatttcagcaaagtatatctctcctcatggagacatgttatttttgaagaagctaaggatgaattcagagcttgtgtgacacacatgattaagatgagccataacatgaaggaatagcttctaaaagtcattgcccttctcatgttttttcttcttttttttcaaaggagaagaaatgtgtgaatatttgatctgatattttgattaatgggagaagaattttagactatttataggtgagcttttgacgtgtgacgctggataagactcgtgactatggtttttccaaaaagaaaatctatgacttattgatgaattaaacgaggctttttgcttagagaaaggctaaagggtaccaatggtgcctagcatccttctatgtgtcagtatcgctattggtccaactaaatatcgggtctcacatagtttaatataatagcttttaggaagtattgctagtcaatcgcaacgtgacatatcgagaaagtactaggcaccactagtgcctaatagctatgctcttttgtttattatacataactgctacatatttaagtgagacactttctaatggcaattattttgttgattcaacaacattaattaatttgactctaaatcaagctcaataatttaagggagggtttacttgaatagtggttagtgggtgtgggtctaatcttttgtgcagtgttttgtgtgtgttggtcactcaataatttaaggggtataatagaatagtaatagtaattgattgtaataggaataataataagaatcatattatgatatattatgatgtttggttcattttttgaatggtgatgagaatgagtggtgtattgagaaaaatatattactaaatttttttttttttttgcttgaatatattaattttttttaataatgagaggatataaattaaagatacaaggcaaattatgttttatataaatgatgtaatggtgattatatagttgtagacttataatcattttttatataaatagtgtaatcatatgaataatgtatgatgattatatagtaaaggc

SEQ ID NO: 15539 - DNA, 2304 bp, Cannabis sativa
  modified_base (1877)..(1887): a, c, t, g, unknown or other
  modified_base (1915)..(1915): a, c, t, g, unknown or other
taatttgaagccctttttgtttgttttataatatgcaggtaaaccttttgttgatgtgttgaaggagggtggagtcctgccaggaattaaggttgacaagggtacagttgagcttgctggaacaaacggtgaaaccaccactcagggtcttgacggccttgctcaaagatgccagaagtactatgaagccggtgctcgatttgctaagtggcgtgctgtgcttaagattggtcccaacgagccttctcagttgtctatcaacgaaaatgcctacgggttagctcgctatgctgccatttgccaggagaatggtcttgtcccaattgttgagcctgagatcctggttgatggaacccattcaattgagcagtgcgccgatgtcaccgaacgtgttcttgctgcatgctacaaggcactcaatgaccaccatgtccttctcgagggaactcttttgaaacccaacatggttacccctggatcagaagccaaaaaggttgcaccagaggtgattgcggaatacacagttcgtgccctgcagcgcaccgtgcctccagctgttcctgctattgtgttcttgtctggtggacagagtgaggaggaagcaaccgtcaatctcaacgccatgaacaagctcaagacaaagaagccatggtcactatccttctccttcggaagggcactccagcagagcacactcaaggcatggtccggcaaagaagaaaacatcccaaaagctcaggctgctttcctcaccagggccaaggccaactcacaggcaactcttggaacttacaagggtgacgccactctaggtgagggtgctgccgagagccttcatgtcaagggctacacatactaagcaagtcatgggctttttagctcattattgtgttttgttttggtgactgcattttggtatgggtttaagactggtgtgttattattattatctcaggcataggtttaagtctctttaaaaaacacatattttctgatctcgagtttgtgtagaggaatgttggtattggtatcaataagcttgagtacagttgcggtgagtatgccggcggtatttttattttggctatgaggagctgcaaatgttttatttttcttcttcaaaaactgctcattttcaattaacaaagtaattttcgtataatgaatttgactgtatctactttgctcaatgaatcccttgctttttaaattttgtggtaagtgcattattatttacttggtctccaatttcattgactccaaactccatcattcctcatttcccatacaagatcataaaactgccaatctaaacatgatattacaaaccccacctacctacctacctacccctgcccaaaatgatgggactgtcactcgctgactatttcctttcctcattccacagcacacaaagattgatcagaaatcttacagtaacacccaacaaagggaagggaagcaattggttgaatgaaatcctttaaagaaagaatttatggtggaggtgaatgttagatttccataatgcatcctcatataatcataagcacctaaaaccttctaattgagtaatgagatgttaatccaaaatatgcattgaaacattatattcagtgaaaattaatcgctgtcttgagtttgaataggcatattaattagtccttcaaaatgggacatcaaagtcttaaggctaagttgtaggcttaggcagatcttaggggcaggcccaactctagattttggtaaagggatgatttagataagccactattttttataaaaaaatttacatttttacgtttaaaagtttttgtttttacacttttacggtttttcatagaaacacgaaaacaaaaaaaaaaaattacataaannnnnnnnnnnaataacatctaaataacaacaaaaaatnacatacatataacaaaaaatcaacaataaattaacaaaagtacaacattaaaaaaccgtattttctgtaaataaaattaaaaaaaatcataaaatataaaattccatgaaattgtatttttgtaattattttgttgattttgtgtatttgtgaaataatccctttggtaaaaccaagttgaagtttggttctagaaagaaccccacatttagaaaatatcttttttcttcctggagacaaaaggctcctaaattattttaaaaataccattttatacatacattttacaaaaacatatgtatatttagtattgggccccaatgcttcaagaccaatccagtataagatccaaaatactctaccaaatttttaaagggataagttgaaaa

SEQ ID NO: 15540 - DNA, 5689 bp, Cannabis sativa
  modified_base (3523)..(3528): a, c, t, g, unknown or other
aaaaaattgacccaaaataagttatttaaaatagactgaaaataaataatgataatgttagtggggtggtagactagagtatacaactatatcataaaatgaatttttacctaataatactatgttcttattggcactaaaccaaaataactttgtttaattttgatgtcaaaactaaagcaagtaaataaagaaataagatgatcatatcatagtggattatttaaaagggacaaatataatgaaaatgaatattgtgggagcctatgtaagccccatttcaacaatcatttaatattatcaaaaggtattttttttaactttcgcaactagtgtttgtaattgattctcagggttcataattttatcccaaacactacctaagaagaagaagaagaggtaccagtacaagtactagcacaatggaagaaagaaagaagtcaattaaaatctttctgcccctcagggaccaaaaatagaacaaaatgagagattactacatctttttcaaacccatcatcactttcactttcacttagaagatcttgaaaagaagaccaccatgggtggcaaagaagggagcgaaaacaagcgactcgactgccataagcttgatgaggatgttaagtgatgggccagaggtatccttgagtgggtcaccaatggtgtcaccaataacagctgccttgtgtgggtctgatcccttggggccaagacttcttgcgtgttctgaagcaccggcctgaaaatttagaaacaaaaatgttatcaactaaatgcgcttaaggagataaaaaagtaatctttacatgtaaactgaaacaatattcacctcaatgtacttcttagcattgtcccatgcaccaccagtgtttgaagcagatattgcgatctgataagacaagcaaaacgtaacaaaaagataagtacatctatgtttgtatgaatcatgtctaaagatgacatttttatttatgttacctggacaccagacacaagggaaccagctaggacaccggagagggtctcaacaccgaagagtgttccgacgatgagaggtgtaagcatgacaaggcaaccaggtggaatcatctccttgatggaggcatcggtagagatcttgacacatgtagcgtaatctggcttagcggtaccctccatgagaccggggatggtgttgaactgtctgcggacctcctcaaccatcttaagagctgcactacccacactcttcattgtcatagctgagaaccagtaaggaagcatagcacccacaagcagaccaataaagacctttggtgtcaagacatcaacagtcgaaacacctgcacgactcacgaatgcaccgaacaaggctagagacacaagagcagcagatccaatggcaaacccctaaaagagagacaagcagacaaaaagttcatgagcatttgccaaatcgacatacgatgaagaaagcagttaaaacttaaaaaggtgcacaagcatatcataaaggtaatgaatataataatatttatttgaaagaggaaccacctttccgattgcagcactggtgtttccagcagcatcgagagcatctgttcgttcacggatacggtggctcataccagccatttcagcaatacctccagcattgtcactgatgggaccataagcatcaatagctaaaccagtagcaatggtgctaagcatcccaagggcagccacagcaataccatacatagcagcaaagctaaaactaacaaaaatgctgactgcaatggcgaaaattggaatgatgacagatttgtaacccaaagcaagtccgaaaataacattggtagcggcaccagtcctgcaggaatcagccacatcttgcactgggctgcaaacagaagaatgtgtcaccacaagtggtcgaaaagactaaatgaaattcatttgaactcttaagaataagtacctgtatgcattgctagtatagtactcggtcacgaatccaatgataagtccagcccacaaaccaacacccacacacaaaaataattgcctgcaaaaccagaataatgtcaacaagtgaaagaaacactacactgtctacaaattgaaagaagccaaatcattaccagttctttactactttctgggttccaaaattgaaaattgtgaaggatgtcggaagggcaatccagctaacaattgcaattgcaacagtcataagtacagtggagatgataagctgcttcttcaaagctggttcaatttcattgacagccttgatctcaaagaaatcagtcgcaaagagggttgtgatcaagcaaacaagaattcctgtagaactgattaggagagggtaagacattgctgtgaaatcgtgggtgataccgaaagatgagatggaagcaacaacaagagcagcacaagatgcttcagcatatgaaccgaaaagatcagaccccattccagcaatatctccaacattatcaccaacattgtcagcaattacctgaagagaaaaacaaaccaaaaagtataaggaaaaggaaccaggagaaattaattgaacattgaactcgaaagaaatatgatattgcttacagctgggtttcttgggtcatcctcaggaatgttcctctcaaccttccccactaaatcagcaccaacatcagcagccttggtgtagataccaccaccaactctaccaaacaaagccatggaagaaccaccaagaccataaccagtaatagcctcaaaaagaccttcccaatcatcaccatagtacaatctaaacagattgattgtaatgtaaagcaccaaaagaccattggcagcaagaagaaaacccatcactgcaccagacctaaatgcaacaataaaggcttttccaactccctttcttgcttccaatgttgtccttgcattggcataagttgcaatcttcatcccaaggaaaccagagaggactgaggtaacagcaccgagcacgaaagacacagtactgaagagtgcagtggcaagtgctggcttgcaagtcttttccttatcataagtgcaagccttactcttagtgctgaagccctcaacagaaccaagaaagacgaagattaagattgcaaaagcaaccatgaaaaccccaacatactgatacatggtaaatagaaatgaagtggaacctgttacattcaatcagagcaaagttcatgagtaaacaattggaaaaagaagtgacaatgccataatatcactaccactatatgaacaatcatacaatgtccaagacagtaaattaggaaataggtaatgcaaagaagtaggcactgcaaaacaagttgtttatacagctgggagaatatacagctgggagatttcaacttcctctccatttcaatagtacttaaaagacaagttgtttatcatcatgaaaaaagaaaaactatgcttgagaatagccaaatttaaaaatgtcaaccacatgtaaaagctaaagttattactcaatactacatacagaagtagatttttatttttatttatttttttnnnnnnaaaaaaaaaaaaaaacatagtttttctttatcaaacttttagaagttaatgaaaaagaattattaacaacacattgtgtttctgtttattgaaaattccacagaattattacaccatattcctacaaaagtgcaaattcagagcagcaagaaaaagaaataaagatataatttaatcagcagatcactgaaaaagctacttccaaaacaaatgaaacactaccccaaaaaaaatatataaaaatatcatagcaatactctcaaatcaatagtacacatgccagctgccacccatataagatgacatctcgcacgtgtactgaacactcaccaatactcacagacagtagccatattctaaattatatcataaattgaacaccagaaagtgaaaataccaatttgcataagacgaaaacattaactgcgttaataataccaacaacaacatcacgataaagattaaatttttaattcgctgagactgaaaagcgctcccttttttgttcttgacaaaggctagatccacataaagtaaacagaagaaactctataataataaaataaacatataaacaaatcagaaccctgtcttctgctcagattaaaccctagaacctttgtaataaaaactattctcctatgctattggaccgacaaatgcctccaagagtaaaggtgcagagagaaaaggctaccgctactgggactttcaccccctaaaaccagcttaagaggttagatttaggtttcaaaactttcgcactggcaaatcaactgaacataaaaagggaaaactaaagattcaaactttcgttttgttttcccttaaaccaaacaaatcatatgtctccaatatttttggagaaacaaatatcaaaaaaaatgaaaaggtaaaaagaaaaaacaaaactttcagatctaaaaaaaattgaagcttacgatctaaaactcaaatctctaccttcagaaatggcattctgtatttcggcacacttaaggacgacgttgtggtcgttgagaccttcttcctcttcaatgaggtaatcattgtagccattcttgttactgttaggacccgatgacgacgggttgcgctccggcgtaaccttcacgcgagaaacgaggaaccactgcgcgagcgagaatacgatcccaatgacagcgcaaatcgggatcacgatctccgtcccaagttcagaaagaaccgtactccccatcctcgccggaaccctagctcgaccggtaatccgtcgccgggaaatacagagagagcttcaaacgcttatagaagagagaaaagagtgtgaagtgagtagaaaatctgcaaggcctatcgctcgatttatattctaaaactcttattataattatttcatttatttattttatttttatttagatacatcacgtgagccgttgatttaatccgcatcgagattcgaaaacttgaacggttgagattaaaggaatgggtattaaaacgtggggcccgtgactattttgttcgatcaagcgggaacgatgagcgcgtagttcgaacgcatcaatgtcggagcatttttctcctttttttttttattcactttagttgtttttacattttttattgggtttttatctcgtgcttcgcaccgttatcttcaatcttggaccctcattcaatatcgacaaatcaagaccgttgatggatatatattttagaacaatatttttataaatgacatgtggatagcatttagtattaataattatatcttaatcaaaaatgtaaaaaaaatataatgaaaatcttgcctaaatttgacttggaaaccatggtttttttttcatataatttttattttaatattgtaaaagagtgtggtgtcatcatgtggccattattaattagtattgtaatttaaaaagaaacaactagcatgtacattaagtgatattaaacttgagattgtaaatgagattttaattcactatttattttgagaaaatattttttttttataattacgtatgtgtatgttgtaattatttataattatttgtaaattttttaaaaaattttaaataatttatagtgttgaaaattagattcaaattattacttagaacatgtataaaaaaatgtgacagtcagtagtcccgtaatccgtaaggggaaa

SEQ ID NO: 15541 - DNA, 5868 bp, Cannabis sativa
tcataccctcccaataaaattatagtaggaaaccaatagtatctatggtaaatgcaatgcaataggcactgttagcaaggtaaaaatactaaaaaatttacatctatagaatcatagtcacagtcatagatagaccatgttacctctttttttggccaacagttgttctcatcttcccagtcaatgaatctaagaagcttttaccaagtcatgattgatattatttatattttagtgaggagggaacaacactggtctgcagctagcagagcagaatactagataatagatgcaactgttttgttatgaatagaggagagttgttggcagcatggtaattgctactgactctgaaaaaatgaattgtactactgccacttcttctatacataatttatataaatataaatatatttatgtatatgacagccagactggatatgaaaaacccctaagaaggcatgtggaagggtttcagccttctgacactaatttatttatttttttccatgaatctgatgcccttctcaataaaacccacaccaccccaaaacaagggtctctattctcattcatcatgattagtttatttgggtcctcctactatttactactactgccattgctactcttcactactacccttcactgaatgaggtgatgcaaatatcatcagccatcagcaatcttaattgctagtgaattcagcaacattagcttttcccaagatatgctctcaccaagttgagtgtattaacaatgtcacattacatatttgatatcctccaccaccacttgataaaatgaaaaaaaaaaagatgtgttgtacaatggtttgactcattgataagcactacctgagatatttaggaggaggaagaaacatgtgtgaaaatccacttggtgatttattcattgatttgtttgtcaatattagactcaggtttcatgaaccccttccaaagtgcaaccttaaacagtaaaaagtgggaaagaagctaaaacccactcataaaaggagaaaaacccaacattcccagcaaataaaatcatgttcaactttatatacttttcattcaatggcccaatatttaacacagatacatcaaatcaaactaaaacaattcctcattcctcatggctttcagccttttgaaagacataggaagcatcccaagtcccccccacatcaaaaggtaggggtttcctagtgatgtataacattaataaaatgttcttttttttcttcttaaatgaagatgaaacaaataaatcaaaaaagaaaggaaaaaaaaaagtggctggtaagcaatagtagcattatgaaagctagtgctatgctaaacactcaatatagacaagcagtcttccatggcttttctggttcactattgaccttcttcactcccttaatggcctcttttgaacttcagtcagcttcttacttgtttcttactgtaggctaaagttatcttcttttatttacatactttcccttttctctatcttcttttctcatcactcaactggctgaaaaacttttgttttttggtattggaaattgtaacctcaatcatcaaattgcaaataataccatgtcatatggtttttaaacccctgattaaacctataataactccatctaatataaaaataaagaaaaaaatcaatttcaaaaggtggaaaaaaaaggaaagaaagaaagaaaaacctgtagtctaataaagggaactcaaatatatctctggtgcagaagaagaagaacaaattttcctatgtcctgtgacctttctttattggactactgtgatcagactcattgaaagtaagccttcttttagttccaaccccagagttgaatgatgcattctcattaaggtaatgagagcttgaatggattgataactctggtgtccttattgttcctttttctatatcttgcattagattataagttgaatacaaaagttcctgttccaatagagaaaaagattatatcagtgtgaaacatcttatgccaaccaaccccttttccttaattcattgaaaacattatgattatgattataatatgctcactcaccttgtcatctgatcgccagaatgagaccacattcatcttaagctccattatctttcttgttaattggcaatcaagagcagctaataccgcggcagcagcaataatagacgaccgagtgtccatcaaagtagcctctaaaccagatataacacagattgattagcaataaaaagagaaagagattgattattagtggcaaatgtaacaaaaagggaaaaactaatttgggattggtatcaaatgtcattgtttttttttaccttttgccacagccacaatcagttgaacagcactagagactagtccttttggtctagaatcaccacagaacttattgatgaagtaatttagataagtaaatggagttattgatcccaatttccattccaaggtacttaaaaccattagctccattctctgaatcatatcacttttaaagtcataatctgtagttgggaattctgaaagtattgggacattacattcctccatcttagccgccaatgataaacaagctactgataataatcgaatagcccacatcttcccattctgattttagccattacattcaaatatttaccaaaaatgattaaaacattcagacaacattaatcctaagaatgggaaaatagttaattagttacttacatcaatgtatctcctggaaataaaccgatcaaaataagtgactgagagataagctgttctgtaatgaaacccaaaaactgctcgagtctgattcacaaaaatatggaaacttttagctcaaaacactaaaaagaaaaaaaaaaaattgaaaaaagaaaaagaaggtcaatggtaaagtagagaaacaaacattgaaaatccattcaacagcatccaaacgagcagatttcaaccaggtttgacaaacagtggaacaatcatcagaagttgcgatgcctttggatccaaaacaagtagtagttatttctctcttaaacaagttttcaatatactcatcctcatcttcagcaacaaaacaatatgacataatatctatacaagtatcgaaactttcctcgtttaaacatgactcatcttcttggcacaaaaggctagaaaaacacaatgaagtttcatcagcagtagcagagtctcccattcttgttgcttctcctcctcaatctctattttcatctataatgagagaattataaggccaaaatctctacaaaacaccatctgggtattgctttgattccatccaccaactcctcaagactaagatttagcacaattgagagagagagagtgaaagagggagtataatctggggagtgagaggaggaaagtagcggttttggtgccgccaaaataagcggatgagatatagaattagaagagtgagtggggaagttaatagtaacagttacatagtaatgtagtgtagcagagtatatatatatacatattactgtatacatacacgatactatataacatagatacacatacttggtacactactacttccacccatggccatgatctgttttttttttttcttcttttattttgcatatgtttttttttttctgtaataatattaaatatgtattatgtatacgtggggtttgagtttagggtactgattaggtacatgctgttgtaccacttttttgggtgtgtccctaaaactttggacagctgtaggattgcaagttttgtcccatattattaagaggggactcatttttggtcatgagcttcatcattcataaccatcaacgcttgcattgctcactctttttttttttttctattttttttttaattttaattttcttctcttttatctttttgggggttgggggttgttggtggggtggggtttatgggatgcaaaatgctctctaatttgcaccaatattgttcatgtaaaaattaaccaaattatttcaactttgttaataatgatcatggtttaatactctgattagcagttgaaaggcaaatattaggaaccattgattgtgattggaaagcaaaatttggcagttatatatactttttcaaacatttattgacttgtgcaattgttgtatccaactgtcacactctatttgttcttctagttctatattattgactcttttttcatactcactattggttagagacaattttgtgagttaacaattatcaaatttcaatcctaaataaaaatattgtgtgtttattttgtatgttttcctataaattctgagttaaagggtagtcaaaaagctcaaggctttaattttttttttctcaattaatatatattatggagcattgttatttatgagtcatctcatacataaatgtttattattgtaaaccaacatactaattaatcttgttagtcaaactcagttagttagccttatgttgtacatttctcttgtaaaacaattctcatataaataaagttcagtcaattattttaggttaagcttttatagcacttagctcatagcaataatttttttttttcaaatattactttgttcttggctttgccttgtttacatggtatcaatcacctctgatttacatccataaattttttaacttttgatcctagcaataccgttgcaccaatggttaccactgttccatcattgatgacaactactccagctccagtgactccagcttccctaaaaatgtctagaatttgttctcccattctcacttcatcgctcacaatcttgatcgcctaaatttcctagcttagaaatcgcaagtggtaccaacagtcataggccatgattttgatgaaattctcttcattagtgttccttctccacaaactctcatcaatagtgaaatcaatttggcatactctcaatgaaagtgaaaagatcaactcttactttcctagattcgatcttcgatgactgagggtatcttggcatcttggcaaatcatcacacttcttaaactatttggcacactcttgagcaaacattcttgagccaaacaaaggtgtggcgtcctcaactaaaatgacagttaaaggaaaatcttactatcagattatgttgacaggattcaatccatctttgataacttggttgttgctggttcactagtaaatgatcaagatctcattatttagtagctcaatggccttgatcggaaacatcaatcccattgttttaggaattacttcaagaagtgatgttctgagtcttgaagaagttcaagccttacttcttgcacatgaaagtcatcttgatcatcactctactatgattgatctctctctcaaaatgcaagaaaaccttgtgtttgtttcctctcgaaatggtagatcttaatctttcccaaactctcgatttggtcctagtgaagccttctttgctcttggtcgtggttgaagctatcatggtggccctccaatgcatcttgtgtgtcaagtttgcttaaagattgggcacatagctgccatctatcactatcgatttgacaagaattgggtcacttctaaaccaagaccacctcctcaagcctaccttgttgagcaagaattcgagtatgatccccatgtttgctccattactgtgctaccacattttagtgatgatggcacgtggcatgctgacacttgggctacaaattatgtcacctatggaattgaaaatcttgattcagctacccccacacagaccaaaaaactctttgtgacggtcaatagtcccgtgatccgtaaggggaaatactgggtaagctgtacaatcccacatcgcttgggaaaggtcaagtgggatgat

SEQ ID NO: 15542 - DNA, 8316 bp, Cannabis sativa
  modified_base (5255)..(5262): a, c, t, g, unknown or other
tgtggtaattttggctttgccctatccaatgagaaagtttggataaatattattgatagtaatcttttaatcatacaagttcagctactattttctatatttaataaggtaagcaccgtaaagaaaatgttaaagagaaccaaaattgcaataaaaatcagcaatgaaagctaattttagtaaaacacgaaaccttctcttcataacatggttatggggtttaaggaaattaatgaacatggttatggagtttaaagaaattaacgatcagaaaccttttagtttaagttataaacccacatcaaaagagaaccaattaacaaaaaccaaactacgctatttacctaaactaaaaaagtaaagaaaggcttacacttcttcccattctcacaaacagaaatgggaaagctgccctatacacttgctcaaaaatatgcttctcaatattgactcaatttcctcaagacaaccggacaagagaaacataggaattaggattataatgcagaattatttaccaatgagtgaaagggtccaccctatgctacaatcattggcattgatattactggtgcttcagctgtgacttcatttacagaatattcagctgtgccatgttgtaactccgtgtagtgaaattcaatctgtaaccggtgatgaatcggcgttgatgccattagacccttttggagatcaacctgcaattcccttattggaatagcagccaagaagctcttgatatattccttacatgactctttgcctctgcatacaacttcaacttcaactttattgtcattctccacctcattcaggctcttcggctgactcttttcaactttagcttcctttgagttttttgagtgtctcttttcaactttacctctgccagttttttcatctaattgcttcttctcttgaggtaatctttcaatgattgtgtctttatcaaatttcagaacataagcctgattacacccctcaaaaagcctctcacccaaagtgtcaattatgtagtaagcgtcacgctctaccttcaggacaaagaaatggtcattccagcttatgatatagatggaagaagattcaccgttgcacggcaagtctgatgccaagcgactgatctcatcccacatgctatcaaaggacataacaccattaaggaagtcaagttccccttctttgagtccttcaggatggaagaaaccaataaaagatttctctggaacaaccgtgagagggcggactttagcttgcaggactgtctcaagatcaaagtgtctgtctgggaaccgttctatgtattccttgttcttacaaagatttctccattctgatgatccatctctaatcaagctattgaaatcagacttaatgggcatttcatcttggttggactgcaaccaatcagcaatgacagcaaccagggctgtgcacgcactctctcctgcagcacgttcacttctttgatcaattgaagcaaaaaagacttgtgcctgaagcttcattagcccatcacggctagttacttccttgctctcccaacagcccacagcaaaagtatcctccccaaattcagaaaatgatgatcgactagttgtagaaccaccttctgtttgataccactgcaaaaaagttgtcataaacatatcagaatcctaggaacatgttattttgaaagtcaaacagcaaaaacagcacacgaactacaaaaagaaaagacaagctacagttgttatttacccctaaactggattcatcagagctcagctgcctgcgatcaaaatcaatatcatccccaccctcttctccataatgctttttcaaaagaggctctcctttggctttaggagtaaggctcattttcctcttcttccaaggcaggattctacgctttgaactaccctgtgatatctgctcagagactggtgtactagagctttccatacatgagcgatagatatcaggcttacggttactatagtagatcaaacactcatcttcactactgacattagtattagaataaaatgatacttgagcacagtttgcaagagccagtgtttcataactgaccgactgccttacaccgaaatcctcactctcctctgtctctcccccagcatcatcatcaaaagaatctgtgtcaaatggagaatggctagcactagcagtatcttcacttctaatagagctcctgccatcactcccatcttcctcatgacgcgtctttttagctcttccaacagacacatattctttaaaggttttcacctttcgcagacctgccttaaaagcagaatactcatcttttgttgttgagaaattttccaaagatcggggagacgtaggaagaggtgatgttggtccttgcactgacactgaaaggtcttgagcagttcctaattctagtagcacaagagatagctgcattgtggatgaacttacgatcagacaaacacataaggaaaagcttaacagatagtaaaatctaaacgaaaaagacactgtaacttacagtcactgagggactagactcagaggtgcaaccaggggcattgaggggtattttgagcccaaactcctttccctcattcatagaaacgtaatctgcaaggttcagtgatgaagttccaagaacaagggccctatttttcagtccttggttcacaccctgttttattataaaaacaaataagtgatactatcaaagaaagtaatagagacaaataagtgatctaccattcctattaaacaaaaagattgaacaggtccattagaacattaaaagaagtttacaatcgacaagaggcttattaaagcaaagaatatgccaaccgttactctctcaaacagggcagaaaagtataaaaaatataaataaaataattaactgcaggaagcattgaccaattacagatagctattttaaacataaccccgagtgtaaagtttgtatttaaggtaaaaatttaacaagaaaaggtccttgtttgattacaacactctttaaaaagtctaattcatacactgaaaacaagaaagatagaattttactatttgagagaagagagaaaattaatattaaaatctttttaactctgttaaatcaccactgcagtgaataaaacataggaaatgttttacagaatcatattccaaccatatctctaatcatcttgatatgtaacccaaagctaccctgctcaaaattttctatgaaaaaaaaaaaagaaaaaaacaaagacatctcatcatccatagctaatatcatgactatatcagacgaaaaatagataataagaacaatcatatatgggcaataaatcagaaagatcatatcagaaaacccagtagcttagtgcttagtgaaaaaaaaaaaaaaaaagataaaaattcaatcactcacgcgtatatgttgaaaaatcaaataaaacaaaaatatgtcgtcatgtattgtatgattttcaatatagggactcacgttgaagagagttaatgcgagctcccatggatgaaacgcaccctctttaggacccgaaaagttacagacagaccgaaattcttcatcaaattccacgactccattgtcactaacagagctttctttactcaaattcttcttcgttgagcgcctcagagaccccaaagccgtacccttttgacccttccattgaacctcaacgaatacccttttctcttcgccatccaacttcaccaaatcaagcccttcaatccggcgaaacgacaccactacttcaaatttcttggaccaaacaaccggtggccatggcggccatttcatcatcctcaccaccatttttttgctaaaaggagaaaaatcccacacagaagaagaaaaccaaaaacttctccaatctaatcttaaataataaaagttaacaactttgtagaaacgaatgaccgagattcaaggattctggtttaacagaaatcagattccgaaatatgaaaacgggtttctcataaataataatgtttctgaaacagaaatgaaaagagatatagatggagtcaaagaagttgatatatgaatgagagtgtattatatgtgtatatatagtatggattataccgttcagtgacaaagaaacaaggaaacttttaaagagatgaaagagaaagagagaaagaaaggccggcattaaaatagcacctaattaaccaacgtctctttctctctcttagaattggagtgctttttttctttgttttgcagtttagtcctttaagtattgtttatttattatttacctccctaaaattctcaatcctcttcactcggtgaagaaatttgttatatgtgcatatgtatggcccacaattgttttgaatgagtgaaaaatgcccttcaattcatgattcacgaatattgtttggattaggaccttttaacacttttttgtagcatctcaaacaagttacaatacgtacaatcttactctccaattttttttttatatataacatgcataagatctgattcactctataaatagtgaaaaagttaattagtgaaagaatctgatttttttattattaaaaattaatttggtacattcatattcaatgttttttgatgcattttttgcattgaattaagatgcatatgtctaaattcagtaattcattttgataaatttcataagttttttttttttttttgaatgggtaaattacacaagttttgagtcttttgacaataaaatatattaataataataatgcacgcgatcaaatcagtaggcacttgttatttctatttttttttttatatataaacaatgttaattttagagttaaatcataggagaacatgaattcaatgagaaatgatatctaatatctaatatttaaaacacaagagaataatatctaaaggttatctcttgaattcggaaattatatcaattgttttaccaattaaaactaacaatagcacaccacagtccacactagtgatgagtatttaatactaggttattattattgttatgtgattagttatatttttagtttttatttttattatgtgtagttttaaaatcatataaattaaaagaaattaattaattttttaattttatttttttaaaaaaattaatatttaaagttttaaaaatttaaagagaataaatataaagttttaagagtattaaaattgaacatactctcaatattaaaaataacaataaaaaaatagtaatatctataaataatatattaatatttannnnnnnntaaattaatttaaaattagtataagtttaattaatttaaaacaatatacatttaaattgatctaaaataaataataataatatttatatataaaaaattaattctactaacacaattaaatttaacaaaatattcttatatttttaaaatattccgtttaaaaaaataaccacatataaaaataaagatttaagatcaataattctttattttttttacaaaaagaaagggatcttatcatggttaaaaagaaaaaaataatacctttttatcatttttataaccacatatttttttgttaaggacctaattaaatcacattaaagcatgagattttttttttccctttcacaaagattatttgttttcagtggtaacaacctgtcaatgttataattttctctctcaagatttttatgtggatttcagtggatttctttttcataagaattttatatttagtaattctatataggtataatcaccagatgtaaaacaactcttgtggagctctaatgttatttttagttaaatagtttgggattgaatttttattattatggctaatgagtaatttaatgagctaatcttatgatacctacaaaaaaattatactaaaactttaaactccttttttttaaaaaaaacaaaaaaacttaaactcccccattttgcgtgattttcattcatgttcatatttttgggaaaatataactgtaatatattcatcaaatctttacatactcaaataattccatattgtatttttttttttttttttgaaacaatgccatattatatctaaaaaataaataaaccacaccgaataaaaaggaataactcaactgaaataaaatgaaatcatcatttaatttaggggaaaaaatatgtaagaagatattgaaaaacttgcgtttgtaatataattatagggtgacatattattttgatgttttttttttttttttgaaacagttatattattttgatgttcacatgaaaatattatttcatattttgggcacaaaatatataaattaaaattttattgtatttaaagagagtggtggtggtgcgtgtggcgtggggtagagtaaatggatacgagttacacgtgcacaacactgagagttgaccgaattttatgatgaacgcgtaagcgaagaatgtgaaaacaaaacaaaacttctctcatatatcatattatcatcatcatcaagaagaataataataaaagttatttgttcaaaaaaatatacataatatggtaaactaaaggttccaaaaacttgtgtggctataattctgtcagccaaaaaaatccatcgaactcccctaaattgtcctctcctccacgcaccactttctaaaagtttcataacatttcaatgtggtaaatttgacttagctcaatccatttatttcaacctctgctttaaaattctcaattttgctaacaccaataaccaaatgtggaaagtgagtcataatatatgtacgtaatattataaatcttgataagcattacgtggttgatttattctttttagataaaattcaatttttaagtatattgttatttaataaaagaaatcgatataaaaagttgttatgtttaaaaatacaaagttaaaaaaatgattattttttaatttattcttttgaatctgacttgttaaacttataccgtatatacggaattttttcatataaaaaaaatcatacaagtcatcggctgtataataaatagtttctatagtttaatgatttatgattaagcaaactacttacttatttttaggaattaaggtacgtaactcaaaatgtattatgaattttaaaattattggcttggattttataattatctaattgttattttatatattattagtaaaatttatactgaaaaattaattaaataaaattacaataatgaaaaaacgacggggtgattataataatatattagataggttaaattgaccttagacagttttttctttcatttttatagaaccctgtttgaatttttgttttccatcttaaatactttaaatattttcactttttttaaaaaaaaaaataatttaaatattttcactttgcccatctcttttttttttaaaaaaaaaaaaaaagttattgattatccaaaaataaaaaatttcttattatctatgtatgtacatctctttttcaaggtgtctctattactcctcacccatttattctttatacaaaaacacatgcaaaatattattggtaaatatcatcttgaaaagtgcatgactaacacactgtgagtctgtgattatataaagtgacagccaagtctgtgaccacacagaaataagaattaatgtgtggctaattttcatcaaataattttttgcgtgttaatccaccccactcaaaattcttgcagtttaacccctctaagtccctttttcttcttcaaaccactcataaagaaaacaaaaaacacatataacagctatgatttaatcatcaaacgaaatttcaatatgattagttttttctgaaagccaaaacaaatttcgtacgaaaatcgtttatttattttaatagaaagttaatcccatcaagattatcatgtaattgtaagttgttacattacatacgtaccctcaaatgaaaatccaaaactacttagcctatacttcctcatgatttacatatataataataaaataataataataattataacaatcaagctaattaagcatatacttataattgagtgtgaatctctcatacaaaacacaagcaaccccatccacataatcaaaccacttgctaattaatttcgtttatgaaaccaactttattattatggttgagattagacttagtagcatttctttggtctttttttcttttttaatgtgcaactatatttaaaatactaataagaaaaagtcttagaatttttataatggttatttcttcattaaatttgtcatgaattgcaagtcattccttttttagtgattttattgggttgagggtgttttttttttttttttt

SEQ ID NO: 15543 - DNA, 11558 bp, Cannabis sativa
aaaaaaaaataagtaggtattattagtgtgagagtttcaacacgtgcctgctctctccggtcactataaatacccattgaaaattacaatcaacggtcactcatttacttttaaaatctgtacacaaactttctctctctaaaccaaacacaaatagtgaggagagagaaactgaaaatagaaagaaaccatggacactctgcgcctaaacccggcggtggctcatgtcattgggcccgacccgacccacgtgaacccgaaaggaacccgcgggttgaggatggccaacttcaggccagtcaccatcgcaggcgccctgtctaaacagactgctgagattactccaaaaccgccatcttcgtcgaccgtcttgacacgcgaaatgggcgcttttcagggctctcctcctcctccgccgccccctcggatgagggtctccgctgattcgttgcagtacccagctggttacgttggggcagtcccggaccgggtggttgaacaggacgatgctgggatcattgatgcgatgagttacttgactaatatactttcctccaaggtctacgatatctccattgaatctccgcttcagttggctccaaagctctcggaacggctacagaataacatttggttgaagcgggaagatttacagcctgtgagtatgaattgggtagtcgagaatgtcaattacgtgtttgagaaaatgattgaatgtgttttttctcttttgggttttgtaggttttctcgtttaagctcaggggagcgtataatatgatggccaagctcaccaaggaacaattggataaaggggttatttgctcttctgctggaaatcatgctcaaggagttgcattatctgctaagaaactgggctgtaatgcactgattgccatgcctgtcaccacaccagaaattaaggttctttttccatttatttttatgatgacgggttttaaattttcggaccaagaaagatgtctaatgattttttgtgttttgctctgtttgatagtggcaatcagttgagaggttgggggctacggtggttctagtgggagactcttatgatgaggcacaagcttatgcaaagaaaaggggcatagaggagggtcgtacgtttataccaccctttgaccacccagatgtgataataggtcagggaacggttgggatggaaattgtgcgccaaagcaaaaccccattgcatgctatctttgtgcctgttgggggtggtgggctaatagctggtattgccgcctatgtcaagagagtctcaccggaggtttgttggttttatcccttgaaaaacttttcttttattcaacatgctatgttagatttcctgaacaacttttctttttgcaaaatgttatgatagatttcacttttttttcttttaggaatttacttcaataaatatcgaagctttgttaaatcgctagccacaaacttgtgcacggtgactggagacttgggccctccccgtgtgctttatcattgtctaatatggggtcattgatttggattctcccctcaaaccccttcgttttttttttttgtttgtttctctaaattactccgtaattatttttggagctttgaaaattcactaacacatacttatgatcggagactgaaggcttgagtcagtttattcatattattttgtctctttctttgctcttactttggggtcattgttttctttgtacagcgagggtctttgaaaagaatgctggttgggcttgaaccctatgttcatacttactgatgtttattaaatgatgtacgttacaatttcaggtaaagattattggagttgaaccaaccgatgcaaatgcaatggctttatcattacatcacgggcaaagagtgatcttagaccaggttggaggttttgctgatggtgtagcggttaaggaggttggggaagaaactttccgtgtatgcagagaacttgtagatggtgtagttcttgtaaaccgtgacgccatttgtgcctcgattaaggcaaggcttcttatgtgtgtcaaattcaaagtctgtgtgcttgttcttgggcttatctcttgatgcatccttactcgagaagtatgcatatgattagcatgttcttggggggtgttgtttattatgttgtcctcttgtggcatgaagagctgtggtccattttacatgatcgctatttaagaaaaaggctgcatttttttaatttcaaactagttgagaagatgtcacttatcattaaaagtttttgagaacataatgtcatggctctcgtttgcaggacatgtttgaggagaaaagaagtattttggaaccagcaggtgctcttgctcttgctggagctgaagcatactgcagatattatggcattaaaggggaaaatgttgtagcaataaccagtggggcaaatatgaattttgataaattgagagtagtgactgaacttgctaatgttggtcgcaaacaagaggcagtacttgcaacccttttgactgaggagcctgggagcttcaagcagttttgtgaactggtatgtagatgtgacttcaataactttctcattaaacaactctcgcatttatggtgtcaatttacgtcttggcaggtagggccaatgaacattactgagtttaaatatagatacagctccgataaagaggctgttgttttgtacaggtaactgcttgtcgatttgtgaatattgatcagatctcaaattttctgttcagtttcatttattttctgaggagtctttctcagtctctagcagctgtttattttttgtacatgggtcgttttattaactttttcatattatgcagtgttggagttcacacagtttcggaactcagtgaaatgcaagagcgaatggagtcttctcaactaaagacttacaatctcactgataatgacctggttaaagaccacttgcgttacttggtaatttatttttcttaactcggctttgtctgtcagttataagtagtaacctctttacttccctctatcaatatggggagagtgacttcttttccaatgaacaatgtggccatgtcattttggtagtttaccatgtttcgagtttctttcagatgggaggaagatcacatgttgaagacgaggttctttgccgtttcatattcccagagagacctggtgcgctgatgaagtttttagacgaattcagccctcgatggaatataagtttgttccattaccgtggacaggtgggcatcaaagcaaaactcttgaacattctcttttaacatactttcacaaaaaagtttaaaacagaatgcataatgtaccatacgttttgttatgtttatttttttctattttattatatctcattgaacttcctccaatagggtgaaactggcgcaaatgtattggttgggattcaggtaccaagttccgagatggatgagttccacagtcgagcagacggtgtgggatatgaatatatagtggtaaccaacgactgtgatttcagacttctgatgcattgattaacttataaagctttttagctttattgcaaaaaggcaaagacagcaatagaggagggtagtagaactagaaaccctcttgatgaaaaagcgcctggtcatagtctttatgccacataatagttcccttcttcatcccaagttttgtattatgatttaagttattatggtcatcaatatcaaggcaaggacttttgttttttggtcatttttcttgttttagcccataacttctactgatcttgtgtcataaacgaatctactcccagatactttttctttctttttatgttatttgtagtagtggtgaacattgcttttgttatataggttgtaataatatacatgatgtgtgaagagtatgagacgtgtatggcatctaagctaattggattttataacagtggtttggttttgaaggaagctgatgagtactgttgttgttgtatgtagctgccatggccaatcaatcacaactcggctccatcagttaatattggcaataacaaaggaaccagaagtctgtggtgggcggatccatcattctcacttttcaatataaatcatttgtatccttagccttaaacgtataatatagtacgatatctaggttgattgtttttttaatctataaatcaatatttcagccctctaaggagaaaataaataaattaataaaattagagatctcaagttcaaaattcgagtataaaaaaataataataataataaattattttatataataaagtagataaaagattatgcaatcgaaaataaaccactctaaaattttctcatatatagaaatatcacgtactaccaatttcgctccaagaattctccaagaatcttgctctctctctgagaagagcctttcctaaacggaatgcctcacacgcctgagataacgatggatgatctgcttgatcgaattggtaatctgcgaatggaagatgaagcaggctgggaggttaatgaggagaaggaagcagaagtggggaaatcatgtttgatgggtcgactctgttcgaataagagtatgaatagaactctgattcgaacaattctgggcagaatttggggattggcagaagtggattggggagtgaagattaaacgcacgactacggaggcctctttcctgatcttttccttcaaaaggggagaagacctgacccgaattctgaacaaatcgccatggatgttaaataacggagtgctcatccttcaacggttcaccaagaccccatccaaatgggaggaggaattaaatcgatttcccttaacaggaagggttctgaatttaccaactaaatcaattacccgaaacaatatgcttcgacttgcatcaatggcgggagaggtaattgaaatacaacaagaagatgctacaaaaataaccttgaatgggttcttttggtttaaagcctggatttcactggataaacccttatgcccgggatttctgtttccgatgtcgggaggcaggatctggttgccattcagatatgagagattaccatttatgtgcttcagttgcgggtatgtggggcacgacttcaaaacctgtgcgaaacacccagagcagatcacggatgggaatggaaaaacaaaggcggcttacggtccatggctaaaggtagatgacaaactaacggtgaacaaagggaagaagcaaagtgaagagacaccgggcagtgggataatagaaacacgatatgggaaggaagacaaggtggatgagcatcaggtgaaaatgacaaaggaatatggtgatgaaccttcaaaagcaaaagagggacaaaccaatgaagaaacacagggaagtgaccctgttcaaagaatcacaaacaagaactccttacatcttgaggtaccaaagactaacccttccttatcttgcacttttgtgaatctaatgaagtcttttgaagtcccacgggttgagaaagatttcgagaatgaaggaggggtaggaaacaaaagaagggctgtttgttgggagcagaggatttggggtgaagggccagcaaatgatacagggaaaagaatccatagagaaaatccagaggggcaaaaagatgagggattgaacctatcaaaaggaggaagtcgctgggttgatatacctattaagttcaataaggatcttgggagtgagacacataaaccggcagaagatagaccaagaagggtagcaaaccgtagaactaaaaaggttgatccaacaatagcacaaccaagcataagcaacagaggagggaagggtaaacaagttgagcatgtggtgaaggagagggatacagagaacatttctagcatcttggatttggtctctggagtaaacgtgaaagcggcgaactcgggggaaccgagtcgccgaacacaatgaatgccatgttttggaatgttcaggggcttgggaacccctggacattgaagaccctttgttcccacgtgaaagaacatcatcccgggatgattttcttatccgaaactaaacttaatgaagctgcgatggaaaggattagagttgttttgagatacgatggttgctttgtagtggctgccaatggaaaaagtggaggtttagcccttttgtggaaagacccttatgaagtgagcattaagtcctatactgtttcccacattgatgctttggtggaaaatggtttgggttttacttggcgttttactggattttatgggagtcccgacccggggggtagaaaattctcttggcaactcatggaaaaactccggaatatggttaatggggcttggatttgtggcggcgacttcaatgaaatagtaaaaggaagtgagaagaaggggggcggtccgaaacaagaatctcaaatgagtgccttccggagagctatttcctattgcaatttcaaggagattaagatggaagggggggagttcacttggtgtaatgggagacaaagcaagctggtttttgagaagttggaccgggtattggcaaacccggagtggttcacaaagtttggggatacttcggccacactcttaccttggtggaactcggatcatcgtcctttggttcttaatggcaacattgggaacaatcaagcaagcaaggaaacgcgatggagaactcggtttcattatgagcaagcttgggctgctgaggaagaatgtggtaaaataatagaatcggtttggcttgatgggtctaattggggggatccccatgggttgagaagccagataaatcattgtggggagatccttaaggattggaataaggataagaaggcggagctaagggctagaaccaaaaaactaaaggaggagttaaaagtggtttcatcttctaccgatgagaaggattggcaacacagaaggaaagtagagagagatctaaatgctgttgaagaaaaagaggagattttatggaggcaaagaagccgagccatttggctcgcccatggcgatcgtaacacaaaatattttcaccacaaagcctcccaaaggaagaagaaaaatacgattaaaggtttatttgatgaacaacgaagatggtgcacgaaagagaacgagatagaggatatactgatcggctattacacggaccttttctcttctactgggccgaagataaacttgactgacagattaatacaatgtgtccccaaccggttgaatcaaatggataacgatgttcttttggaagagttcacagaggaggaggtcaaggaggcaattgatcaaatacatccactaaaagccccgggcaaggatgggcttcctggtctattctaccaaaatcattggaatgatgtgggtcaagaggtaataaaaacatgcttggaggttttgaataatgataaagattgtagctgcctaaatgacacacttctttgtctcattcccaagatcaaaaacccgactatggttggtgactatagacctttgagtctttgcaatgtctcatataaagctatttccaagtgtctagcaaatagaatgaagctgagtatggacaaggtgatttctgaaaatcagagcgcttttatcaaaggaagacaaatccaagataatgcgattctcgggtttgaaagcctccactgcttaaaaaaagggagatttggtagtggaaagaagatggctctgaaattggatatgtcaaaagcatatgaccgggtcgagtgggattttattgaagaaatgatgaagcgattggggtatgatgagagatggattggaaaagtaatgggttgtgtgaagacggttaccttctctgtgttgcttaatggtgaggctcggggacacatcattccgcaaagaggcttgcgccaaggagaccctctttctcctttcttgttcctcatttgctccgaaggcttatcttgcttactcaatgaagcaagccgtgaaaataagatccacggccttagatttggtaacatggaaaatcgattgactcaccttctatttgccgatgatagccttgtgtttttggaggccacaatggaagaaggacaagcacttatggagattctaagaacttattccaccttgtcgggtcaatgtatcaactacaccaaatcgaatctatgcgttggtcggaaaatccatcatatagagggtcaaagacttgctacatcgcttggagtaaccttcattgagaatcatactaaatacctcggcctccctgcttttgtgggccgaaataaaaaagaggctttcggtattgttcgcaacaaggtttgggagaagctacaaggatggaaaatgggacttttctctcaagcaggccgagaggtattaattaaatccgttatccaagtcataccggtctatttaatgagctgttttcgaataacaaagggattgattagagaaattcaagctctaatagctcggttttggtggggctctacaactacaaaacaccaagtccattggggaagttgggagaaattatgtattgataaatgggatggaggtatgggattcagagatttggaggattttaatcaagcccttcttgcaaagcaaggatggaaactagttgctcaccccgatagcttacttgctcaaactttaaaggccctttactatccaaatactgattttttaagagcaaaggctggtacttggtgctcaaatgtttggagaggcatcctttggggtcgcgatcttcttttgaaagggattagatggcgtgtgacggatggtagcaaagtccgcataaatgaggataaatggctccctagaggagctcctttccttctccgaacactggccatggtgcctccaaacactcttgtcaacacccttatgaatggaaatggtgagtggaatacagaatatattaaggagaagatgcatgaagatgacattccttggattatggggattcaaaccaatcgaggatatggggaagacaatctgctatggcactatacagagaatggtgactacaaagtggctagcggatatattatcaaccgagttgagaaacagggggccgaggcatccaataagtcaatggaaagaaaatggtggaagacagtttggcattctaatttgactccaaagatgaagaacttcgtgtggcgagtatgccacaattggattccatcaaaaagtgaactggtgcggagaggtataaagatggagagaacttgttcgggttgttggaattatgatgaaaccattagtcatgctctttggcaatgcccaaagatgaaacaattttggaaagctgctgggttttggcacttattcccaactggtctaagcaatatgaaagatctgacagagttcctaatcttcatgagtaaacaatgctcaattgaagatctggaaacattcctggggctgagctggttggtttggaaccaaagaaaccaacgcattttcaaaataaaaaaactactctggatagctggactccttgggcattagactacataaccaacactcttcacaggaattttgagaaaaaaccagcaacaaggacaaggaatcaaaactactggatgcctcctaaaccaggtaccttcatgttaaactgtgatgcagcggttaatcacaacgatccggagtttgctctagctgctgttatccgagaccaggggggattgcttattgctgctgaagtagaatatcatacaggtatggtctcggtgaaactagctgaaattttggctatcaaactggggctgcaactcacccgaaaaatgcagaccaaaccttttactgctgcttcagataacatttcagcaatcaaccagattaaggtgaaacacaatgctcgggcagattggggacctcctttaattgagatttttacaagtgatcttttagagggctgtatagatgtaaagtttgttaatagagattgtaataaggtggctcattctttagctaattgggctttgaatcatagatgtaattctttttggtcagaggaaattccctcttgtgctgctgcaattttgattgcagaaaagcctgactttgtgtaattttcttttgcttaataaagtatttcattttcaaaaaaaaaaaaaaaagaaagaaaataaaccactctaaatttagtgtactaatttcgtgagagaattggatacatgatatgtgaaatttaagattgcatttttgcaaaactgcaaccttcatatacttcaagacagatagcacacgttatcggttatatcttcttcttctcctttttctcttttctccacataatagtttaggaattctccatatttttttaagaatttctaaaaaatatgaaaaaaaacagtagtaaacgttgaacgaaaataaagactaaagaaggttggtttgatggcctgagcaaattcatgtttaaaattttttaagttaatgtgattttatgttttcgtattaagtatttataagtgaatattatttatcttttttcttttaagaataataatatattttaataaaaaaaatcttatgaaattataaataaataaaagatcaaatttaaattgttttttcggttcgtaaaatttcttgttcttcacttcttcttcttattataaaattaaaaattaatttaaattataaatttaagaaatcataaatcccaaattcttcaatgatacgtgttcaaacaaatatgtccaataaaaaaagataagaattaaaaaagaagattgaagtaacctcattaaaagttattatcaaaccccctccttaaaattaagtactaactctctttccttgaccaaaaatattaccagagtctttcattttagtttctacagctactcaataaactacatcaataaaaaaataaaaaaataaaaaaataaaaaaatgaaggacatcaatattgagtccaacgacaacgtttatatcatctctgacatatacaaccgcttaacttatatctcaatttgctattgtctagggtcaaaacattttttagtattttaggagtaagcttaaaaggttaagatagaaaggtaacaatgttatggataggtggaagtgttttttttcatttaagaaagttcattattaattttaaggacatgttttaatatgtataaaactaaataataaaactttaatatgtataaaaataagataacttctaactcattctaatacactaaaagaatctcttggtcaagtcaccaaacaacatgtaatcatatacaatttagtctgtagaaattaaataaattatgagaaaaatccaacttttttatgatatacttttgtctttttatgtatttagattataggtttttggttctttttacatttttatgaattttttatgctacattttttgtaaaaaaaaaactattaaataccacattttatcttttttttttaacaataccatattttatctttcttccttcattatttacataaacttgaattaaaaaataatatcttttatcttttttttttttttttttgctaaaaataataaatataataacttttagaccatggatactctgcttcactaagatcttcacttgagaatactcctgtactc

SEQ ID NO: 15544 - DNA, 7275 bp, Cannabis sativa
ttgtttcctgtggattaggtcaagtgttttcccaacatttgattgaaccatgtaaattggtgtgttctattgttttgttattttagtattctcttattttttatttagatcagatactgtgcttattgttgtgttcttgtttgggttttaatcaccacatgtggaaaaataagttaaaaatgaaaagggttgtgacattttacaggttctgtcgaagaaatttggagcagcagtggtatcattggagcatcgttactatggaaaaagctctccttttaaatcactttccactgaaaatctgagatacttatcttccaaccaggccctttttgatttggctattttccgtcaatattatcaggcaagaagaactaatataatcactttttagttctgtttatttgatgaaattagtagaaatctgaaaccccatttcttacttaattgaaaaatcactcaaataggattctttgaacaagaagctgaatagaacaaatgttgaaaatccatggtttgtatttgggatttcatattctggagctcttagtgcttggtttcgtctcaaatttcctcacttaacttgtggaagtcttgcaagttctggtgttgttcttgctgtttataacttcactgagtatgacaagcaggtcaatcttttttcctttttgtgtatgttatattatatattacatttgaattgaatataaaagttttgaaattcatttatgttgaaagcattgtcaaattgaaaatgcaggttggtgtctcagcaggtccggaatgtaaagctgtgttgcaagagataactcagattgccgaacaaaaacttgctacgcaaggaaactcagtgaaggccttgtttggtgcaactgaggtttgcttctatttcttcttatttttgtgatttctttgaagtatgctgaaagatactcagaccaatatgatttttttttccttttgcagcttgaaaatgatggcgatttcttttattatctggccgacgctgctgcttcagcagtaggtagttttacatttgttgtttactgtttacaaaatttatggctactactaatcatgaatcatgactttccttatgttttataggttcaatatggaaatccagatgaactatgctctcctcttgttgaatcaaagaaaaatggagaagatatgttggtacgctcttgttcttttcgttgtttctatgagatatttttttatatattttcttcttcaagtttggtttctgaggattcactaaacagttttcagtaaaatgtatattctttttggatgttgaagtgaaatatcttctattaaattttgtaaattttgatctatggtatatcttatttgatccatctacgataaattttgatctatggtgactatttgctaatgcagatagtgatggttacttatataaaagtccagtgagctttctaagcatattttctagttttttaaactagctctcctgcctaacctttggggaccagaaaactataacgacaatcattatattatgtaggtgtctaggagagactcgagagagcgaaccatacctgaccttttaagctactcctctcgggtctagttttgtcctgggatctctactgaaaagaactatgtatatattttatgcaggttgcgtatgccaactatatcaaaaagcacttttccggaaatgttcaattatacaatcaggaatacttgaaaaacactactcttaccaaagacagttctatgcggttgtggtggtttcaagtttgtactgaagttgcatattttcaggtagcacctaaaaatgatagtattcgatcctccaaagtagacacaaggtgtgttctgtaacttcatattaattttgtacgtttctttggattggatacagtgtaattaatatatatgtatatacatatatacattatcaatacaatcatcactggtttttgtgtactctttatgaatctcttctaattggtcttatgtgggttatggcagatatcatctggacctttgcaggaacattttcggagagggtatctatcctgacgttgctggaacaaacatcaactatgggggcacaaaaattggaggtccaaactttcttcatttctctctcatacacacacatttgaaggacctttgatgctttgtttctgtcatattattctgtggctagctctgactaaattttgagcatctgatgaccgaaaactgtgtcatctgtttcctgttgatctttgcatggtatttacctataattcacatgagcaattgaagtactgtaatcatttgcagggacaaagataatatttacaaatggctcagaggatccatggcgccatgcatcaaagcagacatcatctccagattgtgcgtcttcttgactcgaaaagaaaaaaagaattttatctgcttttagcttattatttttctcattgacttcgacagtattgagtaaattgagtgagtttgatatttatcctgaaaataccttttcaattttttcagtgccttcctacattgtcaactgccataattgtgctcacggaaccgatatgcgaggatgttccgtcaatggtacaagccctattgaaggtatagtagaatacaatacaaaaacccttttctttccggaagctatgaatattttctcaacaaactaaaactaccgtctactttttcaggcgacgcaaaacaatgcagctctcctgatgcagttcagaaagtgaggcaaaagattatagacaacatggacttgtggctttctcagtgcctagacagtgaaaagagtgctatgtgatatgatatgtttctattatgcaaaaaaataaatttatactttgactgttgaacttactatggtagattattaaatgtggagaggtgaaggatatttctgctacatatcatttccttccatgtataagcagaactctattcttaagttgtttaaaccttcaaatactatacaaataattttcaatctcatcattttagagaggccattttctaaaaaagaaaagtactaaactctgactttttctttttctacacaatgcaattatgcatatgttttgctgtgattcgccaaaatttttatagttggaagtattaaaacttaagtatgagcttttcagaaaactaaaaaaaaaatcttaagtatgaggattgaggctgcaatacattgtcaaatcatattttgtcaggtggaagatgggaattcatggttgcgtttcttgttttgttaaaaccagaaataatgggagttagaattctactcaattggaaattttaagtaataatgatcttatttatttctcaatgttataattagttggtttggcttcttctaacattagaaatgaaagaaaataagtagttgcacctaacaaagttttgtaattttatagggtaaatattattttaagccttctacttcgataaaaattaagagtagtatgttattttgtattattttaaaaaatacagtgtaatttattatttaacaaaaaaatatttaatattgaaacattttacaacaacaggtggaaagcctcatcaacaacattcctatataaactaaagaataaagagttgtcgaaaactaatttattttttcacttctaaaataggatttcacacatattttatgccgcatcacatgaggtaacgtataacaacactggaaaccagggtcacttgcaagaactatgaaaactgaaaactcatactcaaccaaccaacaatagatggaacgaaatagcaactcactaaccaaatggaaaggacaacaaaaaatcaattattgattaaatttgcttcgttttacatccttctttgaaaaacaaagcagtcactacacaaatctctcagttctaatctaggaggcctttgttttgttttgtttttttaacaaaccactgtagggatgttgaaacagaaagcagacaactgtgcacatgacataaatcttcaacaaatgcagttgtattttgagttcagcaaaattggggttcttcatgattagtaaggcaaaactacacactaactatttcagataggtagatgatacccagagtagcaaataggttatcagtgaagttgtaacctcgaaactccttagtcctttgagtataggtggcatgactgaaaccatcaagaatgttcccaacagccatgagaagataaaagatccagcactgcagcacacaatagaactgttattccaatgtctttcctattatttcatttccacatttcgaaaaatgttcgactagcatgaaatcacatacctgtagagaaaagctcggagtttactcttgagcctgtcgtgtataaaataaatggttgccattagcgaaatggctacctgaagagtagggccttcttcggttgggaatagcacagtgagcgctccgagtacgatgaatgtgagtgaggtttttatgatgaaatttgtggatggaacttgaaacctactcctcacggtctgtacaacacgagactgattgacgtccttgaactttttcttgaagtcaattttcgggttttttctgtcgtaaaatttctgcatgattattttgtcatgagctgattctattgcatctacactaggtttgtgccctgcgtattgtcgaataagaaagttccttgcagattgaatttcatcttctgaggcatctttgcttattccaagtcgtctgtatgggtcctttacattgatcctaggaaagatagctgagcttgccgaggcaattgcaaagaaagtttcagtgtgtgaacaataccaatgtgtaacaatgtctaaaatcaacaactttaacaatgaatattcaatattaaatgaagctagagataagggaaattccatacattttagcataccgaaaaatacaccagaattttgtagatataacctacgcaaacagggtctaattcatttcaatttcaactatgaatttaaagcaaaacatggatgtcattgtcatctcctgtgacattttctttattcttttttcccctccatataaaaatatttatgaatttgcattcaaatcaactagcattaagataaaaattaccagatggtttatctgccatatcaccataagaagcatccatagcacacttgatcaaatgggtcttttgcatactccacttttggatagaaccagccaaataacttctgcatatcacaaaaagaaaaagtaaataacaaaaagaggtctagaatcaccacataatgcaaatatatgagctaaggtaattaagaatacacccctaaaaggaccgttccagtacatcccctatctgttcaacatctaaaaaagctttttagtccaactttcattttcaagattgtgtatgttgtaattatttaagactacttgtacattttcagaaaattctgaatagtttacagtatcgaaaataaagataaaatatttaattgcaagcgtgactgtttttcctaatacgtgtaataaataactatttgaactttatttttcacattgtaaatgtggtgttaaataagtaaaatgtaaaagattatgaaaaaagttggactaaaaactgtcaaagatgcctaaacagatagggtatgtatgtatgtatgtatcaaaacgacaaagcatagattttctgagctatatacataccttcccagactaaggacctcagtctttcccaaaggtttcacattctgtggaaaattgcaacctagtaaactggaactggttacaggtatccgaacacaacatcttgaaggactaccagtcaatccagatacagtcattttcaacttatgccactgctaaacaaagttcaattttcatcagaaactacacaaatatttaaatgaatacaaaagttgttactttgagctcaacaactccatagacaaaaaatatgagcttttccccaataccataagtttctttctcttaagcctggggccaacattgttaacagcttaaatcttcaaaaagcaagaaaattcaaaactagaaacataaaccataatcgtggttatcgattgtgattgatgccatagaaaactatccaaatttaaaacttgatatatgaaagaaaacagaaattgaagaatttatcaccttaatggagggaaataacgccggagacgaagcttcaaatggcgatttggtgaggaagaggaggaggtgggtcgctgcaacggataggaaaaacgaagagaatcagcataaggggtttgttgttagtttcagtagtaaaccctcttcttcgattttggactgtactcgttaattaattaattggttaaatttaattaattatggaaaaaaacacaaatccgttgtagtctagttggtcaggatattcggctctcacccgaaagacccgggttcaagtcccggcaacggaaatctttttagtgtattttgcttttgattaacgacagtgtaaataatgtcgtatgaagcaaaatagttaaaattcaggaaacgacagcgtttcttaaaaacgacattcagaaaatatcgatattaaagtaccaatatagttttttttttaaaaccattgaaactagctcaatctcaatgggaaagaaggggtgagaaaaaaggagagggtaattccaaaacccttcaatggtcatagaggggtggaagaaaagggagagtatagatttgaacccaaaactcttaaattattaatgattaggtattatgattatattacatttttttcttgaatatacttatttagctattttcataaaaaaaaaaaaaaaatatttggtaccttgtatttttaatactacttaattggtaccatatatttttaaattgtacaacatacttagtatcctaaagtaaaatttaatcaatatagttttataaatttaactaaacagttctcagttacatgtaattaaataattaaatttgaattcagaatttataaaattttagactgttgattgtattgataaaaatttatcaaaaaaaaaaaaattgaatttaaggtaccaaatatgtatgattttaaaatacaaagtactaaataagctttattaaaaatacagagtagtaaacttgtatttagataaaacacaatgtactaaatgtgtagacactgttttttatggaatgaaatgatgtgtagttgtgtacacaaaatatgtataaaattgtagacaataagttttattagatggaagaaactaggggtgtacgtcggtcggtttagtcgggttatagcatatttttatcaacccaatat

SEQ ID NO: 15545 - DNA, 13161 bp, Cannabis sativa
  modified_base (5520)..(5521): a, c, t, g, unknown or other
ttacgctacactcaaaaaaaaaaaggacgttgttagagccaccctcaggacctattgacctataatttcaagttttaataaatattagactattaattaaaattgtttaactaaataatattatttattactctcataattacttcatatagatatgagaatgaactcttgataactataaatatatagtactttattaaagataaaatatccattgatttaattattacatacaacgttaattctctattaatagttcataatttagaaaaaataaaatcctcgtttgtacattacttcatccagttgcaagtactatccaaccttcctcatcatcttccgtgcttcatttcggtcatgtagaagtattccagtttcaagatatgctgcaatagagatcatccaggtaggagtgtcgtctagcatttcgatttcctccatgcaagagatgttagggtctttcaggaactacatgggaactaaatttgcattgtttgtcactatgttgctcactagttgcattttcctctcttgaaatttgcatgatagtgtatcccttgaattgtgccaagaggtcttaaatttttcttagatatgttatcatttttctccccgagctgcatattcccccagaacatgattgccaaccagttgagtttcactatagatatccaggtattcagcatgcacctcccgagctagcttgagtctagcaatgagtacctcatattcgacattattgtttgatgatgtaaacccaaatttattgttctgtgcaagtgcttctcccaggtgtaatgagggtgattcttgcaccagatagttgatcggtagatgacccatccatgtataacttccaggtcggcctttctttggtcttttgctttgatgggggctctttttcttgctcatatttccttctcgagcttagaactgtcttctgagagcgttgtttcattttctgtacactcggcaacaaattcagccaaggcttgaccttttattgccactcttggtagataggtgattttgtaatgtcctttcaatggcctatttgagcagccaactagatgcatcatgtttttccaagacttgtgaaagtggttggtaggtgtatactcgtagcttggaagtacggtcttaattttcttgaagtcaggagcaagcaataagtaagtttctcaattggagggtatcgactttcataatctattaacctcttactgacatagtagaccggatgttggatgttgttaccttctctcatcaatacgacacttactgcaaatttggtcactgcaaggtatatcccagttctttccgtctagcgattttgataagattggaggttgtgtgagatgctcttttaatgcttgaaaagcttcctcacactcctcagtccatttaaactttttacttcctcggaggatgttaaaaaagggcagacacatgtctgttgatttcgacacaaatctgttgagaatgactatatgaccagtgaggctttgaacttctttgaccttcgtgggtgatttcatatccaaaagggcttaaatctcctccgagttagcctcaattccctggacattaataataaagcctaagaatttacccgaactgactctaaaagaacacttgagcggattgagcttcatgcttccagcctttctggatttgacaagcatgtcgtccacgtaaacttccatattatgcatgatctgatctttgaatatcctattgaataaccattggtaggtagccccaacattctttaatccgaatgacataactttataacaatacaagccaatgtcaatttggaagcttgtgttctcttggtcggccaaatgtattctaatctgattgtgccccgaataggtatccataaaacttaggatctcatgacctactgtagcatctacgagttagttgagccttggaagtggaaaacaatcccttggacatgtcttatttagatttgtgaaatcaatgcatacactctattttttgttcggcttgggcactaagatagggttggccacccatgcggggtaaaaagcttccatggtgaacttgtttgttgggagcttttctaattccaccttaagtgcatgtgcacgttctttatccaacaatattcattttcgttgtaaaaaaattgggatcaatgttgagggtgtgggcaactatagatggatttattctgaccatgttttcatgcgactaggcaaaaatatcaaggtttgctcttagaaatttggtcaaaatggattttattttgagcaacaaatcttgaccaatgttgagcttcctaatcggcatggtgggatcaatctctatttcttttaattcctccaccagtccaatgtttatgttaggatccccaaagcgaggatccatgtcttcatccccgcttttagtggattcctatttattcaaactttgctcgacttttgacccttggtaggctggttcttcctttttttgcctttgtcaaagaagggttgtaacattggcgggcagtcctctaatcttcctttagacatctgatcccattcctagtcaaaaacttaacacacaggtggtaaattgaagttattgctttcaagtcatatagggttggtcgccctatcatgacattaaaagcaaaaggaacatcaattactaagaattgggacatcacaatgtttgttgttggatattttccaatagtgagtgggagacggatatgtccaagaggtgttatgctctgtccagataaatcgtacactagttgcgcgtaaggaatcaaatttttaagatgaagccccatctttttgtatgttgtcttgaaaaagatattggaggaagctccattatcaatcattgaccgagccactatcatgttggcaatttgcacttcaacaaccagggggtcgttgtgaggataaatcacatggcttgcatcatcttcactgcatgagatgatgtcttcttctcagcacggctgttttggcttcctttcttccatggccaaaacttcttcatctttttgttcatattgaaatgtccaggcatatctctctccggctttgttcgaatcaccagcaatatgtgccccccaatgatcacttataaatgtccatccactattggaggcattagttggttctgattgttatcaggttgggcggcttgttggtgtttgttggtcttcacatacaaacgtatgtacgaattattctttctggtgagaaattcaatcttctcctttagatttttgcactcattagtatcgtggccaaaatatttgtgaaatcatcaatatttggtggtatccctcttgctcatatctttcttgatcggagggggtcacttgtacggcacaaccgattaggtctccataaaaaatggtctctcactccttggtgagtacaatgaaggcggtgaactttgatgccttctctcggggatgttgttgatcagaatttttattgaacttctcctttttcccattgttgtggttatttctgttgttcgaacttttaccaccatggttggaactgttccctggctggacggatagctatggtggttgggagtgtaggactttgatcggtctttttctggccaattgtgtccactcatcgaactgcttcctcgagctttataaatttgtctgcttggtctaaaaattctcccatcgagcctacggtgagccttttgatatctttccacaattctccttttagctcgatacctcctagcacagctgctagtcttccttccttggtaagtcccttcactttcatggcctcggtcataaactgactgatgtaatccttcaaaggtttgcctggaacttgttttacctctactatgtcttctaagtgagcggggagctatctcaaagaagagaattgcgcatagaactctgaggtaaaggagtcccattaattgaactttcttggtgttaacttgaagtaccactgttgggcagccttcatcaaggtagcttggaaaatcctacaccgtacatcaccctttactgtctgcaggtccatctgtatctcaaagtatttaatatgagacaacaaatcttttttactcgtatacatcttccaggtaagcattttgaacttggtcagaagatcaagggaattgaacctagcagaaaatgactagactcttgtctgatcaagctcctggtcggtgagttttgggccagtcaggccttgaatgaggctcttaagttgatccaattgcgcttgtatccctggatctacttgacctgcctgttgatcggcttgtgtcacttgttgaccccttggagcatcaaaaaggtacgaagttacatgtattttgtggaatgtagttctccacattaattggtggattgttaagcggagggacataatgttcgtcccaaatttctcttctacaattcaaatcgtctcgaagatcagctttgggccccatcctctggaagacagagtcacacgaggttttctgcgtgtttggctcgtggaccaaatcggcctaggaggattagtatcgttcggatgatttacttgattttcatcgtgggcatgacgagtatcatgacgataattgttgcgctgtccactatcagctccatcatcatattgttcgagtatgactgtccagtgtaagaatttgttcgaccttgggaggttgttggtcggcatactaaggttgcgtatagacttaaacttgtccatcttggttgtacaatgccacacgtccttgagtccctccagctggtcggcctttgtatttctttaacggtaagtaactagctagtattttattcaattccgaaaccctttccaaaagggaacatatagaactcaactaaatcatataatcaattgttatattttgacttctatggtggattgtataattctgaaatatttagtaaatttccaaataaatgtgcttcctccaaagttatatagtagctgattctgatatcaatcttgtttgaactctagattcaattttatttatttttttgaaaaatagtaaaacttctgctatctataatttacattgttttacaaaaacttttgaggtataatttttccaaatattgaaaatagagatatttatccttaatgaacaaaaacgatgtgctaatatagaatttttcaatatatttatgaagtgatcatgaaatatgaggagatatgtaataagtatggcctatagaagaagcaaggaatctagttaaggtggaagaaagatttagagttagagagattgagtgtgtctgttaacccaactccatcaaactccttcagtccccacctccattaatgatcattgcagaaacagctgttgtgttgtgatatatcatattatatgattattatatacatatattagctgcttctagcttaactgtaccatataatatgtatatagtaataatagtgtgtgtactaatattattattattatttcatcagcatgtgtttgtgagggtgatgatgaaatatgtatatatatatatanntatatatatatatatatagctaggaataatgaatcagctcacctgcccttcactccaatgtcttttttttatttggcttaattaatcataacagtttactttcctccacctaatctcatgagtgtatatatttatatatgcatttcttcttttcttttcataattcttgttttttaatactgcatatttgtgtaccaacaaatccatttaatttttttttccaattataattatacaagcaccacacccactccatatcttgtggtgggtcatctgcttttattcactcaataattctattttggcattatggacagatttttttttctcttattttctttagatttttacaatttaaagtttttattagtgcattaatttaagaagcagaaaacaaaaactttctttctagaaatacaaccatttgttgaaatgcccatttggccttttgactctgttaagaccactgtatcagaaagaaaagcttttgtttctaaaaaagaaaattattattatgatgatgatgatgaggcctgagaataaccgctcttcctcttcctcttcctcttgttcttccaatattggctttcttaaaaatgtactcaacatgtcaccaaggctgtcttccttctttaatcacccacctgtgagtatggtttaatttttctttttttaactcttgtttgccttagcctcaatctcagactacaaaataaaacactgaaattatttcttcttcattttcacacagttggataccatttcatcatcttccctggctacacctaaggtactgttttatatattttcttttcatcattaatttgttaatctaattggtttgttgttgagttttaacaataaactaattcggggttgcaatgaaacagtcatctacagcggaactggagaaggaaataagcatacttgagcttcagattttgaacttggaacgccatcttctgtctctttaccgggcagcctttgatgacaaagtctcaaccttgtcaaatactccaactagtagtacttgtagtactagagctacccctgcacctggtgcttggacaacaagcccatgtaatcagagcaatctcaataaccaaaaagccacacctactaaaagggtaactgaaaatcactctataattccatcatctacatttggtaactacatttacagtagatactattcacgaacagatatgctaaaaggcactactaatcactaccactttcatcaatgttatattgttattggtgtaattaaatattaggtcctacatagcttaagagaatagtttgtagggaatatcgctaaccaatcatagaacggtaactatatagaaggtgttgagtaccactagagtgtccaatagcaatgctcattgaagaataacctctaatatattatataaaaattaaatcctaagttaggtcagttataaataagaatcgaataacttttaaattgtaattagttttacattttttaaatcccgtacataaaaataattatacgttaataatatacgtttatatagaattaataattttattctaaattgtaatacatcttaaaataattttgttatgaaatagtataaataatttattgttatatttgatatagtatattcttagatagagattttattgtatatacgtgtatttgcaggaccataaagtttcaggacaccgcagcctagctgatcaccttggcggttcttgccttagtgctgctcctgatagactttcccaagacatagtgagatgcatctcttccatttactgcaaactggtcactcctacttcttctactcggcctcaagccccggctatggctgtgttgtctgcctcatattcctcatcctcctccacctcctccacattgttttcttccaaaagtggttgtgataattggagtccacgacgtcacacagagttgatgaatgtaggtggaggaccttatgcttccatgatacaagttctcaagattcgattagaaaacgatagtacttttagctttgtttctaaaatgttacaaaatttcaggtaccttatttggtaaattgcaacgtttatcttgatcatttttcattgctttatttatgtacttgtttcccatggaaactgttttaggtcattgcttaaacatcttgagatggttgacccgaaaaagatgaagcgcgaggagaagcttgcgttctggatcaatattcataatgctctagtgatgcatgtatgcatatgtactggttggtttattcatccatgatccatggagatggagtggaataataatggttctcttgttttggaatcccaatgcaggcacacttggcttatgggagtagcaaccgtgttaaaaattcttcggtattaaaggtaaaataaaaacattaaacttagatatttactctttgaaaattccttataactggaattcgtcaattgaatgttactttttataaacaggctgcatacaatgtagggggacattgcataaatgcttatgtgatacagagttctattttgggaattcgaccgcataactcggctccagtatgttaacagtgtgtcgttatgctatgttatgttatgttaagtgtttttatattataattaactgaatgtgggtgagtgcagtggctacagacactgtttccaggaagaaaattgaagagtacacgagggacaagacatgattacgccttggattacccggaaccactggttcattttgcactctcttcaggagattactttgatcctgcggtattcatttcatttcatttcattttagttaattatataattaactctcattatcatcataatctaactattagagtcaaacaatggatatatgttaggttcgagcatacaaggcaaagagtatatttggggatctgaaagtagcaaagaaagagttcatagaagcaagggtggagtttgaaattaggcaaggagagaaggaaacaaaggtgttggcgccgagagtgttggagctgtttgggaaggacatgtctctgagcgcggaagggttgttggaagtgatccttgaaagcgtggcagatgtccaaaaaccaaaatgcaccagcaactcaactttttatctgcattcgctaccattaccaccgcacaactcaacttttcgttatcttattcatcctgatttggccaccaatggaatatgccattgattattcattcatgattttgtacatatggacatagacatggacataaacatactcttttacattctataacactaagagtcaacaaaacaatgtatcatctaaattaatttttttaaaaaaaaaatgttgaatcttatttttatttggaggggttacgatttgatagttgccaaagtttaaggagaaaatttattaatttacaaaaccaattcaatatttaaacgaaataatgagacataatctaacagaaggactaaatttctgtaattataaaagtttatagaaaatttttagtaagctgtatattttaaaggttaggatcaaataatgtcgaaagttaaaaaaggaaaaaatgctaattattcttgtttttatgttgtgccaatgcattatatggctatattaatgaaccttaaaaaagagtacttaattagacggttgaatcaattactttgcaaaatggttcgaatatcttaagagttatacattaaagattgcttggttggagagaagaaatcatggaatggttgggctcaatcctgcacaattgacccgcttcatgccagctagtatctaacttacttaatgcactcacaagcgttcgcatagctgacctagcttcgtgttaagggcacatcgtaaagaactttatctattctggtgcaaagtttggttgtcatacagaagcaggatcttctatcagctaaagagtttctccaactagcttgtgcattggcaagtacttaaagctgcctccagttctgttatggtatacaatacattcatttttctcttttgatttcatttaggatttgtcaattaatgtcttcttttccataccatttaattaaggagtaataagatatctgatgggtccaaggaatggagtaataagctgagggaagccttacattacagtacattgattcacaagtgaaataaatgtggattgttattgtatattgtgtgcagagcttttcttccaaatgcatttgtttgcaaaagtatagagggaaggaccaaactcatcttccagggctagtgtggtggtgttgcagaagacacttgagtaatgtatatctgtctttgatatagcttatcaactctaatataatccttttctcatcgtgttgcttgtaaattgtatcaaagtctaggaagttttcacatacaacaacatatatgagaatcgtttaagatgtgatgactcagtttaactaataacttagttatattatattaacatatctagtcgtgttttacataaacttttgcttaactcaactcatcatcaatggtataagtagactgagaaaatgaatatgaagatagcttaataagctagtatctagtatctaccaatggctaaaggacctggagctggagtgttggagctcgtctgagggatcccagtcccgagtagaggaacgaatcttggacagtgtcatgagaacctcagtgattgcagggcgagaattaaggtctcgagccacacatgccttagccaactgagccatggtgaaggccaagtccaaggggtactcgcgcttcaatgcagcatccatgaactctcgaagcttctccctcacgttgtctccatccaacacatttcttatcacccattcggaaaccaactcctcccctttctcaccaccaccaccatcgcctgcagctgcaactgctctgccggataagatctctaatagaacgaccccatatgcgaaaacatcaagctttgaagtgactaagccgctctcaatgtactcgggtgccatgtagccctgtgttccaaccacatgtctggtcaagtggggttggttgtgttcctcctcatcattctccaccactcttgctaacccaaagtttgtaactttagctttcatggtctcatccaagacgatgttgctggtcttcaagttcttgtggatgtaaggagggttggcaaagttgtgtaagtagttgatagcatcagccacatcgtaagcaatctccactctttgcttccaagatagtgtattattgttgttgttgttgtgttgttgcagccaatcgctgagagagccattttgggcgtactcgtacaccaggtagctgttacctccgctcacacacagacccgacagcctgattatattcaagtggttaatgcgcttcaatatgttgatctcgccggagacgtcccctttcatcactttaatggcagcctcgtcaccgttgaagcttcccctgtaaacggaccctctgatcttgttcttttcactgaaaaagtcggtagctttttgcagctcttcaagcttgtaaatggttaaggaatccgccgccgaacgcagtgccccttgatttgaaacagtcgaccaagaagaggaagatgttcccggaacagtagagtaggaattggagcaaaccttcatagacggcggcaacgatgacgaaagctcctttggcttttgagtgttgctgtggtggcggcggcgacgttggatgaagaagaagaagaaggcgatggctgcaaagaagagtaaagcagctccaatggcagcacccacaacaatccatttgtttgaagaattgtgatttggagctattggaggttgcgccggaggtggaggtggaggcggtggtgaggctggttctgttagggaaggctcggtggtcagagggacgataaggggcgtaaatgggtatatgttatctgaggaagagaggcggtttgcatcgagcaaagactctgcttttacgccgaagcgagctgcaatggtggaatagctatcgtgccatgtgacgagataaagaagaaggtactttacagcagaggaggtctgggaacgagttgggcaagcacacctaagagggatctggagagtgagaccaacggagaggttaaagattccgactgagttctgggctataagagattgacaggtggtgagaccctggtaggtattgttggcaacgctaaagtaagtctcagagcgtaacttgagtatataggaggcgttatgttggtagtaagaggaatcatctccggcggtgcaagagcaattaacggggacgatgacgaggttgttggtggggatggtgtcgacatcggagatgttgttggctttggcgatgtggacggtgtctgagccgagaaggaaggcgatggaggatggagagttgtagggagggatggatcggaaggtgaggtaagagaggcaggtaggggagacgccgttgcagacgaagccgtcggtggtgttgaagtggttgtaacaatcgagttgtttgttgtttacgtagctttgctgggcttggttccattggatttggatttggaaaactacccatatcgtaaaaatcttcaatttcatcatgattttctccggcaatgtggcctcagtcagtctcacggcttataatccatcttctccggcaatgttaatgtaatgatataagtaaacacagagttttgactcccatcccaattcacgcgtctttgtttgactcccaaccccatttgcacgacacgcctgacgccttccaccatcaatatcttagtctaaaccacatgctttgacttctttccatctcttcttcttaatttattattattaaataatttgtgacttaattacataaataatacttattagttcttgacactaataatacgcattaaaaattatttttttaaattatataatacttggtactaattatattaaaaaggttatgataccgaagtaagtgttagatatcacatgtgttttttagcaactttatgagatttatgttatatttttaaaattttaataagtacctggccatggtaatgtgacctctatagaagttttaaatattaaatttaattatatatttgcaattgagagataaacttaaacatttgtgctgtaaattattttttttatttttattaagaatacaagatcatgcatttaaattgtattcaaactgagttacaaataggaggaggagcttcttccaaaaaaaagctcattatctagtcatagacatgctaagttaatttatgagacataattctgatttacataaaaaagagataccctaaaaattaatgcaacaactgtttaatgtgagaaaatatgtgatgctaaaaccaaccacaatgaatttcttgggtggtgtttgacactaatgacttaaaacgaagaatttgttgggtggtgtttgctttgcaaaaataaattggaatagaattagaattaggaatagtaaaatagtaatggaaaataattattttgtttggttacaactttgaaatggaaacaaaataactttggaattgactattttaaataaagattattatggtggcgtttggtaacacttttttaatgagttttttgtttttaaaagtagaaaagtgaaaatatttttcaaaaacatgttctataaaactgtatttacttt

SEQ ID NO: 15546 - DNA, 4911 bp, Cannabis sativa
aggtttcttaaactttatatgtatttatttatattgttttaaaaattaacatacatggtagtaaatctaaatcctggtaaaataattccaacaataacatcatttagcttcattggtatagtctcaataagcctcactgcttcatcgaggaagccagcacgactaaggagatcaaccatgcacccataatgctcaatacttggcttgattcccaaagtttgagtcatgaatttgaaaatatggcgaccatcttggactagtccaccatggctgcaagcacaaagcgcaccaatgaaattaatctcatcaggactttcttcactcattctcgagcttaacattgtccacaagacatggagagcttcttccccacggcccagttttgcaaaaccattgatgattgttgtccatgaaacagtttttctttttggcatctttttgaacacttcatatgcttcattgatcacaccacaactggcatacatgtgaataagagcattattcaaggaaaccaacaatggctagtttttcacacatgatgcttttctaatgtaccagtggatccatctccccaattccaaatcacctaacacaacacaagccgataatgctgacactagtgccacttggtccaactccatatgtgatctcctcatccattgaaacatagacaaagcttctctagatttcccattttgggcacaccccagccaccatggtcgtccatgagacaacatttctctccggcatttcatcgaaaactctcctttctctatcaatatcgtcacacttcacataacccttaagcaaggaattccagctcacaacattcctctcatgcatatcatcaaacactcggcgtgcattttcaacacgattaactccttcgccaaccgcataaaagttcaccaaatttgtttgaaccaatatattagagcagtacccatttgcgaaaactctcccgtgaacctgttccccttctctaaacattcccgacttcacacatgcattaagaagaaacgaatatgtatacccatccggcttaacttccgtctccaccattcaattgtataattcaactaattttctaggggttttacttcgaccatgtcctctgattatttggttccaaagagcagtgcttggcttcccaacattttcaaaaacacttaaggcaagctcaagataaccagaataaacatagtaaaatagtagcttaataataaggaaatttttttgggtaaacccattaacgagtaactgattatgaatctgtttaagttttctaatggagttacaactctcaagtagattgaatagattttgtggatgtgaatgactaaatactttggccatatcatttacttgaactaacatttgaatgctttggaaactcagtcaactatctcattgttgtatttgaaaaggtgaaagagtgaatagaaaagccatattcaacaaaaaaaaaaattaaataaataaaagcttcttttcttattcttattttatcgtggaacctcttaaaatcaattttctcttttctatttgtcggtggttgagtgaaaatccccaccaaaaaagtgggtatgggttaattttcactttcttatgtgaatgtgttatctagattgacaatgactttggaatttatttttctagtcatttggttggtcgtattgccatagatgatgagattcctaaataagtttccttgtgtccaaaaaatggaaataacaaacctatttgccttttatcatcttcctataacccagctccatactcaccttaaaccaccaaaagcaaaccaaaaactcaacagttatcttaaatccctgtatcccacaaaagttcttttattgtttaaagagctcttgagaaaaaacctctcaacaattgatagctattcttttttgtttattctcaaggcttgcacccaaaagtcttcctcaattgaaggaaaacagtttcattcccttgtcataaaatttgagtttgaacccaacattcatcttcaaacatctcttctcaatgtgtattcttcagcatgtaatcttgtggacgcacaccaagtatttgatgaaatgcaatcaaaaaatatagtatgctggacagtcttgatttctgcttatgttgataatgacaagcctaacaaggctcttcaactattcaggcagatgtagatggagaattttaaacccgatgaagttactgtaaccgttgctctctcggcatgtgctgatcttggagaactagaaactagagaatggattcaggcttgtgttcgtcaccaaaagggcttgtatacagatttatgcttgagaaattctctcatcaacgtgtatgcaaagtgtggggatgtcagagctgcacggagattgttcgacagcctccaagaaaaggatgtgacgacttggatgtccatgattgctggacacgcattacacgaacaagcaaatgaagctctcaatctctttacagagatgaaagaagcaagaaaatactctaaaagttctatgattgttcctaatgatgttactttcctaggagtcctaatgtcatgtagccatgccagtttggtagaacaaggaaagcatcattttagaagcatgatggaggattacggtttaaaaccaagagatccttactttggatgcatggtggaccttctttgtcgagccaatctcgtcaaagaagcatttgattttgtgtcaaagatgcccatctgcacaaatccggtggtttggaggacacttctaagtgcatgtggcatcgatggaaatgttgaacttggcacacaaattaggtaaatgttgatggaactggagcctgctcatgttggagatagtgtttctttgtccaatatttatgcaaccaaaggaatgtgggacaaaaaaatgagtgttagagaacaaataaagcagagaagggcacctggttgcagctctattgaggtgagtggaagtgggattagtgaatttgtggctacagatgatgatcatcctctaaggtctgaaatatacaaggtccttgagagtttggttgtgtgcatgaagggttcttatggatattctctcaagatttcatgcctagaagattgctagaaacattggggaaaatgggtgatgtaaagtaagaagtgttgtaaattttctttattcaaaagtaatacatagttcgataatgatcttaggtttttctctgcataaaaattggatgcaccagtagtagatttttggtctggttatggagactgcaacattcgaagatgaaagctttcttcaatgtattacccgcttattggtgtttggaattacttgggttctactttctttcttttctcttggtagttccaactttttccctttgtttttctcattattttcttaatagacatttaagtattttgtcattgatttgttgtgaatttttgatgattagaccatttgggttatgtgttttgctgaaatttctgatacccttataaaaggaaaattgccttgctatatatgagcaatttttttttcaattttctacattagaaggaagaactataagatgaattagctgagtaacaaatcacgttcatgagttgcttatggatttattagttataaggaaaataaaatctctttttccatgttcaaatgtattaaattattaattgtattgattaatcttttttttttttcatgatcttgaagttggagacatgacaaggagtctacctcaatgtggtcacacgtcagacatggttcttgccccatttgtaagctagatatcaaatgaaatgtataaaagccctagaggcctcaaaccggtaagactaatgtatgttttgtagtgattatctatatatataatgttgttgttagagatggtgatgtggcaagttaccatgttaggaacctaattttcttaatttttcctaatttctagctaaaaatatattatttgtgtattaatatttatttattttaaaaaaatactaatttattcaaattccatttttttcagtctctcctaacctaattgtcgcccatccttttcttctcttctcttccttatccttgcttcctctttcctattattctctcttctctatgatctaaggcttcaggtcaatttcaagtaaagatctttggcaaccaaagaccaagaagaagaagatgtttgccaaccccaagacaaagaaattgaagaagacgtttggcaaccaaagattgagaagaagaagaagaagagcacaatctttcgcatgaggaaaatcaagatgaccagatcaaacacccaacagaaaatagtgagaaacaaacacccaacagaaaatagtgagaaattataatctctatccccttttgtttttcccattttttattcttcatttggtgaaatgtgtgtttcttattgtctaatctctatttatgatttaattttaatttctatgtctgattttattttttggattttgattgtctgatttgtaattgtgatttaaatttcatttctacttgtctgattttgaaaatgtatatgttaaaataaataataatgaataaatggtagtattttgcttcttagagaagtatacagtttgccaataaaaaaaaataaacaatgagcaaacccgaacaaagaaaagaagaagaaaatgtatattacaggtctattcattaaaataatttaaaattagtattgacattaaaactgcataaaaattttatttattgaaattttcattgatatgtgattgtattaaaaatgttttggctttgttctaaaataaattttgggtttaacccctaaaatagtattttaatatttatatagattgtcataactttacctcttattattttataaaataattgtgaattagtaaatactgaattaatgctaatggaaatcaatatt

SEQ ID NO: 15547 - DNA, 2080 bp, Cannabis sativa
  modified_base (1226)..(1230): a, c, t, g, unknown or other
tggtaataaataaaagatttggacatctacataattattaatatttataacagttatctttttatacattttaaaattaataaattatgtttctaattttaatataattactttatttataatagcagacactaaaatattatattttaaattatatcactttaatataagtacaatatatataaaacaagattacaaaagttggaccaatctactcaaagcacggtttaattttctatttttaaataaaccaatggttataatttaattttctttaccgttgttctcttttttctagtgttttttatttttatataattaaattattaacttttttttataaaaaaagaaaaaaaaaagtagcagcagttgtatacaggtctcttctcgaccgggttctttctataagcatatggcatacgccacatgttttttttttttttttttcttttcaagtagtcaaaaagatattgcaaacttcatttgatcaacttttctgtgtttgtttaaagataggccacaggtgtagcttttcttttcatttgtattaaatatattaaataaacgtctttatttgacagattttatttaatatattacatgttaaaaacattagaaaaataatgtggtgattttttctaatgtgcgactattgactatattctatggttgatgaaaatccacatgtatataatgatataattaatcctagagcattcctatttttatttttcttctcctagcgcctccttgatgcgatttaataatattattaaacataaatatgaaaaattgaaaacaaaataattttttaaaaaaattgaaaacaaaataattgagcatttccaaaaatataaaatgactacttatataaattattttatcatttatattaaaaaaccgattttttatgaggctaattaaaatttttgtcactaaatattaacatgtatcaaattatgttaattaaattttttagccgtcaaaaatttgccttgaactattgaaattattagatttaaggactcttgtccaattttattcaattttactaatttagtgattgtccatgtactaaattatgctccccaactttgatatctaccaaattttttttatggtgatatctaccgaatcatgcccctcaaactttgacatgtagaaaattatgcctcttgaactttgattcatgttagactttacttactaaaattagacaaaagtcnnnnnatctaacaatcttaataatttagagagaatttttaacgaccttaaaagttcagggacatgattttatacatgtcaaagtttgaggataaaaatcttaattagccaatatattattatgatttaacgtataaaatttaacattttaattctttgaaaatgataacaattttattattgatgaataggttatacctcaaatacccaataggtacaacaacatacatgtagtattattgacggtacaatataagtatcctcattcccatagcataaaagtttatcggactcaacaattgtcacatggatgggctagtaaaatagtaaacacaaattaaccggacaaacatcacactccacacaaaaaggtagactagctacactcataacagtaacactcttattgaaaacataaataaacaatgaaacaacaaaataaaagaaaaaacacagcatatttgtgacccaaatctcaaacgcgggccacccccttcaatcttgaaaccctaccgtactgttgatgctgaaaagtagctcaacaatagattgttattaagacttttaattctttacaccaggttcgatcaagtcgaattacatagtcaatcggtttacacaatttttatctcaattcattcagtcagatctaggttttttgctctatgaattcaagtacaaatttgatggtatattccgatagagtttcagctagtttggtgtgataaaaaattctccatcccgtcttcgaatgatggggtcttctatttataggtgttagaaattttattacaatggaagaaaatgaagatgcattacaacactattgttataacaccctaactaacataggcgt

SEQ ID NO: 15548 - DNA, 1586 bp, Cannabis sativa
taattttatataaaatagatacatatagcttaaaaaaacacatttaataccatgtttaatacgtacgtttaatgtacttgttgagaaatgagaagtaattatacttaattcttaataataaaattaggtccaatgattaacacaaataattgggagtggtcgccttttgataatgacaaccaaccaatctatagaccgatttctggttagataggacaattattccataattacgcaaaaatatctcaagcctaaaaattcatgtaccaaactaaatgcacttagtaattaactaattaaagaggtatatttatttttatgcaacctcatgggtctctctccagttctggacctccaataaaagaaaataaatcaaagaagatgggtgaaagttcaatcattaaagagagactgaaaattgactcaaaaaaaagtaagagcaaagtgcaaatgtagctacctttttgggttttgataagtgacacctagaaaaagtctgccactaccattttcttcttttctttctctctctatctctctgacccaattttgatcatgttttcttgatgaggcaatgaaagacagcacctaaacaagttaaatggagtatgggtcatttacaaaacagctacaaagatatgactatggcattataattagctatagcatatagggtccctcatgggaaagttattattatggtttagttgattaaaaggtattttttttatatgggttatatttacataccccatttctagaacaatattattggactgaaccaaatcaataactccaaattgaattaaaaaaaaaaaaaaattactctatctcttatctaataagggaataaaacagtaaaatatcgaacactagttgccaattgccattagcacttcaagatttgcttttttctcagtatcataatatatacaagctagtatagtgtttgtattttgataaagagcatataaataaataaacaaataaaccctctagataaaattagtggccggcatgaatataatctagagttagagaaaatggttttatataatgaaaaataattaatgtaattacttacgagtgattggataagttgctcgtcgtacgtggacatataaatgccatgtgaattaattgattctctttcgtggaagtagctaaagaaatggagtgaaaataacagtagtactgtagtgcatagagaaaataaagttggatatgtatgtaagtgttatcgttcgtttatatatttatatggattacaaattaaaaggactagtattacaactcacatatttgtgcttttgaagatcatgtggaaaagttttttagttttttattcaataaaagagaagttcaagatcaatatggatagtcaccctcaaattcctgtaccctgcacatggcagtgtttttcattaatactttctattaattactttattcaaatatttcatgttcttgttcaaatatgtcggacaaattttcttcgattaattttttccacgttcaaataattaaacagatcacggaatgctagttctattaaagggtgcaagaattttgtaaaaaataaaaac

SEQ ID NO: 15549 - DNA, 7009 bp, Cannabis sativa
  modified_base (6961)..(6981): a, c, t, g, unknown or other
gtaaggaatgctcaacagacaggtcattcccttgcttatatagcatcttatatcctaatgaagttcgatcaccatagggcttctgaagctgtagggtttgattgatctcatcattctaatcatttatagaatgatcatgatcatctatgccaggagacacttcatgcgtacttgaggtgtgttctctatcagtttgaggagcagtccggtattcagtttgagtttaggaagctatttatgccacattgataaaggtagactagtagggaacttgaacctaaaccagtttttcatattgataggttttgaggaaactatttttgaaagggaactctgactcattgaatatgatattttttagtatatacaatctcccaatacttcttagacacctatatcctttgtgactgtcactgtagtcttgattaacacattttgggaatgatactgaaatttatgtgtttagtaaggtattatgtatgggtagtaggccactccaaaagttttgagaaacttataatcatgcattttagagtaaatggtttcaaagggagacacattgttcaatgtagtgttggaagtttgcttataaagtaaataatagtttggaaagcatcacaccaaactttaaaaggcattcttgcttgagtaagtaaagtcaatcccatttctacaatatgcatatgttttctctctgttcttccactttgtctagaggtatgaggacatggatgctgaaaacctatcccattttgagtaactattggtgaaggcttgatattcacttccccaatctgtttgaattcttttaatcttcctatcaaattgattttcaaccaaggctttgaattgtttgaatgcttctagattgtcatttttagcttttaaagggtagagccatgtgtatctactataatcatctataacattaatatagaatcaaaaatttaagtttgacattattaggttcagaatgtcaatatgaatgagttcaagaggaaattgagtttttttattctttggtctaaaaggaaaggaatgaaactttccaaattgacaagcttcataaaattgggattcatcattttgaaaattcctcacatttaattgttttaacatttgactcaatgataagtcaatatttatcttgtttatatgactatttttttcttttgatgaatcagcaagattatcattactccaaaacaaccaattacaacttaacagcatctctaacgagacttgaaaaataatctatacgtcaacaaatatgcatatgtgtatttctttccaacttctcaaaccatgacctatttttgtcactaacttttttaggccaaataattttatttctatacaaaatatctatttttgttttactcactatttgatcaacttgcacactttttccttcccaaagaactccattttgggcttaccaaatgttgtatactaaagttgcaactgcagcagcataaactcttttcttgaaaccatttgctttgtgtcgttgcagccatcttacgatctgttgaagcgaaccagaacagatttgccagtgcagcctagtttttagctgctgccaacatcctgctgctatattgcagtagaaaaaaagatgttccagctcctctttgtcattcctgcatagcaaacaatcatcatctagtatgacattaatcttacatagtctttcacttgtttttagcttattttggacagctagccacaagaaaaaactatgtcggggtatgttcaatctactccaaacaatcgaggcccaatgctttctttctccttcatttttgatcaagttgtaggccttcgatatttaaaaactttgctctgtcatcagttgctggaagtcagcagagaacttcagcttctccttggttgccactatcttcttccagtaccaactggcctgaagtggagcttgatagctccaccaattctcatattttaagtacacattgtgcacccatttaatccacaaattgtcttctttgttcgctatcgcccaaatatattttgtcattgctgccaaattccattcttccacctttctaaaatcgattcctcctattgtcttggattggcaaaccgattcccaagccaccaaaccagccccttgtgatgtgctttgacccttccatagataagccctatagatggcctctatcttccttagtattttcttaggcaaaatcatgatttggctccaatatgagtgaatagctagtaaaactgaattaattaaaactctaccagcatatgagatgttccttgagctccaaactctgattttagcagtcatcttttccaccaatatttctcactccttgcttgagatcctcttagcacatatatggatgcctaggtatttgaatggagcttcttgcctacaaaagcctgatatgtccaccactctttgaatttccccatcttccatgccacagcaataaatagttgattttgaaggacttggttccaacccagaggagcaagagaacaattttaaagcttgcaatagacagtagatacttctgaaatctccatgacaaaataaaatcacatcatctgcaaaacaaagatggttaagtttaagatctttacatctctcaaagtatttgaactcctccttttcctctgcttttttcagtattcgagataagtattccatgccaagcacaaaaagcaaaggcgagataggatctccttgccttaatcccttgctagcctcaaagtagccattcatagtcccattaaacatcagggagtatctaggagttcgtacacaattcatgatcaactttataaacttgtggggaaacttagacgcatgcacaatttcctccaggtaatcccaattcagtatatcgtaagccttctaaatgtcaagtttaatcacacatcctagtttggtagctaatatgactaattttatgtattagtattatcaaaatgattctttaaattattgattagtgtaattttaattttttaggatattttgaagactaatcatggatttggaatcatttggagagattttaacatattttggtagaaaaatagcaaaagtcaaagagctctatttaacaaatctaaacgccattgcacattttgacgactttaaaggaagaattgggcttcaacctaaacataaaagttgtatatctcattctcagctttctgaaacatcttgaatcgtccaattctaagttgtattgaatgagttatggccaaaattttgatctgagcacacgacacaaattacccatccaattctgccccgacgccacttaagcactactggggcagccaaaggtcatacaatgtctgtatagtttacaaaaaattaagtttttagttaaatttagggttatataaatagggcatttagacttcattttgagggactttagattgcgtttttgagagagaaactcaaagaaagaggagaagaggaagattacatcaccaattgttcaataatatagttcttttcttctccctagtctctttaatctttagttatgattttgattatgatgatcagtatggagtagtttagttttagttaagggttattttaaaatcttaaaacatgaattcttgattagtgacaataaatgttgttcttgatttatcttatattaagtgtttttatttttctaatttaatgttatgaatattgtgaattcttgttagttatacaactaattaaggttttacattattctattatcatttagaattacttctcacttaaaagtttagaattctaagtagaatgataattttccattaatagtagtgtcaaaggtattattgattgttatgaaaagtagaacctaggttaaatgaattatatgcttcattaatttgttccttagattaacttatctccatagaaattaatgattttcctatgctaaatagactgcatgcttcatggatctattgctcagtaaaaagattcaataattgagcattttgccttgattaattgtaataggaagattaaaaaaattgactgctctagcatttttttgcgggattaatagtttaattgagagatcaaaataatgtttattattaatgctcttgaatgattgttgagggtggagattaactcttaactgtttcttaatagaaaaatatttatctttattttctttccagtttatcttatttaatttttcattccaaatctaaaatccccattttatttcttagttctaatcttgaataataaattgatacctattcctcgtgagatcgacctctatttatcactatactgatatagttaaaaattgagaaaatgtttagtaaatttggtacggcttacaacatgcatcacttaatacaagattagataaatggcctaacctcctatgccatatttccttgattgaaattaatctagacacattctcagtggtgttataagttacatttaagctaaacacaaaagtaagagcaacaaactgactaaacttagatagaacaacagagcgagtaaaagaacaatgatgaatttgattgtgtggcttaggataggtagattctaactgatatagcccctccttaagtgtcccttaaagaaacatcttctttgttgttttatccttcacacaaaaattattagatgagaattcaactacaagattgttatcattaatttaagtttgaaatacttattaaattctttgttatttcaagcgcatgtaagatttttttttcaaaattagaggttctctaaaattaattaaaatttcactagaactaacatggtgaataaagagtttgttacccttttcaacagtcaaatctccttacactgtattttttcttctaattcatgtttcctgtctcaaatgtgacatggttgttagctccactatcagcatagcatgcatcatcttccaccattttttgagtggctataaaggttgctatagaattctgtacttatcaaattaaaaaccaagtggagcagatcccatataggctttatcatagtggttgtagcaatacggtgctgaatgaccatacctcttgcaaatctaacatgtggattttaagcctttaaatctacttcctctacctcgaataccactagatctacctcaattatcattattttagcctcctctacctttggactagaatttccactagaaccaccttcgttagcaagatttacagtaggaaaaactaagctattagacaactttctgttattggagagagcagttagcctgtcaatcttgctatcgaaactaagaagaaaatcttacagctctttccaggtagtgtaggctcttgcttcaatttgacagacaatagtggatattccatgtctaggccaaaattcacatttgtgaccaagagtagttcagaataaggttctccatcgagtgctaagacattagcccacttgcgtttattgcctaagatagtctttcatgctttgttcatccttttctcatagtctggatctcttattcgtatactcatccatcttagctttggagcgagcaccatagaaagcatgaattgcacagcatatctctgcataagatgaacaactcatcacctctgtggaaatactttctatcatggatccatataaccatccaatgagtacctagtcatgaacaatccattgctcaacatccacattcacttcaaaaccaaaccctagtttttcatcgacattgggtactagtattagttaatatggtttgactctagtgtctgtcaaataaccatcaagaagatgtcctttaacaatggctctcaccattgttttccacggtgtaaaattactcctatccagattgagagcaaatgttgatttagagtgctcccaaactgtggaataacaacattagaggtagacgctccacgcaccttgtgtggttgaagatcgattagcgatattgctacaatcttatgctggagttgagctatttctcaaagggaatgtctgatcgccaatcgacatggtgcagacaatggctcgaataccaacttaaaatatacgagagaaacggtaattgatgaaatcaactcaattatagcttgtgcactgagattttcatttaaaccaaatggtagaagatacaaagctttttagaggggacatctcaccgagatacttggaatgcacaaactataagggaatatttttcctaacacttataagagaaaggaaaaagaaataattacctaattatgacacctttcctttaaacataattaggttaatacaaatagtaaatgttacatactagtaataggtaatacatcattttgtaacaaggtttgtgtttgtattttcgaccttggtgaatgatgatggattgtgtgattcgaataatcagggttttgattgtctttgtttaggtttagctttattcagctaaccttgctgttgtttctatgttttgtttagtgttgtaggtccctgtacttttgttgaacaatgattcaagaactttggcctatgttacttttggtatgatgcaagttttgttaatatacttctggtgatatgaacatttttatattagggttggtttgtatttatttatattattgttttcttgtaaaatttgtaagtatacctcactaaatttgattctattttaatcttaaaaatattgtatgtgattttcaacatcaaatttcaaaatttgagattttttactctagtaaattttaaaataatctctttcagcctatatgttataacaaggcaatattgcatactacaaactgcaattcaaatcttattttaataactaaaaagttaatgaatacatcaagaaataatataaagttaacgtgtgatatagaagcttcaagtttttttttaaaaaaaaaacaaaatgaagccgatcaataaattaggaattttctcctccaaattttgacatgtaccaannnnnnnnnnnnnnnnnnnnnaggtcgttaaaaatgccccctaaactat

SEQ ID NO: 15550 - DNA, 4379 bp, Cannabis sativa
ataataataataataataaagtaccgggagaaaataatcgtttaattaataactaaattaacatttactttaattaaattatagatcaaaagaaattgaccaattcatagatggagagttctaagttaattaaacgtaatatataacttcatgtcgatatatgatgtatattatatattgatctacgatatgatatggatacttaataaagcatggtattattatttattatataaaatgtaattggaaagagattaattatgtacatacttggaccgtacaaatagatatatgatgatcaacatatatatacaaaattttaattagtattacccggtaattaacctatatatatatatattaattattagcatgaaatagagtacgaataatttaataataatatatatattactttgagtactagtggagattattcgtactcatgttgccagaattattgttttgcgaaattgaaaaagagtatatgtatgtatatatattgttcaatatatatcaataatttaatgtctataatgttgacatgattggttggtatgtagtgtagtttagtggaattattatatatatatatattaataattattgtttttttgcttaactatacaaatatagtacatagtcatgaaagggttgctaagcaacgcaagcatgtgggtttgccaatttggaatttgattgctacctatagctagatatgaatgaattaattttttagaattatatatatacatgctactttatataatcctaagcaatattattatttcttaattatatttggtttattgatgctctttattggtggccccatcgaggccggtgcatggggttggcacactactcccccaaaatatatttcttttaacaaaaattacattaatattttatttttattttttaattttactgatgaattaataattaaatgttaacatggcaaactcacttccataaaaattagaaacaatatatgatgtcttgcattgtattgcattgacttttctttttcacttttaattgctttcccatataataataatggtatgatgaggttataggttcaatgcaaaataaagagttaatattatatagtgaacttttgtatataacgaaacgacgaatgtagcattatttataattaggtcaaacatgtacatatatatatacatataatataagctatgacgtgttcaattattcatataaatatctttgttttcgctctcttttatttacaacacagtgctacttctatatctaatcctagctacttcaacctctcctctctgccgatcatcatatatctttcttctttttttcttcttataattaatgtttctttcatataatttaatttgtttgcgtattgttttttgaatattaattctggatctctctatgttttgtagcatcatcacgtaatcacacctttaaaaaaatcatttcaagcatgtaaatttgttcaatctccccatatatatttttctcctccataaaaaaaatctccatttatctgaaattatatcctttcattgatcaattgtatatatagccttataattaaggctggctaagtactcccttattccttaaaaacacttttataaaaaaccttcaaatcatgtaaatttcaatcctatatagtattcctgtatcaccgcatacacaaccaaaaaaaaaaaaaaaaaattagttatcgaatatatatcatgtaatttcaaagcaattagatcatcgagcttaattatcttcaattatcattgtttgttatatatatataaaaaaaaaaaagaaaaaagaaaaagaagaagaagagatatatattatctatggcggaagcagagggagataataatgggagggtgtcggcacctgcaacgccggggacgcctactccgctattttcatcatctgcgcgagtggactcactctcttatgatcggaagtcaatgccacgttgcaaatgcttgcccgtgactgtcaatgctccttcctgggcccattctcacaactgcttcaccgattttaccgcttcttctgacatctctcttgctcgcaaggtactctctctccctctctctcatttcaagattatttgtaataataattagtcatctcatttaatttactaattaattaattactcatcaatcaatcaatattttaaatttttaatattaccgccatagctagctagttgagtttagattcattcttctttctaatattttaataactatattcatcgatatccatggatctatacataacatattccctacatattatttgtttaattaattatttcaaatataaaattcaatgatccatcatgtattaatatattggctttgttaattaacaaaatgacaatgttatgcttataaacattaatgacaatgttatgttattatatagtgaaatgcggggtaaattaaagccaaacaccacaactgttattatttaagattggattttacacattttgatttaataaattatataaaaaattgctaactattcacaatacactatattagtgtaatgttgggcatcataaagtacctaaggtcaactccaatgggtattgttcatatagttgcccaacaaatagtgagtcatattgtataatgtgacaagagaggaaaaaagagataataaaaagattttaaaatgggcaccattgaacctttatatttttaattaaaaaaattgtgattaactaatacaatcaaaatgtgtcaaattcggaaactattatattatattaagttatgaatttttaaataatattttaacaatataatccatagctaacttgtttgcatatataggttgaaatttggaatatatatacttaaccagtaggtacgtagttgatcagctggaagtttagatgatattattattgaatttatatatagaaataatggatattcattataataaagaaattaataataattaagggcagataggagcagagttcgtgggaactttcatactgatattcggggcaacagcagggccgatagtgaatgagaagtacaacggagcagagacactgatagggaacgccgcatgtgcggggctggctgtgatgatagtcattctctcgacaggacacatctcaggggcacacctcaatccatctctcaccattgcattcgctgcactgcgtcatttcccatggactcaggtccctgcctacgtcgcagcccaggtctccgcttccatctgtgcctcctacgctctcaaaggagctttccacccctttatgagcggtggagtcactgttccttctgtcagccacggccaggccttcgctctcgagtttatcatcactttcaatctcttgtttgtggtcactgctgtggctactgacactcgtgccgtgggagagttggctgggatagcagttggtgccactgtcatgctcaacattcttatagcagggtacctagctaaatactataattaatattaacaattatatatatatgtgtgtgtgtgtcatgacttattaataatttacatatacgtacatatatatggtatatataggccatcgagtggtgcatcgatgaatccagtgagaacacttggtccggcagttgcagctggaaattacaaggctttgtggatatactttgtggcaccgactctaggggcacttgttggggctggaacctacacagccgtaaaactcccagaaactagcgctgagttagcagcacgtcaagtcagaagcttccgtcgctaattatatgtattcatttgtatgaaacacttttcattgtccagtttctatcgtgatcgtgtgtgtgtgtgtttttaagtcatatgataaatatatgacaagatatcacttttatatatataatttgcatatatatatatatgtgtgtgtgtataataatgggcgcatgagaaatagctaggtctcgaatctaagctctccacgctcttcactcttgttctgtttggtaattaatttgtactttactttcttgtaaattgcatgtaatgggtgcaatatatactaagggccggtgccactgccaattaaataataacaataaaggtatataatttgtgacaaaaataaatggttatatatgttatgtatttggtttattttataatgtgtagaagtatattatggatagtgtataggtatagtatatgatgatcatgatattatatatataggaacttgatttgtttgatgggagtcaggaaagagtatatatataatgtgtatggttaattatatggaagatggaggagactatatagttgtatagtaatagtctaaaagacttggtttggtaatattgtaaccactgtacaac

SEQ ID NO: 15551 - DNA, 11047 bp, Cannabis sativa
ggaaacttcaaaataaagctctataagtaacctatttgtcttgcattagttttgttgaggtaatatacagaagttgatttaccaaaagaacaatacatgtccaaataaattttttgaatataattttgtaaaaaaaaaatctattaaaagtactatccaaagaaactatctaatttttctcactatattacagttttgtcaatcatttttgtatgttactaaagtacataattagacgcttaaattaatattagacatgtttggagaaaaagatttgatatactaaattaattgattatattcagaaatataacaaaaatattacaataaaatttatttatttgtaggtatttcttttctcaatcgcaatcatccaataccaaaaaaaaaaattgttttattatgctatattgaatgattatgagttacaatatttttggtaaaataaaaaagaaaaaaaaaacaagacaaaacaaaacaaaatagaattttaagtaaaatgaaacaaatggttgaaaatttgcttggcaaaatagagttttgattaatggaaactcctgaaaagtaaaaaaaaatctaacaaattaaatacctttatccattaatacagaaataaaaataaattttcaacttctactcctttgtttgccgctactgcgagagctagtgttgcatttgttgaaaggatgtacttgacgatgaccccacatatatagtaatgaaaaaattgtcaacttcaaatgaatatatataatattatttaaatatattaaaataaaattaaaattaaaattactaacttaattaaatagatttcattattaaaaatattcatatcattttgtataaacataccttataattgttaaaactatttttcagtatgatttctattaaaattcaacattattaaaaatatatatttttaattattccatttagtttctttattttttgttaaaaacataatttataatcatttagcttacaaattgagaatttacttttacatcctttctgttgacgcggtttttcttcaagtggtcgaagaagaatgtaaatgagcaacttgttctaaagacttcaatggttttaaaaaagaaactgatttgaagaatttataacaataattatgaagggattttatagtggttcacctatttttagtggtaacagactactccacttagtatttttattgttttcaatgcttaggaatagtgccagagttatgttcctgaggcgactattcttgagtgattacaataagtaaggattctctctttagggtttttaagtctgactgagagtttaatgacttgaatcgaatccctttgcacgcttaggttaaggctttctatagtactaaagtctgacatgtcactctcttatatttaggaaaatctttacattataattttgatttgagtttagataatagtatattttgtactttacatttaaataataataaatataatacataaaatataagaatctcttgatacgcggagtttgctatcatttgaaatgttttagaagcctcaaattcttaagaaatgtattacatctgtttgataaggtccgaactctagaaggtactcacatactcgaacaaagccatagatcctaccatgttcgagtatatcaattatttatccttgagaaattaccgtgaacctctaaaaaaattttggttcttaacatacaaaaatacgggcatatgcttcaccctattcacatgcttcatcaaatactccccaccaaggaccttgatgatgctttgatctaatcctcgagacatggtccaagtttggatggccatgagattctaaatttaccagaaactctaatccccattgatctatacgagcaaagacatgtctctagccttactcatgtactaagatgtaggcattcttcttttgtcttcatgtcacacgagcaaggaaatattattgccttggctcgtgtcccttgtcatttatgtgtcacatgagcaaggaaatcttggtgtcttggctcatgtaagttagcatttatcctcatggttacatgagcaagggtaagttttgtgccttgactcatgtgaataagctctttactccatttccttaaatgagcaaagataaattagtaccttggctcgtgtaccttggtgtacctagagtttgacactcgatcaaggtcaaagaaattgccttgttcaagattcctccttatgtttctttaataaggcacaagcaagggcatgcatagggcttggcttgtgtatggcctatataatttccttaatgtattcaatcaagagtacctcagtttcttttttgggttgaacacttgttttgacattggtaatgtcattcttcatgtcatgatattccaaccatgtagggtttggcacctttgtggaattctttcttggtttatgaatcctaccacatgagcaaggtcatgatgttttaccttatttgtggtcagtgttattagggctctcaaatggttgtcatgaacaacggatttgagtcaactccgttcgaggtcatggaaaaggttcccttaggcgaaccctaggtttacacgagcaaggacctatttgaccatgctcgtgcattccttcttaacatgccacgtggaactcaaacaaagtgtcacttgacacactattcgagtttggcctctgtttcatcttttgtcttggtcaaagttttatcattgacttttacgattttgtaaaaaaatcggatacaacatctacctccaaaagtgtttgtcgtaaacattaaagaaagacttttgcagttttcctgcctccatcttgaccaaatcatgggcgctatgttcatcactcagaatagttctccaagtacccatgtaaattcaagtttgagtcagatacttacgagacaagaatttaatctgtttttcacattttatgtatttacagatttgcaacgcatttttgcatttttatttactaaggaaatatttcttgtaaatcaagaaatttaatttgaatttattaattatatttcaagaatattatacttgtttataataaattaacttattttcatgagacaaattcttattctttcacataattaattttcaagccattgtttttaatgaataggaatttgagcatgtggggacttaatcatcttaacctacttaccaatacatttttcatagattttccggctgctaaaccctctcaattattattttacttttacttaatcctctgaacttaaacttttgctgtaaaactctccaaactaataaaccattagcaaattcaaaggtatcatctacttacctaattaaatgctaacatggattgtttatgtgcatacttttatacatgtgaccatttatattggtaccctaatataattattttaaaattcactctaaaattaaaaaaataatttactgttattataaataattaaaaaaataaagatattttcattaattaaataaaaaataaaaaataaagatgaacaaatcattttcttcgtgaaaacccattccctccaaaaacaaattttagatctagaatggtgcaacccatgctggtttctcaacatagaaatcaatggaatgtcgcaactcaaagtctagcccaatgaagaggtggtggagcctctaactttggatctgtttgatcttctcgatcgcgaataatggtggctaggtcaaagtcgatttgggttggttttgacgaaaatggcttcacggcaagaatggtgcttaagtcgtggtcactgatcatattttttagatttcatatcctaaacattttttcgatctactccagcaagatgccaccaatatcgaatggttaatgtgcttgtttagtgactctcaggtgctctgttggctaaggggaagcttcagatggtgccgaagaaggtaaagtggctatggagtttgaatgcaataaggttgcttcaaattttctgagaatttatttttgcagggaatgggttttcatgaagaagatgattcaattatttttattttttttatattttttatttaattaaagaaaatatctttattgtttagttttttttttttaattttcttaataatgctaaattatgttttaattttagtgtgaattttaaaataattatattacatgtaccgatataaatgtgtcacgtgtataaaattgtacacataagcaatctatgttgacatttagctttgcattaaaaaatgttggcatttaactagatgattggatgatgccttaaatgtgctaagagtttagtagttgggagggttttactactaaaatttgagttcataaggcttaagtgcaagtaaaatgataattaagacaatttaaccgccaaaaactctttttaatacgtggtaaataggttttggtggtaaaaatttaaatttttgatttgagagataatttccccccacaaattctttaggcaataccttacttctttggattatacgctcaggcccaaagggattttctcttttcctatttaagtcattctcctttgcatatttcaaatcttttacaaaccactccacaactcaccatagttgcgaccttacaaaacctctctccttcatcatttagaccctcatcaagattaaagacaataaaatctcttccactctcattaacctagacgaccagaggtaaatcttatttcctcatctccattttcttttccttatttctagggtttagcaattgaaaagtttctttttttcctttctttgttctagtcgagagcttcaaaagatcaaggggaaccttgtcctcaatctttgtcatcatttcccaagttacaatgtaaatctttaatatcttttcaattggcaatttactcttcatgccatgggatgttcttgatagtagggattgaattttcctgaaactttttgtggttgaacccttggaaaatagaacttgatttggaattgttgaaatttgaatataattgagcttgtaaatttcctttgtgaccgagataatggtggtgactggatttggaaatttttttaatggttttttatgtggatttagattgtatttgggatttatattaatgaaaatttttgaatttctccatacatggtcgtgacccaaggtagggttttagagcttagtttgtgtttatttgaccatgtgaatatttaaataactatgatagtcttgaatttttcttggataatcttggcacagatgaataatttgatatttttaaatcttgagctttgttgatgaacttctcataatggctatggtattacaacttcaagtcttgaaattgttgtgaaatgttagttcttaaaccaagaaatcaactttgaattggaactttttccttgaattttcctggtgatgttatggcacatttaagcttggactaacatatttttttttatttttgtgtagagtcgagtcaagtcttgttggagccttaccatccatcttccttgttcctattctactttttctgaggtaaaactctagactcattttttaattaatagccaagcacagtgaacaggtaccttgagatttttttcttctctagttcatcttctcatgctcacagaaattattttgatgattatagtgccagatgtttgccttgaacccatcgattaaagtcgtgcaatggtttagtttttataagacattcacctagtgcaacaaactcttcgcttcttgcttcacaaatgtcattttagggtgtatggtctttttaaaaccgacaagaaaaccaaggacacttaccttgacgaggtggaaaactggaaaagtataatcgagccagtccatcttatctgaccaccgccaactaagcttgaagacaccttgaactctcccaattaatatctatgtaatgacacactgagtgtgtgacctctaatttggaaggaaaagtgtgcgacttatatactaggttctctagtggagggtggtcccctacttaactttctagtgaactcactctttttaccaataaagaactgggagttgagttgttgctttatacgagagtagacaaaaaagtccataggtggagaggagaggccttgattgcaagtagtccaacttttaaagtcttatatgtgtctagattagacaaatatggctccaatttctagtctaagaaagataactccatgttacttccctttcgtcgagagagtgataattccatgttacttccctttgatcgagagagcgtaacattaggagaaggtcttccttttttttctataggttatgatttaatactttgctcatattgtattcatcttgctcaaagcttgcttgaatgatttggttccttaatgcttacatcttttgcctttgacacacattttaataacttacatgctttcctctttttttaggtaatatgaatcaaatgcatatcaactttgaagcaaaagaaacaaaaaacttcttctaagactttgatgtctttgccttctttgaatggtggatctacatcgaaagtggctcccaacattgctatcacaccacctactcttgtgatggtgactctgaaggtagaccctactcctcttctactttggttatggtctttactcaaattgcttttgtgccacagtctctggcaccaccacaacctttgccctcaaaaggcttggtaaccccttcgataacgatgactttatcttcttccatgatagctccaccattcgagcagtcaaggatcacccattagatgtcactacaaagaggtggaacttccccttgccaacttgatggatttaatcattcgaagggttaaagtaatgaactcactcagtactagcctcatccacatgaatgcagctatctagtaggaacttgctggtgactctcatatgcctaataaactcatacaaaggtgtgtggacatctaagccaaagtagatttttttcttccaaatgttcattacaactatcatttttgctttgcatattaacatttcttctttctttggtaggcagtcacggaaaatgtcgagctcgtttgaaaatagagcggtactcacaatttctttctcacaaagtccatccaacttgagaaagaaaaggagaagtttgttatgctttgtaatgctgaggccatgaaagtgaaagagttggaaggatagttgacctcacttaccaacatctatcaataatctaaaggaaaatttaaagaagccaagggcaagttaaaggcagttgaggaggctaacgacttgaaggttaatattttgaggaaaaggtcgaattgtggaatccaatgaataagagtctctcgatgcttgtcaaattgtagttgaggtcatataaaagacatcacaggaagagcttgaagcttctaaggaacaatgcgaggtagacacaaaagctgccctagctcaccttgagaggctttgtgagcacattgtcttcttgatggtctctgagtgttggctccaacacaagactatgaactttgagtttttagagacaaggaacttgaggtagtagcgtacattgagcgggccgaggtggaaaggtctcacaccaatgatacggtaattgacatggagatcgaggaagctagcaaggggccacttcttatgtggtttcatcttcttgagttgatgggtatcttcttgacttttagtacaacttatttaattttttaattgtatttatttatcactttattgttgtcctttagtgcttgagcaattttgctaatttgttgtgactttgaggattcctagtagtccttgtaatattttctttttactcatatgtttggtttgggcttttattttatttttgagaatgctcggcctcttttgtcttggttagtgtctggccaaggattgatttgcccaaggtcttttgttgttttagttaaacaacttttgactcatttatctatacaactctggaaatccaagtaattaacctaaggtggcgtttagaaatacttttgttttttttaattttttaatcacaaaaattaaagtagaatttttgtttttaaaattatgtttttcaaaattttatttttaaaaaacaaaaatgcattctgtaatcacttttattttttgattataaaaacataatacaaaagggtattctgtaacgtttatttttatttttaattttttatttgaattaaatcccattcgggtctgagtttgggggttggggtctggtgtcgggttcaggtcggggtttgcggtctaggtctgggggctgcattttgggtcccgttttgggtttaaagtcaaggttggggttcggggctgaatccgggttcgggtttcgtgcttgggtttgagtttgaggctaggtttggggttgtggtatggggctaggtttgacgttcggggtctggtgtccgaggttgggatttgggtccgggtctagggtttgggcccgaaatctgggttcaggtttgacatttgggttaggggctgggttcaagttcagggttagggttgggttcagggttggggctaggttcgatgtttgggtttggggccagggtaagggttcggggttcgattccaagtcccagtcttagggacttgggtctaagtttagtcggagtccaaaatattgatttaaaaaaaaattattttaaatttttttgaaagtgacatttttttgattttcaaaatttttaaaattttgactctcaatgaaaaaattaaaacataaaaatagatttatagtaagctaaaactagtaagtgaaagtttggtctagtaaaaatgaaatttgagagaaagtttactagataagcacctatcatgtcaaatcttgtcgaatcgtatagttccagttatgcatgttacaaattttcaaaaaacattcacaattttcaaaggaactattatctacaatagttataaaatttacggcaagtgtagttaaatgtttataccttataccccaagttataaaactttaagttatttttgtaacttgtttagttgggtttggtagtaacaaatattagacaatattaagtttaaaatattgaaaaacttaaaattaataattgttcttaaaagaaaactagtcatacctatgctaagagcaccaacaagggtaatgccattgatgttgtttgtcagattggtaggcccatatatagtagaaaaatagtaaacaatatagcttaactttatttttaatttattcctttttaattgattggttaatttaatttaaaaaattaataaaagattatgtgagatcaagaagtcaacatttattgttgcctgcgttaatgatgccctaatagtacttaacaaaacatgataattgttccagaaataaaaaccaaatcattaaaatgacaaattattaaaaataaaaagtgatggagaaatcctccaactagattggctttccacaagttcactgtcaacttctttctttgattcctcttccttgataccactgacaacccttggttctttctacatgccactacactccccctttaatttgggaagtttacacatctaggacggattgtggatgatattggtatgaatgttctcaattctgtctaagcactccaaccaatgggtcacgagtagaaaagaaaacccttctttgtataagttctcccatttcaaactccctattttgaactttggagtcataatatttttttgacacattgtttgtatgctacactgcaaatttatgattcttctcttctctcatcaagcatgcctaaaacttcttatactagtaagtggttttgattttgctcgtaatactatatttgatgagaggtgatattgatttcaataagaatcgtcgtctcgctaccaaaggtgagtcaaaagggagtgttcctagtcatagttcgatgagttgtgcaatagggccaaagtacttggggaagctctttaggccatcttcctttcacttcttcaagtatctttgtaagaaaatttcaaagtcttgttcacaacttctacttgtccatttgcttaaggttgagcggctgaagtaaaactcttggtaattccatctttctcataaaatttggtgaggatgtcactatcaaactaatgctaattttagcggtattctatagcaacatataatgttcttcactataaagtctaaaattttctttgactctattgtcgccaaaggttttccttagtccatttagtgaagtaattgactacgaacacgacatagtttacacccccatttcctggaggtaaggacccaactagatatattccccatattgcgaaggaccaaggggatgtcattatagtcaactctactggaggtgtgcgtggaattaggagaagtactaacacttgtcacacctttgtatgtattagagggagttcttttttatagtagggtaataatatctttgttgaattaattttttataaggctttgtctttcagcatggttgctacaaaatcccttgcgaatttctttaagtatgtcttatgattcctttgtagtcacgcacttaaataaggacatggaataacctctcctataccaccttccatcgagcaagctaaaccttcgcaccttgtatagtagtttgtgagcctatttttgtcatttggaaagatctcataagtgagctactcatttatagatgccatccacaagtctattggaacatagtcttgagcttctttgggagtgatactttgcttaggtaggtattccactggcaccacgtttagcatttcaacctcttttattgttgccaataatacaattgcatcatcaatggagttaaactttgcatgtcctttctttgtggtgatgaaattttggggagggctttaattttctcaaggtttgcttcgataccccttgaattaactataaagcccaagaacattctagatgaaataacaaagaaacaatttaaaggtttgggttttatgttgtattgttttagcaaagtgaaacatatttccaaatccttaacgtggtctcaagcttgatttgatttcaccaacatgtcgtcta

SEQ ID NO: 15552 - DNA, 6741 bp, Cannabis sativa
caaacaatataatttaaccaacattaatttaaataaatattatcatgtacaactaaatataattataaatttttagaattatattttccactttaatattccaattaatcaaattattaaaatggcacctatgaataacactacttaattgtttttttggttgaaaaaacactacttattgtttaacacaaaataaacaaaaacaaattcctaacgtttaccgttattttttttttaaatttgttttaaattaatttagaccagtaaaatatttattttataagatcggttttagtgttatttggatagagggtaatattgtcaatcaaataagtacatagaaaccgttaaaagatgttggtttaaatttggttggtaccaaaattccgaaatttaaatgccatataaataaatatatattaaatccaatttaatataaaattcaaattttaaaatccaattttcttttgattctgtcactgtgaattgtgaaatgttaaaaagaaaaagaaaaaagaaaaaagaaaaaagaaaaaaaaaagctgcttcttcctcacacgccttagattttctttcattttccctcctcactttctcggactccaaacacccattgtcagaaactcactcttcagcttcattgctcatcacaaccatttgaagatttctagggtttaactctccaagtttggttttacacggtcttggaactttcctcgttaaagctcagaacttcgataagtaataaactgttttgctgagttttgaggagatattcagtgctttcttccgtcgatcggagatttgggcaggaattctgaaccagttttggctttttcttttgaggttagtggatcggcatcagttcattggaattcgtgttcgtgaaaaatttcaagtctttgtttcgagttttagcgaaaataaaaggaaagaagaaaactgggaatctggaaaatatttttcgttgatttaaaatttgtatagtttgttctttttgggataagttgttgagttcaattgaggattttgtttcaaacagtttagttctatggcaggttgtttgccttttctgttttattttttctcaccaaccaaacgatggttcgaatgtaagatctagagctgtaaaagaacattagcaagttacttggatttagaggctgtgttgtagattcaaagaccttgtgaaccgtcccagcatgtcaaaatagattttcttaccaaaaaacaagcatattcttttgttgattttacttggtatatgggtaccgacttgtcctgattatttcgataaactttgaggatttaagcaagcatctttaggtgttaggctcttcaattgcgacccataagagtagagcacttgggtctaaaccttgtatcatggtccccgccattattgtcgtctgattagtccttcagtgggaccttgctaaagttttgtaggcttttttatttagctcaaaagtaagctttttgatcccaattctatccgattacttgatatttatgattttcagaattattcagggaaaatgtcccagaaatcccgtcctccgccaaatttccaatcgatcaaatcattgcctggtgatttaaggctcatgggttccccgacctccgatcaatttgggaagtttggggatgcaaagttaggacacagtgatatgacctcatcaagtatacctgaaaatagtgattcaggggacgtggttgttgacaatggtgttggaagcatggaccaagtgaatgaggattcaccatatggtacaaacgtagtttcagttgaagagagaccctcaagtggtgatgaagattcagactctgtagctccgcctgtgccatccgtctctgcatctcgcagtgaacacaggtggggtgataccaactcctatgctgcgaagaaggtacttttctggcttctttttaaattccagataataatagcagttcttgtctgcatatgtaattcattttcttctatggggtagtactcatgaaatgatgatgttcattatgtattttactcactactcaagtactgtggtactgtgggtgtttgggctaattttgcagatgttgtagatatttgcaacatcaaagttgaacagattataacttactgtttatcttaacaattttattttatttttattttttgatggaacattcgttcatttttaattagtacatgatattattaacctgttgatgcctatgcattttgcttcaatgtttagtaactgtcggagtctttctgctataggcttttttcctctgccctcctttcccatttcagttgtatatttattaaaaacacataagcgctctttgccttgtgtttagtagataccagattgatgttttacagattcttttattgatgttgttatacacaatgagtctacattatatgatctagacttgaactgtatgtatgcttttgcacttctatcaaattaactcgtcttcctttggcgccccccaaaaaaaaaaaaaaatcccaaactacagttttatatttattgtttaatccgttgctgatctttttcttgtatagtggtggtttgtacttgcagattatggttttccgctgttgtgtactctaactcttgattttttttttgatggaaaaaaaattcttcatctctaagtcttgattttaatctgtatgaatgttgttgctttttggctcttgtcattgtctcgtaattgcaattgtactttaaaattcttctaatttttgaggaaatagctgacatgagcgatccaaattttgttacaaagttatagcagtttagtggtaatttatgaactggtttcaaaaagtaattgatgattcctggagctcagtttatgaacatagtacgtagtttttattaatttctgttacctacttcttaagtttattgtttcagaagcttcaatcttggtttcaacttccaagtgggagatgggagcttgcgaaaacattgtcaatctcggggactgaatctgtcattgcactgcctgatgagaaagtaagagagctacatataatttgagttgagatttaattttcttttcgtgagatgtatgattaaattttatttcaatgtcactttgtaggttttaaaggtacaaactgaaagtttggtcccagcaaatcctgatatccttgatggtgtagatgatctcatgcagctaagctatctaaatgaaccatcagtgttgtacaatctccagtacagatacaatcaaaatatgatttatgtatgttctcaaatttgtggtaattttttttattgtcgtttccttggaaatctctcttctctaatgtctttaaattttgattgtattccttgcagacaaaagcaggaccagtgttggttgctattaatccatttaagaaagttcctttatatggaaatgaatatatagaagcatataagcggaaaaaaaatgacaacccgcatgtgtatgccattacggacacagcaatccgggagatgataagaggttcctttactctttcaatatttacaagattattcttttcgtcacatgaatctcaccttaagaattgtcattagctgttaatagtcctaatctgacatacttttttccagatgaagtaaatcagtctatcattataaggttagtgatcaattcccttccattttgttataatgttgctgttgccagtttgctgattgcttatttacattctttaactctaattttatctgttgttttacatgttttatatgttttacacatcttacttgggtccggtgatgtttaagtggcagatttataaaaattaatgggttcagtcatgcttgaatgagggtccggtgatgtttaagtgagagatttataagaattagtgggttcggtcatacttgaatgatttggattttcaaaacatagagaaaataaaaatataaatcgttataatcttttatgtggaagaatatgttgcaatctaggtttatctttataatgaagttagtatagatcaagtgtgccaagtatgtgcagccaaaagtgtgaatacgagacatagctatacaagttgtatttcatacggtcttgaaacctttgaagctattaacctcaaaatgacattaggtaactagtgaacttagaggttgtatggtgtatttgtttccccatggaagaaatcttaaattattgagagaaggagttggtttatcttaagcttctttaccatttcagatgtattgtacttctacatcgaaccagaggagacatgtgaatgtgtttatgttggacatagcgagaaagttttattttatttaacataagcttctgttaacctaaaaataaaaatgccatggcattttaaggtttcaaaactatggatcacagtttactaatgggttagagtgtgttgtgattttcttaaagttacatttttagtttgtacaatctttaccttttgcagtggtgaaagtggagcaggaaaaactgaaacggcaaaaatagcaatgcaatatttagctgcacttggagggggaagtgggatagagtatgaaatattgaaaactaacccgattctagaagcctttggaaatgccaaaacattaagaaacgacaactccagtcgctttgtaagctctttgtccttcacaaaaatgttctttaggtcaatgcatttttcttatggttaggttagggcctgtattcatggatcattaagaaatagaataaaattgtaattttatttgttacataaatatgaccatcagagtgaaaatgttgcagggaaagttgattgagatctactttagtgaaactggaaaaatatctggcgcaagaattcaaacttgtatgttgtttttttttttctcaattggttgaagttcatttattaatttatgttataaattttaaagctgattattgattatttctttcacatcttttatgcagttttgcttgaaaaggtaattatttcccccttgatgatgtggtgagtttacttaactactttggattattaatttgggtttccgttacagtctagggtggtccaatgcaccgatggtgaaaggtcgtaccatatcttttatcagctttgtgctggggctcctcttacgctcagaggtaactatttatgaccaattgtattgatattttaaccatgtctcatgggtattgctgtgtcatactacaaattcaacatgattatgctcttatttgtgcaattaaattaattttaaacttttaagtagccttcgcaaatgtgatgatgccacctttttcattttttgtgataagttgtagaacattaggcggctttcaaaaggactgcctaaattattatgtgtctgatgggtaaaactttagcaatataatttgttgttttcctttttcctttactctattaggtctactgaaaacttaagggttaattgacatatatgttgtttatatctctcttcctttcatcaattgcttctaagtatcagtatgatgctaattctgcaactcattcactagttttgtggattttaattattttgaattgtgtcctttatatatatatatattctttctgttattttactttttctttgtttgattttctgtttcagaaaagctgaatttgaagagtgcaagcgaatataaatatctgagtcaaagcaattgttattcaattacgggtgttaatgatgctgaacaatttcaaattgtcatggtaccttttctcatttcaattttttgtacacaaaaaacttttacctttttattgttatgtaaaaatatatttacttctgcatttgaactcggcatggttgccatttcaggaagctctggatgttgttcatataagtaaagaagatcaacagagtgtatttgcaatgcttactgcagtattgtggctgggaaacatctcatttaatgtgatagataatgagaatcatgttgaagttctcgcagatgaaagtaagttctggcagatgaaaatcttgttgaataacagtctttgcaagttcttaaatatgattttctataatgagctgtcattcgtggtactgctgctgtttacgtagtactgatataataactacttttaaaagtagaatatattgcaacagtaagcttacgtatctaagtaattgttaaattaaagaattgacggtaatatttatatatatacttttttttttcgtaaaaaaattgggagaatgtttacttggtgcattatgtattgtacgagaaaggaccaacttctgtatagtcttcttattttttatttatttatttatttttttccatatagtcttttaatagccttgcataactgtgaaaatatcattttggtttagagttgtactctcaacattcaatagcaatctttttaaagtgctagtcaaaatgcttacacaacaatattatagtcttaatttgatacctgtttatgtgtgtgagaagcaaatatgttattccgatggtcatttgatgctggcataattcagtttcctcactttttggcctaataacctgatgtacgttcttatggtagaaaatatgccttcacaaactttgtttttgtggattttttttttgttgttttttttgaaaaagagacaagaattcaaaactgacctcctttcaagtttattgagagtccttgcttatggcggaggaaaaccgtgatgacatgagaagcaggggaaaccagaaaacaaaaacaaaaactcttcacactcaaccttaaaaccttgt

SEQ ID NO: 15553 - DNA, 2010 bp, Cannabis sativa
ataaaactaattaagaaagtgttacaaaacggaaggcttttatccaacaacttacaagtgtgtaatattcctgttacagtatttaataatcaatagaccaatgcaattagaaaaaagagagctattataaattatatttgattatatattattatcatgtgttgaagaaaggttaaaagggatgtatatagcttaccagatagagcaaccaagtcagtgttggaaaggccaagagcattgaatctagagagcagcctgtttaagttgaaagattgctgtggaatgccattgtttgcagctgctctgctagtggttttcgcgtcccttcttcctaatttcacttcccaatttggaccccccagctggatgtttatatttattttatatacaatcaaataaaatcattcatatttttaatttaccatctaaattataggtattacatcatttatactgtatatcctgacgtgacttgacttaacaaattaatagtatagctagatgcatgatttaacaatatatggtgtgagttcactatcccaataattatatcgatatatataaaccattatcctatacactttttcttaactttattttttcgagctacagtaagaaagatcattagattgctattattattaataattaacttacaattgtaacggagtctctagcagtaatggccaatatatcagcacatgaaacgacaccaggacacacactctccactgcggatttgatgtcatcaacgacatcaaaacctcttgctgagtttcgattagcattagcagttttctcgcccacgaaattagatgtgtcgtccagaagcactgatccatcacatccctgttagatatgtatacgaataaaaacgacataagaattgtgaaaacgacatataatattacaatttacacgtatcaatcacatatgtatgagacatgcacacaagttacagtttttcttttaagagcaaatagtctttatataaatactattatatatttaattgatacttaatatttaattaaattaaattaaatatttaattgatactattatatatctttacagaattatcaattactatagaagtgaacgatgtgtgcataaaataaagagaaaacacaaataaatgtgccacctttgacacctcacatacatatatttataagttaccactacgagagttctaaaacactaatagtgtcaaataccgccaaagctataagtacaatttttttataatgacttgtatatatcgatatcttagtgtagtcataggtaggttaattaaataacaatgttgaatatatttatatatatatgcatggagaacaggagaagctattattacattgacaaagcaatcgtggaagaacaagcggaggagagaggcacccatccgggtctccttggcaatagccgactgcaccttggattttactgtggggaagagtttagggcaagtttttgagtaaaaatcaggggatgaaagttcagctctgctactcccaatgaagagtattacaagagccaaacacagtatggccatgaatagtgatgaggtggtagaagcatatatatatatatgaaatattactatatttatacttatatatatcaagtaaataattagctaatgaataatttcgaagagcttagtgaggtttatatatagacggccttctcaaggtgattggggctttgcacacggcaggtcacctaacacacagacgaatatatatggatatttttttacaagctagaattcacacgttcaaaaaacaatagattaactaacataaattataccaaaaaaagattaaatatagtgttttgattggattgcttgcttaaagagtaagaaggcaaaattatgtttggaaaagcatattgttcttatgttaaaataatagtgaacgtcataatgtggtgcacagccatttgtcgtcatatcataactttagtagctggtgaactatttttcaaaagtagggtcccgct

SEQ ID NO: 15554 - DNA, 6159 bp, Cannabis sativa
  modified_base (4182)..(4184): a, c, t, g, unknown or other
gaattaatggttattgaaaagagattgttttatgagattaatgaatgttgtggcaggcaggcttgtttattgagggttgatttagtacaccctattataatacatagtattatataggctaatttggatttttacctgtttgaactttaacataaaccaaaccatgcctccaaaacttttcaggtcgttaaaatttccctttagagtattgaaattgttcttttaagaacttttgtccaattttattaaagaaagtctgacgtggataaaaatttcgaaagcataatttagtacatgttaaagttcaggaggtatgattttatcaaagtttaggagtacaatttagtatatagacactctccacaataataaaattgaactaaattagacaagtttcctataccttggtttcataactctgactataagggtgaattttaatttgtttcaaagattctctagctaattcttatgcagaatggacaatgaaggggtgtcttgtatggattaatgatgctattgtgttgggattttgacccatatgcaccattgaatatgtatcaccaatttgcttaattcaatttctcctctgtttttttaggtcgtcatgctgggactcctttgcaccatgcagctaaaaggggccttgaaaatactgttaagttgcttctaactaatggaggtaatgtatgctctgttcttttgttgagttttcttgtagatatactttgttgagtgtgctaattagtaattcacttctaatatttcagccaacgctttagtcatgaatgatgattgtcaaactcctcttgatgttgctagggagaaagggcacggtaatgttgtccgcgcaattgaggtatattagaagtttatatttcgattctcttctactacaaatatgtcttggcgctttgctttgatattaactcatgcctttatgttatattgcaaggatatttattgtaattttaatgtgtgtagcaccatattcgcttattctcgggttggatgcgagagttttatgggcctggatttcttgatgtatttgctcctcaattgctttcaagaaaagtgtgagtattcatacctatgatcttagttgaaatatcttttattcacttctgttaactgtacaaatgaatattaaactttcatcagtgattttattatcgaaaattactgtgtattaatgtctactatttggtttttgtagttgggttgttattctaccgtctggatcccgaaatccaaccaagccttataagttggagcttgccctatatcctagtgtgcaggtattgaagagtataatttgcattttttattttatctcaattattctatgtattatatttgtaattttgaaagttgtgatcgagtcagctgtcgagattgatgatcctatttgaatttcattgaacagaacagattcatattgtgcctgctctgtagttaactgtattcttttttcctgttactcggtataactttcagcaactaggttactgtgtgcttgcatgcttttgggaccatttatggcctctgactatattttatgatagttgttatcctaatgcttgccttgcctattgatgtgactaaatgctgaatatagttgtcttcatctttgctatttggtatcgatattgggcgatactgttcggaaaagtattctaaattctgattgaagtggccacataaagtgtttttctttttcatggtagtctattattgtcagattcatgacatcattggcgaatttctggaccttggttcctcgtgtaacatgtgtttaatcttttgattaatgtcaggatgccaaaccgcgtgctgtaattgcattgtggaaagccaatttggaagaaccgaagtcacttcaggctgattcgttcgtgtcaattctcgagaatgtcactagtaatttcttgattctataaaatttgttctgtatttcttttttgtttaataacaattttaggagttatgtgggatttcatttcttggtgtgtctttaatatgtctggtgtctggtatcaatttatagtaccgagaggcaggaggcggagaagaaggtgtaggcctcgaatgcttagtcgtaagtacaaattcaataactgtgaaattctcctgtagaatatcatgatagaataacacaagaaactagtgatctattaagttggtattgcaatcaagggattgcagggtagtagatttacccatatcactctccagcctccaatcaagggatacagaaatgttatatatgtgtgtgtttcaacctgacatagtttctcttgggattagtcagattcttcttcttttgttttttccttatgtgtagtttacttaagtttgctttctttccagaaactcgcattaaacttgcccccgaaaaggaaggtgactggcaacagcttcaacagttctgcaatgcttgcaaaggaattcctcaggtactcttcaaacttcctatatggatgatattcttgtcgattctctttctactctatgtatgctacacattattacgtgaaaaacttctcgaaccaagtgtgattatattgactcagaagcgcattattagaatctgttggtgaatacttttattctaaagtagttgcttaacttccttagatttcaaacttgaagatctctgtggtccatactatggactgaatgtggtggcttaatcctaccatgactttagttcgttgtctcgtagttgaaagttatcgatgcaatattggagtgctatttcttttattaaaaatttattgactatttcaggcacatcctgcatttttgcatactgatcaagtcacagttcaacaagcctcttcaccaccagctgaggatttggaattagctatggcattgagtgcctctattcagtctgcttcggaggaaaacccttataatgccaatctgagctctggagccagttcatctggcactcagaacccgagcagttctaatcagagtgcatcaaaagcgcctgagtggccagagcaaggaacttccgaaagtagccattcatgctcaaccgagcatgatgacaagatccaccatgaatcagttgtcccaacaaatcaaaccccagaatcgattgcatcagcaccaccgattccagatggtcccattcactatccatcaattgattcaagtcctattgatatatcctccccagttgttgagaataatgtacctgctaaactcggtgatagtaaagaagatggcgaatcatcatcctgtgttgtttgtttggattctcctgttgaaggagcttgcatcccttgtggtcacatggctggatgcatgtcttgtttgaatgaaataaaagccaagaaatggggatgtccagtctgtcgagcaaagattgaccaagttgtaaggctttatgctgtgtgatgattaaagcaaaatgtgagcagccctacatggtgagtgagatttcaaacctttccttttttgtatatgcttcaacaagagagtatttcagtagacccctgtctaattcagaattcaggagaactttccagtccaattttcttttatgatcgtgaccacttgtaaattttttaagaaattcttgattgtttacagtaccgaaaataaaattcaaactattatttattacttatatcataactgaacttgaaatctcattgaccaataatgcaggagatcgatttggccggctatggtgggataaaggagtttggctccagcatgcagcataaaatctatgtttgtaaggttgttttttcttttgtttattcatagctggtgtgttaagaacaaacaagacttatttgtttttgcaattgttttcttgtgtaaagtctttgtattatacatatataaataatataatatatattatgtgtacacccttaatatgtgtgtatgctgtttttttgtatgtatccaatttaagtgatagacaatactaaatgtttgtaatgcaagttttgatgttgatgacacatagcaacaaatgacaatgataataaatccttaaaaaagagtcctaaatactcttgaatagtgattttggtctatcatataaggcacttttagctctctttttccctttcttgtagggggtgttttccaagaattcaacttgaacaagatgctattagctgaactattatatatctatatatatataaatannnatatatatatatataaaaatcaaaatttggagatgaaagtgtagggaacttgtagggttatgatgttggatggcttttgactttgcaggtgcatattgtttggatatgaaccacatatatactttgtgctatgctagcttatcataggcattgctgtccttgtctttggcttttaattttttttttcctttttttccttttgtaatttaacttaggctaatgaggggcgaaatccttttttattttaattttatacgcttaactctctcatttttattttatataccaattaaatttcaccgttaaattactggattattactgtgttcatttgtatatacataacgtattgtcatgtgtatacttgtttacacaataattatgatcaatattgatcctttaaagggtcttgggaatcttgttaagatgactatgattgggacccaattactactgtatataatcacacgcacacacacttgacacttcttttttactcaaacaaaaacacttaattatctttttatagcattatttagtctcctttatgagacacaacaatcttcatttgaaatctggtcattggacagagagagcttatattatatatgttttgattggtttggcaaatttttaaggtggcttagaaaagatattaaagcttagtttttgcaagggtaggatgatttctttctttgttctactataagaaacttaactcactttctcatatgtaaataatacaaagtggagtagactgcatattctgtggctaaggtcctaacactttaaatgtagacaattatgtttgtcccaatattttaaaagctgcttccttcacccataatacaaaagtaaataaataaagattgaaaagacattgctatgtcattctgtttacttataaggtacaatttatagtatattgacaaaaatattaaatattaatttggttcctgtgttttgttcacgatgcaaaaatttttattatgctttttaatatgactacgtatatatgaatgtgagtgtaattgatagactagtgaataatacacaataaatattatgatatttagatgatggtgtagtcaaaaagatgttatatatagtatggaaataagatttatggtgaccccaaaattaattaagtaagtttgatttaaaggaaaataatagttaagaataatgtagtataagtgaaaatagtaaggcacaaagactcccacacatgggaccatcagtcctacgtacgtaagaccaacaaacaaataggctcaacatacacttagtctaaatggagaatggagagaattccataggtttgggcatggacgatcgagtagtctattaattaaagcatgcattgtgtaagggagtacaatatatacatgtattaatttcagaaccattagagctcaagtcaagtatatatatattattaatatactcctttgaaacacttgtaaaggagttggaaccttgtaacattgagagatcgatggttttccaaatacaaaccattcatattttgttcattatcatataaaacctaattatatatatcaaaagaatctgttatggaagaaaatgtacaacacaaataataaatttcataaaaataatatataaattaaatttatgcatatacctacacaaatctacaaagaaataattaataatctatatatgcatgggaacaatatcgtcagaaagagattgttaaaagcaaaagaaaaaaagttgataataaaaatatttaaattaaagttcaaataaaaatgtaccagaaaaaagatcatgttgtaaaaaaatagtacagataaaaagataaagctggatatgtaatgtagggtttcaaacaataatatctctatatatgtatttaattaattaaatgggttttttcatttttacacttcaaaataattttttttacatttttacgaaattctacctagaaactcctattgcaact

SEQ ID NO: 15555 - DNA, 4228 bp, Cannabis sativa
  modified_base (3875)..(3880): a, c, t, g, unknown or other
gatgcttgtcctagatttattagtactcctgtaacagctgatttaatttaatatgatactttctttcaaaaaaaaaaaaaatggattgtgattgtttaactatatttgccatagtaacgtttcaactcttatttacaaacaaaaaaaaaaaagaaaagaaaagagagagactactttttcatttaattgaaatttaaaagactatctttttaaataaacaaaatacaaaatatttcacaagttttggctagtgtcatgtaacttgggaccatattcatcatgtgacaaggaaggacaaaaaaaacttatattgtagatacaaacacaatccccatattaattattattggacaactataaccaataaccatcagagatatgttatatgacaccacatatggtgggaagttcctttgggaagaatgatattgttattagtgtaatttaatatctaatcttacttattttattttaataaaaattataaaaaattgctaagaatacatatgaaagtaactatataattattagattagtaattacactatattttaaaatacaatatgtatttagataaagagttataattacatataaatttttaatattttatttaacaaaatagttagtaattacgcagaaaaataatatttttagcagttaatatttaaaataaaaactataattacactcaattcttatagaagccataaaaattggagatataattggaaccgttatctcccattacactgttatagtataattatattgtcatacaaatataccaaaatgtctaattacctctaattatatcaccactttccataaatgtcctaactatttatagtgcatcacctcatagtgatgtgtactctgtgatatcaatatgttctaactaactataagagcatctcctatgatactttatatattttttttagctaaaatagctaaaaagtcaaaataaatagtcatttttattgttgttgctctaagtatgctctttactataattagtatttaaataatttaataattttttataatttaaaatttccaaatataaattaattttataaaataatagaaaaataataatatttttgattaaaatactattaaaaaaattagggagctcgtaacatagcatcttcaaccatgctctctaaacatactcttcaactaaaattgagagtgagtcttaaaaaaaaataaactctaaccatgaaaaaaaatgactctctataatagaatggataagaagctccctaaatatagggagctattttttttttttttttgctaaatttttttaatattagtttaatcaaaaatattactacattttttattgtttagtcaaattaatttatgtttaatatatttaaattataaaatattattaaaataataaaatattaactaaagtagggagcatgtttagagcaaaaataataaaaataactttttattttagttttttttaactattttagctaaaatttagataaatatagaaattaccattagagatattctagaacactttatttattttttattataaagaatcatttttttatatagttgtagtttattttttcaaatttcactccttatttcaattaaagagtgtctttagggaacatgattaaagtttgtgtattatattgcctagttttattagcattgttattgggcaccagtggtacctagcaccttctataggtgtcactctataattggttagcgatattctctaaaacttattttcttaagttatatgggaccctctatttaattacactaataacggtatgacactaaagagagtactaggcaccactgatgccctctagcaattctcctaattttattagagagaaatcagaaaggggttcaggtccctcatcggtggtggactttgtagcttcactgctctttccttcctctgacgatgcacacgtatacatttctatatatatactagtaacttgaacatgaggcttcaacatttttgttttaattagtgagtagaaactaattaattgggtgtatatatatatatatatatagatatattttctctctttttctctctagatcaagattggttgcaattgatgtggttatgttatatgtatgtacctctctctatataaaggtaggtgtggatgagttataatagataaataaataataaatgaaattattagaaagagacaagatatgtagatgggaatttctttgatatatgcacgtgtatattattaattaattgttggtaaaaaataaaataaaaaatgtgttttttaaaaattataatataggttcatttaagtcttaattctaagctcttttaatttatgaaaaatactaaaagacagtggtgatatttagtaatttcttcactataataatttttaaaaaatattgataaataataatagggtaccacctctatatactgttagataccactgatgttctataattgtactcataatttaattatttttgtattaatttatgtgtgtgcatgtgtcataaagctatgtatataaggtacctaataagatgagtttaattaattattaattgtacataattataaattagtttagtatacgtttcattcaaataaaattgcttatccaaaactttttatattatactaagtgaggctacacgtgcaatgcacgtgcctaactctttatgttcaattttatttatattttgattagcttttataaataattgtaataaaaatttatatatttttctttttgcattttaattattgtgcaaattataaatacatattttattattatattaaaaatacaagtataaggaacaaatttttatgggcattatagattatttgaacattactttttatattattataagttattcttaattttaaaattttgcaagatatcttaaataactacaatgtacacgactataaaaaaaattaattgactaaaaaattctcttgaataccaaaatattaaggaagtgcatcggtgcaccaaagaagtttcttacgatattactactattagtcgacctataaattttttagaaaattataaatatcgtaatatcgtagtgtcaaatctgttaataatttaagtactttgcatacgtagtgtcaaatctgttaataatttaaaaactttaataataaaaaactaacaacttacgtacttaaatattaatgatttaggtgtttttgattgtaaaaaaaataatttagatatttatgtgctacaaatataataattttggtatttttgctgctaaaaaataacttagatacttaagtaatataatagtttgagtgtttcttacaaatatatctaaaataatattttaaatggtaagacccactcatacattaacaaatatatgtaatagcaaaatataaaaagcaaaaatatggaatagcaaagtgatattgtgctcaagttaattgtagcatatatttattaaaaagaaaagttaaatctagtattaaacatactaaaaatttgacatttgataaagacagagaaagttttatccaagaaaaataagttgctacttatattattatacaagttaaaaaagaaatacaaaagtagtagttaaaatgttttaattttgctccttaaaataatgttttagctcaatttataaaaaaaataaataaaattatgattatattaaaggtataatattcttccacttatcaacaacactcacatataattttcacataatcagggccggccctaggcataggcgagctaggcccgtgcctagggcccacactttccgggggctcaaaataaaaaaataaaaaaaattattaggcttttatnnnnnnaaaatttaagtgtattataagcaacaaatattcatatagcttagttggttgatgtagatgtcataatgtctaaggtcatgggtttaaatcccataacactctatttttgatattttttttataggccccaaaattgaattcgtcttgggtccatatattttcagggccgaccctacacataattatatataatagttagattacaatctctttatttgtattaaaaaaccaaacaaacaaaaatgtggtagaagattttatatattgactttttaaacaagtaaattaactttatgatcaatgtaattttataatattataaaaggtaaaagtgacaacaaactatca

SEQ ID NO: 15556 - DNA, 2647 bp, Cannabis sativa
gtgaaagagtcgcaagtgaaaggtacaaattgaagaacatggctaattcagtgaattccttgggtgatcacacaagttgcaaaagaaaaaccacctctcaatgagttgacctctatcaaaaaaccaatttgaaaatgtcattcgcatagccatcgtcttagaaatcatggttatgctccataaaagaactccgaaaaattttagttttctacctcgatcaaagacctaacattgcactgatttcttagtcacatacttgaataagaaaaattccagaacactaacaatatttgtccattcacaataaacaaaacaaatgtgaagcccagaaggagaaggaagactccacgaagtccttagttttcctctattgaaaaactaattgtgtttttggtggttcacaagcaagtcattctccttcttgtccaaatcctcaatagcacaaatacccttatcatccagcaccatttctccttgtttaagaaccttttcttttgtgataaaatatttaataatagcagcagttaaaaaaccaccactacttactttaacaattgtatgcaatcttttatgaatcaaactttttacaatgctaggatcacccacctcaaggagtccttcgtcattcacccaagaagaagaaaaaagcaaaatgacctggatattgaagcaaaaatataaacctaaatccatggcataaagtgaaaaaataatttggacaatgaagaatccctaggcatcaaaggaggattgtaaagaaagaatacaacaaggaaattgtttagatctcatgttattggtgtagcaagaacctttgaggtgtccaccacgcctttcgactagtgttgtttttcggtgcaaattagagatcgtcttccctttgtttgcacatgctggaagctactaattctcttctattggagatttggccctttaaccggacaagaaaaaaggtatatgggccttaccgagatcccaacaagtcagcccgagaccttgaataattaggtgaatagcttttcctatgcaggccaggtatgaaactctaattaatggggtgagtttaaataaatgagtgaaatgggtcctggtaggatcccattggcccagtttgtgagttggaataattagggtttctttcttcatcaccgtcaatattttaatttgaagaaactaggtggaatttgtgtccaaatgtaaagatctccaaaaaaattttggttatgaaaagatagatgtcttctggaagggcattccccgaagtctgaacctgaccatctggaagtagtctcgtggaatgatatgtgtcatctggaagggcttttccggatgcctatcatgtccacatggaaggagtcttcacaaaagttagcctcccccagaaaggagttctggatggccagttgttccctcctggaagggagtcccagatagtcgactccagctgttggatttcctatttgggaagtcccttcagcgtacgctttgttctatcttttaggaagcgtacgtctcatctggaagcattttttcgtgtacgtctcataactaactcaacaacttatcattggcagccaccaactttaggatctattttttgggtctataaataccaccaacacttagcatttgaaggagtaccaaaaagaaggagatcagatgagtttcgagaggtgatcttgagagagaaagatggagaggtagagagagtggtatagtgaaaagagagagattgggtttggattttgtatgaagaatcttctatagatcaagaaggttcttaggtaagagtgtgagagaaaaatactttgagagaatccacaaataatcgatctcgattgtgttgtattctattcttgctcaatcaataaagaagatttcagtggtgttccagaactggagtagagctatagatcacatcgatttataagatttgaatcagtatatatcttagtgttagttttattatttagtgctttaattgtttctagtttctaatactttgttcatccctgttttaaattttaaattttgtgttatttgttaatcttattattgctaattattctgtactttagttgtaattttccctcaataccattactctcttttattcttttatgtaaagaacaagaacttaactatttttttttttgtaacaataaagtattaatgaagaaataaataataagggtgactattcaatggttacatttttattgtaaccatatggttatattttttttttacctataatagaaggttaccaataggtaaaaattccatttttagaattagttaattataattaactattttttaattaattgaataaatatttaagaagaccttttttaacaattaaaatttataaatattttttttatttatatataaatccattagcttaataattttaacaattaaactatttaattataatatttacaattttttttttacaaaaattataataatttttatataaattaaaattttgtcctcataatgatttatttttttacaagaacacactctgcttattttttgcaggatgtgtccttataaattaaaaaacatgatgatattatattgacacttaattaaaacctaattaatctttaaaatcttgatttttattttttta

SEQ ID NO: 15557 - DNA, 3084 bp, Cannabis sativa
ttaaaaggccccaaatttaaatgttcagcatacaacaacaacatcactctgaatgtactgtgcctccctatttgctttccaatctttgctgattatcacttgtcgagtttggctattgagtcctcagagtcagaaccacaaaaatcagttagtcaagaaacttattataccgatagaaccagatttttctctttgaaatctactctcgcttcaacttcgattatttcccaccccgaatcttgctgtcatttcctatgtaaaacatgctttatagcctcgtgagttctgcataccaaacatgattaaagaaaatattataatcggtagtatttgacacgggcatagtaagaaacaaagagccaagaacattatcatcacaagttgctgctttttgccactaacctttgaattgagtcaagaatcttctatcccgagttgttcgagggaatttggaccaacaaggaatattcgtcttgatttttggtagcggaaaacaactactcctttataagctgttcttggtactccatcctgggaaattgaagaaaaaaaagatcaccaaccattcaaaactcttttatcacacaattggctgaaatgaaagaaagaaaggaatcaccttccactcctcaaaaataccaaactcgcttgcaatacgctcaaaatctcgttgatcttcatactttacgcacacatccccaccaatattggaagctttcaaaaccaaatctcttccatggagaggtttagctttcttaactatgtcagcaaagtacttcacataattttcctaagaaaagaaataaaagttcagagagcggtaatataattaaggcacatgtcgagtgggataatacacacagtacctccatcaagtagctcaagtcccttgatttccagtcaaccttccaaaagagaaaaccttgtcagcacaaaacatgttaatgtaaattacagaacagcttttttaacttaccaggacatcattaagcttaattggctcaagatactgcttgaaaaattgtcccatactagatccctgtatctcgaaaaaaaacttttattagcgtgtttgcatttataggaggaatacaagcatctaaaaacattacaatttaaatttatttggtgatcatgcttcccggttaaattaaacatcgaaatacaagtcactatatcattgttggttaagtaggaaaaattaacagcagaaggatttataaggactaagatagatgtttagtggtggagcaggcaaaaaagaaaacagtaaagcaaacattcgaaataggattatgggctaaggccactatgtccattagtcacagatacatataattcagtggagggctgcatttgcaaatttgaagcatttctaataatgaacaaatatatacggatacgtacatgctctccaaagttataggttctacacacttcggggcgaataaattgtcgacctttgtgattctcttttaacctcaaccagtcatcccagtaagtgaagtgttgtcaaagaaaacttttcagtagataaataacaaaattaaaatgcacagaaatgtaaatgacgataattagacagtaatttagactctaataataaggatatgcctttggccacttcggtgacagctcatcccatgtatttctagcaagcatccatccaagcccaggaaagaaatccgagcgataaagtgcatctacagattatataaggtagcagatgaaaaatgaaatgattaattttctccaatatagaatatgaataatgtgataattggtaattcatttgtattacaggatggccaaaacaaaatagcagatagagaagcaaatattagttcagagaatgttgtaatgcggaagctgtatactgagtgtgataacagaaactagtgatgctaagataaactaattcctgcctaaagaataaattcaaactctttaagagagctcaaagataccaccgaataacctgatgcaaaaaaaaaaaaaatgctggtgctaacagtctctgagtctacaacagtgaaagctacaccaaaaataaagttttgttttccacactcacgagattagtacatgaattaattttaattgaagcaatattcagctttaattttatcctataatatttactgagacagggtaaagtttaaagggcactcacaaggatcatgcacaaactgcttttgtccattatcattccatgaggaaacagccatgatggacctgcaaaagttttgtaccacaggcatcagcaggaaatgaactaatttatttcaacaatacaaaaataagaatctgatttcattataacgcatacctatctttatcgaggagatctgcagcagcctcaaagtaactaaaaaaatcaggagcgatttccatgtcatctgcgttcagtacaaatcaaattaccacacatttcttctatatactgaccgactatcaggagagaagaaaacattcgtagtggaaatagaatataaaggaagattcttttcaccttcgagtatgattactcggctgaaattatgcttgtagaacaattcgtccaatgcccatttgtaatgacctaaaaataataagaaaatgcttataatattaataccataactaaattaaaaggcttataataagcaaatcttacgtgcaatcttgtaatatgctatcaactctccaggcctttcagtctccactcgttcataatccaaatgctgcaattaattaaatccaagggtttaaggcagcctggattagatctagaaagttgttcataacaacacacatccaaaagacaagaataattacattgaaaatacactaccctcattataaaaatatggtcctgtggccttgaaacagatggaggcagagataaagaaaaaatcctgctttcagaatgttttttaagggaacaagatggtataaaatgtaacagtaatttcacaaaaaaaaaagctagaacggagttgcttttttgttatttgcccctttatttccatcacttttaagaatcttaagatacttaaatctccatgtcatcagttgattgcttaatgatgaaaagcttcaaaa

SEQ ID NO: 15558 - DNA, 2672 bp, Cannabis sativa
gcaagaaaaaaacattagatttcaaatcaatttagagaccaaaacttaaaacaaatttggttcagctttcaaacgttactcctacaatgtacaacagtgatgtgaaataagtattgccatgtatttcacacaaattagattatccctcgtccccaacctccttttgcatacttctggatttacaagttcacaactattgacttgtgagtatagcgaagacttacccacatgaccaatgaagacaacattcaaatgcctcttcttatttagttccatctgttcttcatcctcttctggggttggaatttctttctctttcattggaactgaaagtgaaacggttaagaatagaaatgagttccagaaagaatacacatacatgttgaaattaaacaaagagatacagtaaaatgcccataaagtacctttctgttcaacttcgattggctcaggctcactagtgtgtgtttggacctcttcctttgtgtctgacaacccaaatgaagaaaaatgtgtcattaattcagctaatattctctatatatctccaataattacaaatatcactaaaggtcaacaaaccaaattgcatggataaccaaagtaaattttaataaatatactaatactgaaacaaattctattcagtagaattcaaagtgctcttcaaagaatagagcaccaatacataatgttcaaaactatgtaggtggtatacaaaaattaaaatttcatcccattgaattcacactgtcaccaacatacagctaacaaggaactttgcaggagttattaagcattcaagttcagtatacacctttaaattacgtactctcaaacagagaaatcacaacagaaaatattagaccaacagaataaaatcaaatgactcaaatttactagtactaccataccaaccttcctccattctatcactttcctcaacttcttcagtctttggttcttcaggattaacaaccccattatcttctgctaaattcgagtaaaaaaaaaacaaaagaggccaaatagattcaaaaatcataaacaaacacaactagcagcaacaacaacaaaaatcacacattttaccgtacctgcagggtctgcagggtctagttgtaaagaccgaatctcctcctcaatatctacatcagctctcaaaattcaacaacaattcaatcaattttcttattttcgtttaaaatttatatatataataataagcaatatcaaaaaagctcagttcattacaaaattatttttgctatttgcttaatcaatttaagataatccgtaatcaactctttatcatctctttcatagttaatcacacaacaaaaaaaaaggaaaagaaaaacgaaaattcacatctataatagtgccaccgattatcgaacataaaaccagcagatctacggaaactttaaccagcaaaaaagaaagaaacggcattaatcgcgatttcatatgcatgtatagtgatgaaatagaataatcggaataacgtacccatggtttggatgctcatggaggatgaatcggaacttagggttttcagtaaagttttagagagagaaagagagagagaaagagagagagaagtgatagattagagtgagaaaacggaggcgtgcgaagagagaagaagaattttgggtttattaaattttgcaaaataataaatagtaaaaaaaaaaaagacacaactaaatgagttttattttctataaaataaataaattaattaaaaagagatttctatttttatttttattttggaaagaaaagaatgggttttgattttttttagtattttgtattttttttttttctcacaaagtgattagaatcactcatgaatttataacgcagacgttcgccactggcgctgaaatctcttcgaaccaggatagctcatcgtctaaaaagcatgctttgccaagctatgggccgctaaattctcagaacgagccacatgggacaaaactgctcctaaaaatttagacaatagagctataataatttcaaacaacgttcttaactcgttgaaatacattttcccgttgttgatggccgtcagcaaagctaacgaatctgaataaactgcatgaattggaagaccacacatatgagcccaattgagtccaaccaacagggctaaagtttcagcctgtaacattgaaattctacctgaaaaaacctctgaaaaccagaaaaaattttaattagaaaattatcaagctaatcaaaaacaatcaaacaccaaaaactaaacaactagatccccctataaaaatactagaactagccaaagggtattccctttggctagtagcaactaaactcttgcattttacatctgaatcatcataggattactatctcttactaagatcctaaggcctaaaaaaaattttgatatgtaatctagtaacaacaaaataagccctacaatactcccataacctaggatatcaaaaagtttcctttggaaataaacaaaacaataaaataagcaacgaataatattttaaatgtaccccttatgactaacctttgaggaatttgctcaacgcagcgtggactatattatcttctgacaatataacagtacctaatctaattaagctcgtggtgctcaatatcgctgcatccaccataagtttaga

SEQ ID NO: 15559 - DNA, 4938 bp, Cannabis sativa
aatttttttgtacagccctagttcatgcatgttagaatatggtatgttataggattctatctcaaaattaattggtaataagatgagtagtacatgcatcttatgtatagtttttagtttctacatattattaatgtaggactctctaacatccccttcaagatgatggctcttttcttgctcacaaattttgcacaactcgatcacaagtggcctttttagctcacagtggctctttttggctcactatccctgaattataagcggctcttttagctcatctttttagatttggatcggttactcgttagagttttagtttggctctgataccatgttaaatataaataataaataaacaatataagaaataatcactcgcagcatgtcacatcgacatagtgttggataccttagactatgtttgttaggaataatagagaataatgaggatggagggttggtgaatgatgtagaataagagagagagagtggagagtagcaatccttttgaattgtttggtagaagggatgaagtgatggaagaatagagagtatttatttatgtaattattgtattgtcctacatatgtgatgaccaagtgtgtgactttagcaaagtttagacattgtctaaacttgctcaacatcacaactttacagtgatagacctcctttagaggtacactgggacatcatgcatatgattctatgacttatgtgaaaaaggtggataattgtggtgtttttaacataagtctaataagtgccaagtgtcactcttgggttggtcatttttaaatgacagttatgttagttagttttggggggaatcgttttgtcccaaagctatatatatattccctttgccataattccatgaggctaaatttttagaaaaacacaacagatttgagagagagtgagacagagtgattgggagggtcaggaactagtctcctttacaattgatcttcctagtgtagatcaaacactttgtactcataattggttgattgtttcccgggggtgtaagcacagattactctaatttgtgttcgaatttcgttaaagaaaggtaccattttagtttctgctccattaccattgattgttcagtttatagtttatgcttgtttaaatgttcattgctagttttgagcttgcattttcagttctggttttatgttaatattctttgttgtgtatgttcttgaatgaggtcaattggattcaccacaatatatttataaattatacttttataattaatgtattcatttattttataattgtattttatatattctataatatattatccattaattacttatttttagggcataaatcccaacacttcttttgtaggactttggcccaagcaattcttgcttgatcattctttgaaaaatgtcacgtgtcatccttctgaaaacacaaataacaagaggccttcattgagattactccaaaaaagaatttgattgatagccttgtcctttataagataacacacataatcaaattgaagagggacatacttttctttggtaaattaagatatgctaagtagacttttagtaacactaggcacatgaaaaatgtcttgcaccaatagagatttgtttagggaattagttttgactaaactatagcttatatgatggataagaagagagaaatcattaccaataatgaccttagcctttccttgatagttagcagtttgagtcatgtgttgaggataattggtgatgtggtgtgttgctccactatcgaggtaccaagccccatagatatctagtgtggatgtagtctcaaataagtgagcttgaggagatgaatcaggtattgaggaggggttggaggtgaaagaactagcacattgatctccattgtaggtaatgtcaaacctttgataacacttcacagtagtatgtccagcccttccacataattgacacataggtctattgctaccacctcctccattgttattgtagtttcttcctcctccttcgtatggaccatgataacctcttccagaatagttgtttgatctttgaaatccattgttgacaaacatgtttgcaagattttcttggacatttgttaaagaatgagttgtaagttgattgattctcattttttgattgtggagcataaactggacttcttggagtgagagagaatcagatctagatgttgagtttaccaccacagctttgtattaacgtcctaaactatcaagaaagtacaagatcaaatcatcatctattaatggttggcctgctgtttcgagagcatcagcataccatttcatttttagtatgtactcttcagtggattgagatcctttctttgttgtttgaagaagattcctaatttgtagaagtctgactctaaatctggttgcaaagagttactcaaatgtgctccaaatcgcagcagaataattgcaattaatgatgtctccaagcattggtttagtgacaaaatttattagccaatgcacaaggaattgatagaaacgaattcatttatgatgattgagatttagtacattacctacaagaagcagagatggaattggaatggtgctgagtatgtatccattgagattgtaagctcgagctgctgcaaaaatgagtgatctccatagagtataattcgatcaatcgagacaaagactcaatgaaagtaaattattgtttggaaaatctacttcttaatttcttcttgctagagctgcttgaaattttggttggagtagctgaaggttgttgatttattagttgaggatcattcaaggcatttgaagtaattgtagctcaaataccataaaagactctgcaactagcaaagtttttgagcaagaacaatgacaaagatgagagaaaatgagaaatggagcaaaggtagaactaatggactgaattgctcattctctctactttagtagaaactggatcatttatattaatcaatagagagagattataaggacaacaaggctagctcacaagagcaaagtttgtgatagttgttctcaacaaagttatcattaactaatttacatgttgaatatcgacgtataatgttgtcgataaaaggggacaccctgataaaagatatttgcggtaagtgttgttgtaataatttttattaaagtgtgatctgtattgacgtgttaagacaccaacaagtgtcatttgatagatgggtatttaatatgtgaccaataatggctaaaaaaaatatttgtttgatgtcttagggtaatgttcctggtttttatttgctggttttgtagttagttatttttttcatctgaatatatattgataaattttaattacacataacatttagtcttctcaatacatatatacttttatatgagataaaacacacacatagctcttctcaatattagtagtgtactattaagatggctatcacaatttttttacgaattttcttctgtggagtctaactccttgtttgttggtacaagaacttcaaagaacaaagttcttaatttgactagaatacaaacagagagagcaagaatgaacggaaggtgaaaataaaatggacaatggaaaatgaattgctcaactaattcagagtagaccttgttatttatatgtgtaagaatggtcagtgaccttacaattggactcttttctaacagccataacaaacttatttcttgattagttattttctttattttcttaggtttttacagttacaatatccccccttaagtgacacgggtgaacaccaagtattaacttatttcttaagaaaataaacgatgaaacaggtaatggttttataaaaaatttaactgtttgattgatggagtccacataacgcagttccaattattgagctaagacacgatccctgaataaatgaaggtctatctcgatatgtttagttcgagcatgaaacaactgaatttgaggctaatgatccaactccaaaattatcacaccacaatatgggacattgaggaatttctactgagatttctgacaggagtgattgaatccagatgacttcagatgtggctaaagctaaagctctatatttagattcagtgctactcctggccgctacttgttgtttctttgaacacccacttatgagattgtctctgaggaagatgccatagcctgaggtagatttacgatcatcttgacatcctgcccaatctgagtatgtgtagcctgtcaagttgagattggttgcaggggtgaacataaggccaagatgtaatgtccaagcaatgtatcgaagtacacgtttacaggcaccccagtgttctgtagttggtttttgcatatattggctcaactgatttactgcaaatgaaatgccaggcctgatgttgcaaagatattgtagagcacaaattagacagtttgaagcttgcacacattggtgtagactgtggttttgcatctagcatttttgtgcgagtgagtagatcttttgtctattttcgttgaatgaagaaaatagtggcattgtctcgaatgacctcaaaactaagaaaataactcactgattcaagttgttttagtgcaaattgagattgtaatgcactgataatggtcaaaatttatgttgtgtcagcacatgtgatgaagatgtcgtcaacatacactaataatagtaatagagaattgtgttcctgtatgtagaaaagaatagtatctgaccttgagtttctgaatctccagtagagtgttttaagtgtgtcaaatcaggcttgaggagcttgctggagactacatattgttttgttgagtttgtacgcatgatttggataatgaagatttgtgaaacttggagattgggtcatgtagactttctcttataccatacaagaacttcaaaaaatagagttttttttttttt

SEQ ID NO: 15560 - DNA, 8048 bp, Cannabis sativa
atatataaaagtgtatgagaaaatgataataaatttgtttgcacatattttataattaattaaaataatgtatataaaattgtaaaatgtcctatattttattaaccacgctctatcacgacaatagtaaccgcaccacaatagagattaaccatactacaccacgctcgatattgctattaagaaggagggtctagttatgttggaagtgctggttatgaaggttgctactgccttgtttggagaggattctcttgatgaggaattgcaagctctgttgtgtagtagcgatactgtaccaaaagtagatgtgaatggcctaaagtgcaaaaaaaaaaaagaaaaaatgaaatggcattaaataatttttttaataaaaaataaaagaaaactgcaaaattatataacttaaaaattgaaaagaaatatatattttgtagcccctatagacaatacatagcccagtccctgtgtggtgagccactgtggctagggatttataggtgttggagatggactttgtctatttcttttagtcatttacttaaagtcttagataatgtatgtgcatgttttattgattcctatggcttataattaccaaaaaaaaaaaaaaaactagaagaaagtgaggttagtaaaatattattagaaatatcttcatcactatcagtttcattattactacacgtgacattaaaattttttttattttttttttatgagtatttgtacattcagattgaatacgttcaaaactttcacatcatttttgtgcatcattgaattctcctcttttaattgttagtcattgaaggtttcaaaaaagtattactttttgaaaaattctttttgtcactatctttttcatgtattttgaaaagtttctaattaaaacatctatttgatcatcttctctattatttgaactttctttttcagcaacattaaaagcaatgccattacctctatcatctttggacttggtattgtcattttatttaatttgttgatttagttcaaaggtacgcaaggacactatcaactcctcaccttcatcttactgaatttttttgctttttccatagtcaatagcttagtgtcgaatctgttaggaagaactctcacaattattttgactgtcactgattcatcaagtttttctcccaagacaaaatattcgttagcaatatcacataatctttcattaaattcaaacaaagattcattatcagacattcgaagatcatcaaacttaatttgaagcataataaacctagtatgcttagcatcagaattttcttcaaattgagtttgaaggatttaccaagtattcttagcagattcacaagaataatcttaataaaaccttcacctattccattaaatatagcatataaagctttactattgtaagcatataacttatcatcttcagtagactattcaagttcaagttttaactttgaattaccttcagaatctaccacaacgggatgagaccatcatgacagaattattctccatgccttctcttcttgaggcttgataaataccctcattctaaccttccaataaagatagttagaatcattcaggagtggtggacgagaaatagaacttcattttgcaaagggaaatatattgtaaaatacaaataaaggaccacactaagagtttaatgttctgctctaataccaattgaaaaactgtgtttttacatatgtcaataaatttataacagtaaataaaaaattgtgcagaatttaaaacttaacacaagagaattgtatatggtattagtgtttttgtattattatgtgttttttgttgtgttttttttttgttattttttgaattatcccttttttaattataattttgtgataaattgtatcaattcaaggttattatcaccaccactgtacacaaacataagtaattgccaattgtcttcttatagttaaacgaagattaatagtattagtagagatgggcaaattgcatatatgccactctgtgccaagtgtatatacagtaccaaaagaagtgtgaagatttctggaatataaccacacgttaaagaatgaccattcaaagggtgaattggctatgacgtgtcagtctttcccaacttaatatcaaatattctttcttatacaaaatgggaattaaaagagaattgactgtgcatgcatataagacttgctttacattaactttttatcgagttttaattttatttttattatgagacttgacacattgttcttatattcaagaaaattgtataatgcactgttttaaaagtatttttttataaatataatttttagtataagataccatatctgccactactaagatgctatttgcctctttctactgatattaataattataattacatctctccaatgataataataagaagagttttgactaattaggattgattgaaaagggtaatccaaattcaaacagaagatcagctgttaatatgcaacgtttaatggtgttgttactgaaattgaagatatgagcaaagcaattgattctgtaaaaatctcatccccacttactgaaaagttattggacaagaaagaaccaaaaagttgatgatttaatacttattaatttaagcttgcgtttcaattggttagacgcctttaaaaagcatgatgtgattctatattcaacaatgtcaggtcttggtctagctattttgcctatataaagagaaataaaccagttaaaactatgcaatctaaactaaattcataaactaaaaaagaatagagaagaggagaagcctatatattaagatgacttttggtgcacagtggaaaccagctacagctatgctggctattaattttgcctttgcaatagtaaatttacttctcaagaagagtattgatgatggtttaaaccatttggttatcgttacatatcgacagatggtggctactatgttattgttaccaattgccttcttttgggagaggtacaacgtaataatactgtttgattaagaaccatatataggttgtgttttcaatgacactgataagtttacttgtttttcttgtaggaaaagcagagctgagattacagcacacattgtttgttaccttttcttcagtgctttaattgggttagtttcttttctcatatcataatctgtattttcccacttgaatacttctttatttaaagtttatgttggtatattttcagggtaactcttgcccagttcttgttccttcttggacttcaatacacatcagctactttttcttgtgcatttctcaacatggtgcctgttttcacatttgtattggcactgccatttgggtaaactaatatttaagctcacctttatccttttttaccttttgttacttattgagatgcatacacataaaataatcatctcactaaaattcttccagtcttgaaaagctgaacatgaaaagcataggcggttgtgcaaagctgttgggtacaatgatatgtgtggttggagccttggtgctaacattctacagaggaatgcaactaactcatttacatgcacaacaagccacagaagaccatgccagcatgaaacacacacccgaaaaggcgaagaattgggcggccggttcagtactcctggctacaggcagcctctcgtggtcttcatggttcctcttgcaagcaaggattgggaagatgtatccatttcaatattcaagctcagccatcgtgtccctctttggtgccattcagtcagccatactgactttgttaattgagagaagaatctctatgtggattctcaaaggaaagttggagatcattgctgttgtttatgctgtgagttactaatatgaacaactttctagtgttaatttttttcaacttggtaagcacttgactatctatttatttattttgagccagggaatggtaggatcagggttgtgctatgttgggatgtcatggtgtgtgaagcaaaagggtccagtcttcacatcagcatttactcctttcacacaaatttttgtagctttttttgatgtctttgttttgcatgaaccagttcaccttggaaggttttaaaatcatggaattctctttgtttcttttcaacacctttttcaaattctttgtttttaagtttttgctggtactaacattttggcaatggtaatttaaccagtttgctgggatctatcttggtcataattggtatgtacactcttttgtggggtaaaaacaaagaggccaaggaagttggtacaaagcagaaccaagtagcagaagaagagggtgaagattgtagtaactcaacagtgtctcatgtcattcctgtcacaatcaacccaacaacttcttaatctaatattttagccacagttcacaatagtcttaagaacaattgtttggatgcacacacttttgtgtttactactttgagatgttaaagacctaattagtagtaaatggtttttgtttaccctgcttccgcactctcagtatgatttagccaatttatgtattggaatattactagcataaggtaaagatattttggaagagacaataaattttttatatcggagcaaataattcataatttatttatttattttttttttgataaataaatcagagacgtacacattttattcccaccaaaataaataaagaagatattaaaatagtaatatacaaaaaacaaaatgatattcactatacttcttatggttaaaacatatataaattatatataacattaaaaaatatacttgtacaacatgaggctatttattcatctccaatttaaaatgtgttaaaatagagttgaagagaatcatttggagggtgaggacagtccctgagtctccaaaaaaatcaccaatcaaagtactgtcctttcactgtgtttagtttagtccaaccaaaataaatggccatacggtacacatctacttccctcagatgattgagtttttgttctttttgtctatttgtttcagaatatactaatgataacttaaatctgttaaactctttttatttttaatcataacaaaattattaaattatctaactaattataaaataaaaatatgaaatatctaaacaatgaaagcatagattatataggcaaagaatgtttctcaatgagaaaaaacctcaaaagtctaccatattaagctcttatctaaatttaagattttataaatgatcaccaacctttatctttctaaacaattcagattgcttcaatcaattttctcacaagagcgtaatttttcgtgatcaactttagtcgtcacttttcacaatcagcaggacttaatttttttttccgacccaaccagaagaatatgctaccgtgtaagctatatttatatttcttgcattgtcatgactggtttgtaaagttgtttatggaacagtagaaaaattaaaataatacattattttaagtgggctgttacgatttccgactgcttgcatatttttgagctgcaaatgtcttaaaaagaacggcttagtacgcaatttctcaaaaatttcattcgataatattagagaacgttgttctatatgaattaaatgtaaaagtaatgagtaaacatgtgttacttctttcattaccaattaattttattaattaattttgagatggaaccataattctagatatggtatcaaaaccatatttttggtagatttttaatccacaaaatagcactattttgaaagggatattaaaaaataaaaatgtaagttactctattcattattaattgatttttatagatggaacccttttatatatgcctcaatacaataatgacccttttattgtgaatataagtaactccagccagaagaatatgtttccttgtaagctatacttatatttctttcattgtcatgactggtttgtaaaattgtgtatggaagagtagaaaagataaaataaaacatcatttaattctttttctctcttctcagtgtcactctcatatatttacagaataatggtctttgtacatttattaaacaagtcgtttgatatgagagcataccttcttgaggccatgaaggcaaatcaagagaaagatgcccccaaatagagaagctttcaaaattactctctctggtggagaatttatggttagatatatacaatctacagctatgaggatccaagctaaaccctccaagaaggttctaactaataagatatttccttttgtttccccacacactctgaaaattattctcaaacacaaagcacccacaaccaaaaatgtggtcagtgaccaacccctgtaagacactatctttccacccacaatcaaactctcatttcggcacacacaagatggacactcacctgaaaatgtcgacatgtttaaggcatcaaaacctgtatagtatggtaaaacaacagagtccaggtacaaacttgcatgtaaaatgcctgaaattgttgatgcctcaaagaaaacatactttatgtctttaccagttccgctctcgaaactgagagcagagatatgaaccagttggagaattgcagggccaactaaggacagaggaaacaaagtgttgattcggtgtccattggctaaggccaagaggattagtgggagtgaaattggcccagaaggtaaaaaaaatctctttaacattgtaatactagtttggccttttcctgttatgtccattaccatgatgaaaagagttgcaaagtatgaaaaagtagtgaatataagaagtagaatatccacaacaggtgaatagttaccaggataggtactatcacagaagtagtgatatgggcagctgattggatccattgtttcttcaaattgccatctgacacatttgtagaacattaacttgatatcttccaggacccattctggttgctcagttgggtattctggtaggagtagttgccaattcattatatttgtctgcctttcttttctcctcactgaaatttatgtgtctcattattgttctcttggttttgctgctttaatataacaaattcatctgttggttaatttctttcagttgatgaggatatatcaactaattattctttttatttatttttcttgtcctcttagttttttttcttttctttcccttaatataaaataccccatttgcttgtgaaatgttataccaacaccataatgttatatggtcatttttctgtaattgggtctcaagataggtaggtttcttgagaaggagacagacacttgacagtaaaaattgttattgaaactacaagcaattggaagtgttggaaaaaagcaatttgggaaaaatgaaacgtcctaagagctatagggagcttggtttcaaagtaaagatgctgattttggtttgggtttggtgagtgattggtactgattgatataatgatggattagcggaccttggtttctgattaagggagtttacttatggacaatatatgcaaacaattgaggtttctctacctaattacttagattaagacttgggaagcctttgaccacaaatgttatacaaaaattagtgaaataatggagtatttattgtttttaaagtacatggttggtattatatctcttttggcattcaaactttcatttttaaataaataaataacaataatccgagtatgatctaaaacaacattttcttgtgtaacgatttcctcgtgatgttattacatcatcacaacaatgacatattatatgcaataattaggttctgggctttggttttcagtattctcatacagaattgataattagctaactcattaaatccactttcttacaactcttaagcactttaatcttatttatatgaaaatacacatgttaaagtaatagtagtacatcaaaattaataaagaagtatatatattatataagagagtttatgtaacattcctccaataagaataagaataactcttcggaggatttgaggacaagatgggcaccgactcaccggctaccaaattcata

SEQ ID NO: 15561 - DNA, 5358 bp, Cannabis sativa
aaaaaaaaaaaaaaaaccagttgacttgacataacaaccgttagaaaataatttattattattattattttttttcaaacgtatgtacttgtttaaccggcaaatgaatgagtgaagtaaaacctcaaaataaacaaaaacgaagtaaaaccacaaaagcaagttttagggttttctctatcgacccctgaccctgtctctccccaaaatagaagggtgatagtgacacaatcttcatggaccgtcttcgtcctagacaccgaaaaagtttcactggctttacaaagacagaggtaattattagctcaaaaattgtttatacatatatattttcatataggggtgtgtgttcgtgtatacagcagatatatatcattgttatgtttagctgacgaatcattgttttttaaatttccccatgaaccatgaaataggtccttttactttttgaaggaaaagaagaagaagactattgttattttattactttcaattaatatatacacgtatgtgtgtgtgtgtgtgtgtgtgaaattcttatgttcttatttttgcagatgtgcattcctggctagataaatattctgtttagtgatgagctaatttttcctcgtctccattttgttttcaaagatatacttgtgtctgtgcagtgtattagtgtgtttgtgtatgtgtgccgtgtagtgtgtgtataaaatatatgtatatatgttgctaattgccgtttccaagctgacaatgtataatttttcctgattaaaagaagattacttttcaatagtttgattgtttgtttactcctgtgagttcagtaagcatgagtagaaagtttatatattgagaaatatcacctttcaatgacaaacagggtttacctttttttttttgagcttgtgtctaactaaaattttatctagcatatatatatatatatatatatatattcaattttctgttaaaactcctgctcttgcaaacagatagaaaagatggagaaaatgttggaagtgtccagggaaactgtattagataaggagttttgtcaatacgttgcaagagcttttaggtgaaggtttaacttcatgcttattttgcataatttggtgtagattatagaccaacatatatgctgatgttccctaattaatcgtttgacaccttatatttgtctgtgcagtcgctattctgatcgggctgggaagcctgttgtaaaatggactgaggttgttgcattttcattttctctttctcattgttgtcactgatctctgattgttttgcttctgatactcttgttttgttggattacatattaggtgcacaattggttccataatgcaaaacaggaatcagcaaaagcctccaaaaatgtgcttgaactagcaggagcttctcttcctgttaaaagttctgtaaagccaacaggtatttctcctaaaaaaaaattatgttctggttttcccattcagctttttcttcccctgtctgcaatactttgcatgttagttttttttttggaagaactttgcatactagttagtaagtacaatttatagattacaaatattcttatctctgtgagttcagtctgccactgaataagttgaatacactagattgtaaataatgtttctgtcctttcattctaaagcagaagagaagaaccaagacttatccgagttggaatttgaggcaaggtcatcaaaagatggggcatggtatgagtcctcatattcctcctgtaaaatattggagtttctttgggtagatattgatagtattttatctcatgaacaatcaatacttttggttgatctcttaatttattcatttttctttattttttatgctaaactccttacctatgggagcaaaaacagtttaaagatgaactgaaaaagaggaaaaagtggaatgatatttccccttcttttgaatcttaataaatgacattcatgtttaaaagagtcaattaccatttatcaactaagagaactttggctccgcaggtatgacgttgatatgtttgttgcacacagagaactaattactggtgaaactgtaagtatttatttatttttctcaatatacagttctatcatctaaaaatatactcggggttatgtagatcaaggcagatctttaggctatgctttcagagttaaaagctttgttattgctacacaactttcagagtttggaaaactagaaagaaacgtactgatttttatactatttttcttttttaattgatgaaatattgtaatttgttaaaggaagttcgtgtcagatttgttggatatggagcagaagaggatgagtggatcaatataaaaaagggagtacgagaacgttctgttcctcttgaacattcagagtgtcacaaagtagaggttggagatcctgtcctctgcttccaggtgattattgtaaattttagcacctttttctccttcacatgaattcgaaaatctccagtcacctcacctcaccacacctcataaggccttactatccatgctcctacaccaggagaaggatgaccaagccaggcattacgatgctcatgtattagaaatccaaaggaggatgcatgacattagaggctgcagatgtatctttctggttcggtacaatcatgatgaaagtgaggcaagtatttccattttattatatttacatgggatactggttggttaataattagagcatctccaaccatactctataaacactctttacttaaaatagggagtgaaccttaaaaaaaaatgagttccacctataaaaaaatgaatttctataatagagaataaataaggagcttcttaatttttcggcaatttttttaaattgtattttaatcaaaagcattattacttttttatttttttttatcaagagagaaacttcattaatcaatactaacaaatttacaactttaaccggggcataccctttccaactcacaccattcctactagctctttacaaattttaaaattaccttatccaatttagacaatgtcctctcattaacaaagaacaccctagtcttaatactctcttttgctagagtatcaatacaatgaggggccatacatttacgatcaaacacacacaaattcttattcaaccaaatgccataaccggccatagctgcataaaaaatatcagctataaacctcctgggctttctgctattcatccaatgtatccagtcctcgtgaacactcggccaaagcttgctgcctagccccttcccaatgagatgcataactggccaagagtaaggacaagagaaaaataaatcagaatggctccaaattcaattcacacagtgggcagagaggtgaatcaatagacatttgtcttctaatgagattgtctcttgtaataagatggtcatgtaaggcttgccaaacaataaaacgatgttttcgagctgaaagattatgccaaacagcccttttaaacgagacacgagagtcattcttcaaaaactgttcatacattttttattattttaatctatatttaataaatttaaattataaaaaattattaaaataatcaatcttaactaaagtacaagtatgattaaagtaggattaaaaaaaatagctctctattttaacattttaggtattttaactaaaatttgactaaaacatctagatgctcttagttacatcagtacttatctacagaagggcagacggctacataaatcttaattatttgatttttattcaatgattgtgatcaatttgatactaatacaactactgtatttgtttttttgacatgtaatcatcatgaagtcataaccattgaaattattctatatatataaagagagagaactggatcaacctataaaagcattattatcatttcccttatccattcctttttttatcttttcctttttttttttttcgcttttcaggaaagagttcgtctgaaaagattatgtggtagaccaacttataataattaagacaatttttcatatactgctgaagtaactgttctgaagggctgaagtttgtatttgtcatttttaagattactgtttcttaatttgtatatacatatttatttatatagtggggattgttcttagttctacttgagttgtgttcttgtagatgataggcacaatgttctgaacagtaatcgtccctgctccaatatgttctagtataaatgaatcttcagacattttagacagagataaattttatctcttaaacaacacattcaagtcatgtctttcttttatgttcattttccgattgtaattttattttgtttgcggaagttcaagttgttttaatttcaagtaatgtttttttcttgttcttttttttttttaataaaatgataaaattcttgataattaatacgtataattttaccccaagagtaattcaaatagtcaaacataagatctacctccacatgatttgagatacaactctctcttgagcatgctattgcacttattcttagttggtttctttcgaagttgtacatatttggtcccatcccaatcggccaatccctgaatattcataataagttcctccttttttctcttagaaatattgcaatgttgttgttggttaatgtagatagatgttatgaggccagtttgggattcctttgctgtatgtgacatgagtcgaccttagagtttgctgtgctgttgcagcccattgcttggttccggccggcaaggatgccgctaccggcagcctgttatgatttgtcattggctagcttgctgatgctttctgctgattcaaagatgagtttgtgttgaatactcaagtttgtttatagtttaaaaaatgaagtttataactttggttttaggtagtacagcgatcctcaatattatcaaaccgtctatgcactatgaattgaaaaataaaaaatatatgattcttgaatctcgaaaccaatctctttttttttttttttttttcaaactaggaggattgacatttggtcaagatgttatctatctctttccttggttgtggtgaaactttagctttctttagtgagggtataacatacatatttgattaaaaaaacagtaaaggttgttaaaatacagaatatttttaaacgggaaatttgcagtaccaaaactcgtttttttttacacttaattaccaaattttgtttcgctaaagatattaaaatgttactttttcttacgttttggtatcaaacgtttaagtttgatttttgaaaataaaagttttagtatttaattttagtaaacataaaatttaactaatttcaccgtattttaactttttttttttttttcttttt

SEQ ID NO: 15562 - DNA, 9153 bp, Cannabis sativa
aaattcaatcttcgagttatgaaaaagaaacttttttttcccttctttctaaagtcttcattctaagtgattggacatattattatttataatatttttcttaacaacactttgattggaagggagtaattataaagtacaatccaataagagagaaagagagatgcacataacagatagataattttttttttttaattttttttttttaatgtaatgaaaaataataaaagatatagagttctactactattaaacttccatcacgtgtagtgtatatatctatgatttaaactagtttgcctgtgttataactttcaagtgcattaaagtgatcaaaataaaactataaaaatttatttatttttcagtacaataaaattaattaaataaattattttttctaagacccatcaacatcttgtatcttccttatatgttcttctgcccattgtgcttttctttccatcaagtccctctgtttttggtatattacttttttagaactttgccaactcattacagagatttctctttgaaataaattttcaggttcttctttttaggtacatatgattctaagatctttatgttcgtttttataatatggtcaaattatatatattattcttcacaaacaatatagattctataacctaagttacaacgttctacaatttcattcgactagcctaatcattcagttcttttttctttcaaagcaaaaaaaaaaataataataataattcaaaacttcacatatgattatttatagagaaaaatggggaaaaattcacagtcatgagtaaaaccctttgtgccgccttgcatttcgctcaattgtcacggattaaattttattttatttaaaaataaaatatagttttttaaaatatattataattgactgacattggaagtgatgaagtacactttctactaggcaagaatttacctaaaaaaaaattgaagaaaaaaaaagagaaaaaactaagaaaaaccatttgatttgatttatttatttatttcattaattttgttttgttctttctttacttaacaatgaaacaaaatattaattcccctagtaaaaaaagaaaaatataattaaattatattgcattagcatcaaacaaggcaaagattacgtttttcttttttcctttttattaaattgaattttctttgcttaatttaattttattataggttccccagattttatatttttcccaaaaatatttatttatatgtcttcttataaatacagcaaagtccaagctattccactcgaggggaagagagattcccggagaaccgtgcgtgggcttgataatataattaatttaaatttaaacttaaaaatgatttattaatttaaacaatttttatttaattattaatcacgatttctcactaataaaacaattaaccctacgtgcaggccaactcagctcactattaactattcaaaaccaagaaaataaaaattaattaatcaactgatcaagacctaagtttctgagcgttatttctatattaattactgttattattatttttaaaacactttttgatgttttttttttaaaaaaataataattgtttttccttctcagaagcgaagtacgagtagagacaagctccaatggttaccatcgataaagacgccttcggcaaagattcaacggtcaagatgttccctttacaagctgtaaatctgagccgttggatcagttcaggtataatctcagcttttcgacattaaaaaggacaggtccatccatggagtccatgctgagtcagtgtaagaaaccccataatagtatgtctttcttaataaattgactattttgtccctgtacttttgtttatcaaatcgaacaaataagggtaatttcgtacttactgttgtaggtccccctttttgtctaatattatttttaagttttgccattttgagcaacgaaatttattatttacacgagcccttttttaggggtgtacgtgtaaatttctcttgctcatggtcatcaccgtccgtacactgtaagaaaaaggcactcatctgacggtcttgattaagatgcaacgtgcagtgtttttgtacttttttaaaaaatttcctcagtcataatgaccattcaattgggttaataagtaagattattattatgattactactgtattattttgctattattatattctagttggagttatcaggtgccctcaactgcaaaaatattaataccaactcttttttttctttctcaaaatctaaaataatacatttaaattaaaacccacaattccaaactcctaaaattgtagcatagttttgccatttttgacaaaattgtaaatgctagttagatttagatttagttgattttgattttatttgtgatacttgataaagaaagagaacagttttgctttatacacaatcatataccaatcaagacagctcactttaaagtatataatgttttttattatttgctaacgaagtatagttattgagttggaatagggagataatagatagataagataaaacatagtcaattttataagaaggaagaaaaaatccaacaaaaacactgtttagatcaacagcttgcacataatttttttttcattttggcatttatgtaaggtcaacataaaatagttgtatacttatctcattaatgacagaagactttttagcatcaacatatgtatctcatttccatcaacaaaaaaattatgaaatagatctaggcagttcgaaatgggtaaaattgataagtgtacaaatttttaatttttaattttttttttggggggttaaaagaaaggaaaattgggagagaaagaaagagtgttgaggcaaaaatcaagatttgataagagtaccagcgagaatgaaacagtcatatatgattggacggccatgatgtcatgataacaagacttcacatcaaatcattctctattattttattactttttattctcaccatcatatggtggtcccctaaatatcactcgtctctctatctcttccccacggatctagccgtgcaacgcgaaccatgagattctttcctccttccttccacacccccaccctgacttccatacacaatatcacactgtataataacccttttcattatctcgtacagagtcaatttctcccggtatcttgacgatatgattcgaatcatttctaaatctcggttctctcggaacacacccgcagacacacacacactctcgctctctctctcccggctccacgcccttacgtacacccgttttatgcggctcttcttcgtcgaccagcggataagatcaccccacccccaccgcgtatctaacggttcacaattattacttgacacgtggcgacatcataacggtttatcactgttactagtgtaaaccccaccatacttatttaaccatggttaaactaaccttacctctgccacaacataaaatgaaaatccttatcctctctccctgtctcaaacctctctctctctctctctctctcttctcttctcttgtctgcaagtaataagctttcgtcaatggcgtctcagatctaacccagattctcaaatctatagaagcaatattggagaagcttagctttattattatttttatttttattttcccttgcgaactttgtgaaatcgcgaagctcatcagcgagggtagtttttagagaaaggggttcttttagttgttgtaatgctgagaagaatggcgagctcgttcccagaggaggtactggagcatgtgttctcgtttatacagtcggatacggaccgcaacgtgatctcaatggtgtgtaagtcttggtatgagatcgaacggtggtgtaggaggaagatatttgttgggaactgctacgctgtgagccctagactggtgatcagaaggttcccggacgtgagatccattgagctcaagggaaagccgcacttcgctgacttcaatctggtacctgaaggctggggtggatacgttcaaccttggatcgctgctatggccacggcgtacccttggcttgaggagatcaggcttaagaggatggtcatcacggacgagagcctggagctcatagccaagtcgttcaagaatttcaaggtcttggtgctttcctcttgtgaaggattcagtactgatggcctcgcagccattgctggaaattgcaggtatgtttagtttgaaaaacttattttttatttgcttcgatatagttcgtaagtttcaaaatggcagagtaactaagagaaaagcagtgaaattttgggttttgctcgaaatgttagtgcggtcaattgcaggttgccaggtttagcttattttgtttttaaatatcacttgtccttccatcttggctattctctaaggaaaaaaaagagtcaactttcgtaacatgaattaacagttgaactagatttatggacttactgaagtcgaaagcttctgcttgggttgattttagtattgtactagcaggatttataaattcaatttctcagccttgggagtattgtttttaaagcaataatgttagcattcattgttctgttccacaaagtctttattttttatttttttattttgtttattttagtggtttggcctacagatgaggaagcagtggtgataggattctgctctctagttttaccaatgctcttacccctccgtagatctaatattcaatgtctagtaaagataatctgggttgctttttctcttgctggtttctttctcgtggactgttgtgaagtgaggtttacgaaaattttataatgtttgcttgttggattgtgttgatatatgtttccgaatactttagattctctaattcatacattttgtttttcgtaagatttttttttcttttgtcattgcttgcgcataaactttggacttctgcatattctattttaaatgttacgtaggctacgtttctgagaactgtttttgcttgttggataaaattctcaagatttatatttattcataccaatggagacattgggttcgtgatttttatgaagggataaaaagtatgtcttctgatactctaggagactagtgattaactgaagaataagagttctcacaattctagtgtgagaggaaacttcatagattcagtagtgtaaattgtcaatgccagagggttttgtgcttcgtttttcttaatatacaaaattgaattcatatttctgctttcttttacgttatgtgaattttcaaactactttgttgatcagtgctataattctctagcctgttataaacaagtctgtttatttgttgatgcaggaatctgcgagaactagacttacgggagagtgaagtggaggatctaagtggccattggctcacccattttcctgatacctacacctcattagtttccctcaacatttcttgtttattgtctgaggtgagtttctctgcgttggaacgtcttgtgggtagatgttccaacttgaggagtttgcggctcaaccgaactgtacctcttgagaagctagccaaccttctccaccgagcacctcagctagctgagttaggcacgggggcctgccaagctgaattgcggcctgatgtcttctcaaacctagttggagctctttcaggctgcaaggaactaaagagcctctctgggttttgggatgttgtgccagtgtaccttccagctgtttactctatctgccctgggctgacaactttgaacttgagctatgctgccatccagagccaagatcttatcaagcttataagccagtgtccaaatttgcagcgactatgggtatgttgggcgtgttttattgttatttgtaaattatgacatttaacttgcctttcctggtactttgagggaattagtcttgttatggcttagctaattactgacatgataacaggttttggattacattgaagatgctggtctggatgttcttgcggcaacttgcaaggatttgcaagaactacgagtgtttccatcggatccatttggggcagagccaaatgtgttactaacagaacaaggtcttgtcactgtttctgaaggctgcccaaagctgcgttcggttttgtatttttgccgtcaaatgtctaatgctgctttgatgacaatcgcaaggaaccaacctaactttacatgctttcgtctctgtattattgagccaagaactcctgattacttgactcttgagccactggatgctggttttggagctattgttgagcattgcaaggatcttcgtcgcttatctgtttcaggtctcctaactgaccgcgcttttgattacattggtactcatgcgaaaaagctagagatgttgtctgtggcttttgctggagacactgatttggggctacatcatgtattgtccgggtgtgaaaaccttcggaagctggagattagagactgtccttttggtgacaaagctcttttggccaatgctgcgaagctggagacaatgcgatccctttggatgtcttcttgcaatgtgagttatggagcttgtaagctgctaggtcagaagatgcccagactcaacgttgaagttattgatgagaggggacctccagaaactaggccggagagctgccccgttgagaagctctacatttatcgatctctctctggaccgaggactgacatgcctgattttgtttggaccatggaggaagattctgcaatacagcagctttcttgatagatcaagacaagcaccaagctccagaatcccaacccctcattatgcttaaatggatatatatatatatataatggcaggtacatgctttatatggttctgacctgatcccccatttgatttatgctagcttaaatatattgcagctcggattggagtaggccagggaccatggagagtgtataagagagaggctcagagctcgattgccattcattttactctttggctgagctatgccataccaattagtactaataataataaaaaaagagatataaactcctgttattgttgtcgtatgtatttgaacagagctattttattcgggaattattcgttcaaccttgtatacttctatctgcggacccccctttttaattttttttttcttttaaatttcttctttgcatgttcatgcatttattttaaggtgcattggtttcagtaggaaagtaaaaattatcgtggacccatctgtatcattgttggcctttctcagagaataaagattcatattctattgcacttgcagtgtgtcatgatgaatttattggatgatcatttttctgtcaatgcgaatcaatctagaataagatctctgaatgtgaaaaaaagtgttgtagtttgaagtttcaacaaaagggcctaagtcttaggtaaaatagatccgaacttagattgtctggtactgaaattttgtgtgtgaaacaacaacaacaacaacaacaacaacagtacatttagaatattagtgtactaaattcaagcagaagaaacttgaactaaaaaccaaattggcatggacttgtaaaaatacttattctataaatatattggccaaatctaaaaggagagtgatttttggtcgtaggctaagctttttagtaacaattcaggaaagaatgcagaggcagaaatttactgagctgtaaaaagagataataaataaattttgtctggtaaatgctctgctgtctcagttatggtaaaccctttaactttttctttaattttgttggagagagagagagagtgagtgagtgaaggggcaacctcgactgtggtggcacgtgatggattcggtgagattgtatagcgtccacaactttttgcatcattcacgctctcttttctagtccaacaccagatgacccagcataccaagaagaagtacttaaccctttcctcctctcccctactaaccaccctttcaaatatcagatatatttttatgtatatttttaatttgaaaaaagtaaagataatatcaacaaacaaataaacaagaaaagaggccaggtatgactgatagtaacttaacatgaagactgctcttcccacttctgacacacaattttaaaaaaagaaaaagaaaaagaaaaaacacaagtaattgaaattaaatagagtgataaaaatgtaggagatttttgttgaaaacttgaaagtggttcttgtaaaattttgcagacatttttattgcttgatgatggccacacgtttgaggttattgatgatggtgatgatcaccatcattcattatcatcatttttatgctctcttcaatactctcttttttactgatttcgtcactcttttaatttatttatatttgtttaaaaataaaagaaaaactgtttcaccttaaccccattatgaattatgatatcactgtagttggttgatgttgaatgattataaagttacaatggttcagttaaagttgcaaatgtgttcaggttacagtatgtatagacatggagatggtttagtggggtaaaaaaaaaatgattctgactttagaatcatgacccgtttagacttcttcttagattcttttttttttaaatttctgagtctcccaaaatgatgagataagaacaacaatacaataataggtttaggaggatggttattgtttaaagccaaaggttaataatactatttccccaacagagcagtacttgttttatattgagaaactctggtttctcttgtggcccatttcgtgttaagtcaaccaaccctaataaagtgtattaattatctatatctatatatctcttcatacccaaataaaagtaattcacaaaagtataagacaaaatgaagctgtaattgatgctgttgtattgtagttactcactcaagatggatcattttctttttcttcatcaatttttctaaatatttatgaaattagtatttttttttagttaaatatgtgtttttatataaatatagctatttaaagggttttttgttggattaataaaatatttcaaaaatataaaactatctaaatttcacggtattagtagaattaattttataaatatatataaatattaataatatttattttagattaatataaatatatataaatat

SEQ ID NO: 15563 - DNA, 3957 bp, Cannabis sativa
  modified_base (3923)..(3926): a, c, t, g, unknown or other
tctagatcctgataaaatatattcaacaaaagcaccacccttgtagactaacacgaattgccttgtactcttcaagtacttcgttggagaaaaggagctcaagattgactagagaaatattgttccaataatttttagactatgtacgaagtggtgaagttggcaacaaagaacaccctaagtcattgaagatcgcagccaagaaagaagcaattgatctttgcgtttccattggaaataaaattgggaattaggtttgccagtataaagaatttgcgatggaggaacaccagtaaacaagatctcatcaaaatcatgtccaattacactagggacaacttgaaacttccaagcaaggaagttgatgtgatcaagtttgattttcaaggaagctaaaagaggatgtgcgaagggattccatggattcgaccaagaggaggggccaattgtgtgagcagtagcagtggtagctgtgagatttgcaggatcgagttgaataccaaaggtgttctctgtcgatgccatcaaggacaaaggtcaatatcgattgacaccatgaaaactttaacaatggcatatctgaaaattagaaaagagtgagaagcagagcattaaagagagagagagagagaaatgccgaagaagcttagccaattggtttgccttgcactttatttatactgatcgagtttgtacagaaaatagaaagaactaactgaaactcaacaacttgctaactaattttaactaccactaactaacaaactaatcacatagtgttactggtttacatcgaccaagaaacatcacctagcacagaacagcctttcaagtgagttgtttctgagggatgtagaagatgcatggttaatatgtagttcaagtgtggtgtacttatggttgggtgctccatcctttaagttcttaatacaaacaaaatcactctttatgtactctgcagatacataacacgtgtaaaactacatattgatcctgaactcttccaaggatggagacgttgctgaagcattattacttgatgacccttgctttgtcttcttcattcgcttcaaaacaaaaattgatgagcaaaaattgattctcgatgtcccatatatatatatatatatatatatatacatatatatgtttctatagcacccaaattaacgcctaatattatttaaattcataaatgtttgtagggtactaagtaaattcaattttttttttttaagaacaacggccaacctactccagtttgttatatgtttattttataatttaatcttaaaaaagtatataatatataaatatataattgtatcagatcaattttaattagattttctgacaattttctgccaatccaattcaattataaattaataactttttattttgagtgtgtgtttttgcttagtttggatttgaatcagatcaattatagctcttattggattggatttatagcaacccactattttatttgcaaataaataatcaagtaagctctacaatatcattgtaatttccgagttatgataacaaggtatatgtacataaatatacttagtatattggcatcttagaaagtcaacacattacagcctcggttggataagttttatcgttataattttattaataagaaagaaatactgtttgactaataaattttatacatactttttatacacaatttatttaatttttgcaaaaattattacatttgagtgataaattttttattctatttctgattgagtgactatattaattattattggaataaacacataaacaataacttttgtaaaaattttacatttttttttgacaatttttttgatattctataaaaacataaaaaaaaaaaaaatgataacaacaaaaccacattaaaataacattaaaatacataaaaaaaaataatatacaaataataaaaaataaacaacagaccttattttatataaataaaatttaaaaaccaataaaaatgttgaaaattgtttttgtgttgttttgattatcccttaattttttacttgtatagattgagatgacttacatatcattatataattgaaatatattttaaagagcttgaatgattttgtaagttaggattcttacaacacatgattcaaaaaagtctcacttatccgtgtttgagcagtttctcctattatttttacaaactctcttcttgtatcaacacactgtcacccattaattaactggtttccttaattcttaccaattacattttcctttataaaaatgaatcataaatcttaagaacttctcattttttttagaagatatgagtataagaaaaaattacatactaaaggggatttgtgtctatttccatgatttttgcatgttaaatttgtatatattatatatatattgaattaattaaattcatagtaaataacaaaaagagacaaggttaaattcacatatatatacctttgcatatatatatatatattgaattatatatgtatataccttgaattcatcggtgttcttccaggccttattcatctcatgaagtaccatttcaatatctgggcgatctttacttgagcttgcaacacacattatagcaattgaaagaatggatctaaaatcagccttattgtacttccctttcagtcgtgggtcttcaaagtcctctatgggacgattccctaaattaacatcctttgcctgaatatatatacacacaaggcatgcacatatgtttaaataaatatccttttccctttctaattaattgacgtcttaaatatatgtattatatatatacctttcttgtgagttgatcactagcaacgatatttagctcgataactttctggccagccaaaatttggagagtgacgatgccaaaactgtagatatcactggcacatgtcaacttggcgttgctcatgtattcggggtccatataacctatggttcctctaatagcagtgaatactctactttcctccatgttcaacaactttgccaacccaaaatcagacagctttggctccaatgtctcagtcaaaaggatatttgtaagctatatatatcagaatattattatataaattaatattttaacaatccaataaagttaatttgttatttattagattaattaatgatgagcatgcattgcaataacttatcaatactataccaatgtagattgccattggttaacggtgttttatattatttattaaatcaatttatgtgagacacggtattgatatgcacgaataacgatatgccacctcttatagtgcaattgataccataaggtgcctcttatggagttgcatactcgtgaattgtcttgtcagatatgtaatgtggtgtaatttttaagaccaattttttgtgaagtgttgcttacaatttttagacttgtcaatattaaaatactttttttatgaaaatattgtaaaattttatgtggataagatagaaaataaaaaaaaaataatatttagtattttttttgataaaaaataatttttagtataatatatgtattctgaaaatatagatattcctcattcgagatactcttattagcatttctcattaataatttacgtatgtaccttgatatctctatgaacaatacagccatctatattacggtgaagatacctaagtgcaatggcgcagtctcgtagaatcctcacccttttatcccatgtcaaaagggtatctttccctggaaagaattaatgcatatgaaaaattattctctgtaaattgaacaggacgactccatataaaggtcgtaggggttctttatttatatataaataatattgtaagacaattgtagttatcttaaactgtcatacaccacaaaaattgcataggggtgtgcataaatcgannnnatccaatgagaaccgaccgatccaattacaa

SEQ ID NO: 15564 - DNA, 7847 bp, Cannabis sativa
tttagaaaatacaaggtccattttgtcatttaacaaaatacagggtccaatctgtaacttttacaaaatacagggtccaaaatggtatttacccttttcataaatatattagatattaaaattttaggtatttctataacttaacaatttttttttctaaaatataactaaataaattactttagtaaaattagtctccaatgtttcacatataaaacttgaaagaacaacgcactctattttgtgaaaatttaaaattttatttacgaccatatgcataagattttttttttgtgagagtaactgttataggttagataaaaaaaaatcataagataaaagtgaaaagatttcttccatccaaaaaaatttactatctttcctaagggcatgttaaaccaattcatgtgccgaaacattaacattgcgacttacataataaagagatacttcggggaaaatttgaatttttatgcatcttttaaagcataattggtttgataaacaaaaacttaaggtaattgttaaaatatgactattttacttaaaccccaaaaatacctctctcataatcacctcccatccttccccttttaactctgcccgcacgataccccatcccaagaacacatcaactcacaacgcccaccccacagcaccattccgactgacccccacccaccattcggaccgatcgattaccgcacggagtcaaccgagtattccgactgactactgcacggaggagaaccccaaacccgaaatttattgtaccgggtccgattggtccgattggggcccgatgggtacccaaaaaaaaaaaataaacgtgtacaatgatagggatgaaatagtaaatttaaatttttgtacgaggcattttggttatttatcaaaatcgatgggtcattttatgaatttatatataaaaagaactccatactgagtgtatttaaagtctaaattaaatgcaggctaggacaaaccagaccaggccagctagcctctcttctctctttcgtataagatttcatcaaactgagttgctcagatcgttagtgtaacaactaacaagtgtctccaatggatacatctcttatgacggagtttctcaggaagtccggtggtgccgccgttatcgacggcggactcgccacagagctcgaacgccatggcgcggacctcaacgatcctctatggagcgccaaatgccttctcacttcccctcatcttattcgcggggtactctttctacctttttattttcctttactttgcttgactatgtgtttgggtgtctgatttttctttctttctttcttcatgtatgaagaatggtacttattaacatgagttatgtttattcataaacttggactcgaaaattaagaaataatgaattttgattactgggttattattgaaattttttcccattaggaaatcatctattgggattttgaatgtaccaaaagtgattttaatcgtttcacttgacatttattagggagattctttgtcttctggcttgttagtaagtgcacctatgaacaacggctaaagattctgcagtgaacttattaactcaatttaaaattatatggatatacatggaccactaagtggggtggttttttcttttgtcttgttcggaatttatatttgaacttgtttctattggagttttcatcattaaatttggaccaccatatgggcatgcttctgacacatagcaatacttctctagtatcactatcagaaatcaaaattttagaactagtgctaaaccaaattgttgctatgtagaaattcttcaatggtacaaactaataattactgttgggtcttttttttttgcttaatgagcaggttcacattgattatcttgaagctggggcagatattataattacagcatcttatcaggtaagtttctttaaccagatatatttgcttgtttcataatccctggaactattacattaagttataatgttatatgcacatgtacacaggccacaattcaggggtttgtagccaggggctatacaaaggaagaaggcgaaaccctgctcaagagaagtgttgaaattgcccttgaggctcgagatatttataaggcaaggtgtgaaagcactcctagtgatattgtagaccgtatagttctcaagcatcggccaatcttaattgcagcatctgttggaagctatggtgcttacttggctgatgggtctgagtacaggtatgtgaagttgcttctgaaattcaatgaataagtttttgatattcttgacttttgtttactgcatgagattggcaatgttagaattgcaacaaatgacaccttttttttttctcctgttgtgcatccctttacagtggaaattatggtgatgctattacgctgaaatttctgaaagattttcatcgaaggagggtccaagtcttagctgaagcatgtcctgacctgattgcttttgaaacaattccaaataaattagaagctcaggtattgatgtttgaaattcattaatgttttagtttgaggaacttaatggttttaatgcctaaactttgatcatgatggtgtatgctgttgatgcaaccaagtgccaagtattttgggctggaatgatgaaaggaaatatgtatatgatcactagctatgaaagaatgttctcatttacctgtatgatgatcttgtgtaggcttttgctgaactcatggaggaagaaagcataaatattcctgcatggttttccttcaactctaaagatggtgtcaatgtggttagtggtgattcatttgtagaatgtgctacaattgctgaatcatgcaggaaagttgttgctattggaatcaactgtactcctccaagatttattcacggactgatatcatctattagtaaggtatattcttcagagcacaattaatgtttttcataaattgtaaagttaatatctacttgtcacactgtagggatagaataagaaaaataaaaaagtgatagcttttctttcataccacaactgatctacatgcttaatttcatcaaaagaaaaattctttcaatcatttattagtcatcagcattaatgtttccattgtcaatttgacttatttcaagaaggatcttaatacagtatccattttctggaattatatgttcctcagtggaaagggttaaaattgtggactttattatttggaacaaattcatgatgtttttttctcaatttctttgctgtacttaacattggcctctggatttcgtacttatttaattttgttataattacttcaggtgactacaaagccaatacttgtatatccaaatagcggtgaaagttatgatccagttataaagcagtgggtggtaagttcatttcctctggttgcacggtcactacatcgaacattatatattgtttcgctaaaaattttttcacataaagttgggcaccaacaaagccaaggactaagtatttcctttgcaaaaccaatcagtaaaaatagcttgattgttctattgcagcaaaatacaggagtttccaatgacgattttgtttcatatgtaaacaaatggatcgatgtaggagcttctcttgtgggaggttgttgcagaacaactccagagactatccgggggatctaccgatctttttctaataaacgagggcttagcctgagcgacaccattctaactttaaataagtagaagagagcagcaaggactttgtgctggaaacaaagctgttgagaagccaaaaatgtcctgtttgggttggaaacttggaagttgtggcaagaaacatgataggagaagctgagtcctgtttgggttggaaacttggaagttgtggcaagaaacatgataggggaagctgaggttttaatgaatctgccaaaagctacataaaggcacaccaacttgtatcaaattttgtttactttctatgcttttatattactgttgtaaccaataatctcaagtgactaaattttcttttgtagttatatcatcatatgactataatttatcaggattcataactttacgtggtttgttctctctttttcctactcttgccaccttaaacctaaaaacaaaatacaaatatgatatggtagtcatggtacactactgtagtgtgtgtttgtttttttctttttttttttaatgaggattaacatctaattatgtgtattcttttttctgttttgtatacttcgtttatgtgaaaaatccttcagtcctagtgaccaggacttttaatagtaatactactagttctgaaccacaattgcttccctaattccatttgtaaccatttgaactacagggtgtggtttgtgaaatggaactatcttgcattggtttgttaggaaggtgtgaagccttgggattgattttagtattcatattagcagtgacctggttaatagccttgctgacaagacaacctcatactaaaacaaaccagaagcaggtttgtgatgattttgaaacacacaagggtctgtttaataaagggttcaagcttcccttaccggaagccattgccttgtattgctgagagtgaagctttcttggttggttaactacaaagaacatctcaaaaagcctctgaaatacgctcatctggttcaaaatattagccccaatttcaatacatgttgaagttgtggtctgagcttatgccattatttatgtatgagtttgaagtttaatgtattttattcgaatttcgaaacccttggatggatcgctcgttatacaatacgcatgtgaagctactagcttttgaccttacctctctcacccaaatctcctcatgctcaaattctttctctcgccatgggttcctcctctcgcgcatcgaaacccttggagtcgtaacattttgtgacctcaaaccacgaaaatttctcaaattcattatcgatgacggtactggttgtgtcgattgcatcctttggctaaaccatctgacatctccttacttcgctcgtcaaaacccttcaaatgttcaacaaattgccgactcggccatccgttttgcgtcggaggtgcgactcggtgtcgttgctagagttcgtgggaaaatcaccaagtatagaggtttggttcaggtcaccgtttcagacatcgtcgttgagagggatcctaatgctgagatcttgcactggttggattgcatgaggttggcgcgtcaatgttatgatctttctatcaagtgagtttgttttcgatacgataatgaaaaattatagttattgtttggtttcatatacatgtcattatcttatctttactgtaaaaatccaaaacaacacccattgaggttagatcatgttgttagtcttctcttggctcatggtaacggccaaggctccatttcacactataatgccaattattgtttggcaaaaccacacaatatatgcaacactttcatgctgtccaagatactgtacatataacctaaaatcaatcatcaaaaattaaggggacatgttgttcatgctctagttgcaaaactcctggtttttcttcattcaggtgcctactatatcaccctagcacacaccaaattaatgctcccatacacatctcttctgtcaaattatttattaataacataataatattgatgtgtaaaacgatttacacatatatatttgtgaatttgataaataataaatatttatgactaaaacttataaccatttcagctttattagtgagctgttaagttgttctagctgtactaatgcaattagttttcaagattagttacattctattattttatactttgtaatttaatctcaaatgaataaattatgagctcatttgctcattaactttttgacaaaatcttctgattagtttgcttaagttccctaaacgacatttgtctgtgagttcattcatgactagtgataattttttagttacaaacctcgtctttgtagcgatgtatatccaatatcttcgacttaggtgaagataattaaggtgacagtagtgatgtttgtacattttcaatggttaatggtgatggtggtttggttctacaaaactttcttgttcaaactttgtccttactccttaatgtctctatcatagtttccctgtcatatcttcaaaatttagtgcttctcagctaacaatgtccccattaaacttttctttgatgtttttcttgtcattaatttttctacgaagaaattcttcatcaaagcaccctacataaaggtctttatcactcactatcttgctgtaatagtagtttgtccatagctttttaattgggatagtctccatcgattaggacattattataaataatattctcagtctaatatttcctttcttacaataaaacaaagaattattgctgaagttggttttagccacctaaatcattattgttacaggttgttctaacactaagaacattcacactaaatgagcgataagagcacctatattaaatgagttatttaattatcataccaaaattcaacttttgttattttaactcaaaactatcaacttcttcattttatatcattaaaactccatattaatatattttattcattttaaatatatatattaaaatgtgaatgtgaataatataataagtataactataaattaaaacgtgataaatatattattatgtgaataatatatattaatgtgataaatatattattatgtgaataatatatattaagtgtggtaaataaatgtgtaatttatgattttaatccacactttgtaatttatatgttgtaacttgaagaggactacaatttgttgtcacttgtaactcttgtgttgattatacataattagtgtgataaaagagttgctacacaatttgatttaaggaattcaaaactatggtgatatagttgttacaaaatagattaatttttatttatgtgagagaaatgaggtgtggtgtatttgaattcattacctaaatattataaaaaacaatttgttagaaaccttaaaaggcttataatttctaaagctatttctatatatatatatatatatatatatcgtgattctcactattttacattcaagattgttagtgagtaattttttttttttctatatatatgttatataatatcgtgtaatctattcattttttctacaatcatatatatatagtgtatgtgttattttgatatataaaattcctaacaatttggttatatgccgaaacataagtcaaacattccaagagttattacatgatttctaattgaaaataagtgttcatccaaaatatcactccttccaatgtgatgatggcgatgaattatatataggccattttcctcatgtggcatctctcatacaaaaccttctctctatacatccgtgaaaaaggaaacaaacactaacaaattttcgaattaggtccagtatcaatgcttgcacattcctctctaccgtcccaacttttttttttctttgaacactacctctatatgctataaatagagtaacttcagttttgcaattcaaatccccatattagagttttataacacaggtcacttgattattttttattaagagttttccattgttacgatgcatacttaaagcatcttcaacacatatattaaatttagtgtcacactattattatatttagcgtcaaaaaactatttctgcttcaactataacactaaatattacactaaaattgtatccagatcgtatttttagtgaggatgatgttcctcctgattttctttctattgtaatggttgaatcttcttattaataaagttaccatttt

SEQ ID NO: 15565 - DNA, 6516 bp, Cannabis sativa
  modified_base (6477)..(6490): a, c, t, g, unknown or other
aagtcaatctcgaatttgagaattggatagtcaatgaccaacttcttgttgtcgctccacgtccaaatctttagccaccgatgttatgggaacaaccacagtagcaaaactttggggtgccttggaaagcatgtatggtgcttattcaagagaaaaaatggatgacattaggaccctaagtcaaattccagaaagggatcctcaataatggtagaatacttgaggcagaaaaagaattggtctgacattcttgctctaccaggagacctctatccagaagctcacctggtggcgaacatgttatctggactcaatgctgaaaatatctccattgttgtgtaaatcgaagcttaacctaaatccacttggcaggagctgcaagacactccactaagctttgattgtaagaactaaagactccaaaccttgatgaaaactaataagattgcgaatgttcctgcattaccgtaagctaatgttgcctctaaatccaacttccataggcacagtcaaggtcgagaatccaactctaataaaaacacagaacttggaaatggaggaggttatttctccaacaaccgtggtaaccgttcttgagaaaggggaaggtcaaatggtggaaggccaacatgtcaggtgtatggaaaatacatacactctttagttttgtgctattatcgatgacaggtacatgtgatctgatcaaggaaacaattaatcttagtaaaacaaaacaataatgctttatagttacacttaagatagttgatagtgacgcctagtttgttaacttggagcgtctaaccacatcacctcacattcatcttcaatgagccaccagaaagagcatgggagtaaggagactatcattgtatgtaatggaaataaataaaccattttttatatttgtaatggcttttcacatacaaattatggtaaacaattatcgttgaaagaagttttacatgtttttgatatagctaaaaatcttattagtgtgtccaaacttacaactgataatcccatactaattgagttcaatcaaaattttagtttgactaaaacaaggacaccaagaaggtgctcctccgaggggtgcttaaggacagtcattatcaaatttcatcaacaatatccaagtcagcttcccagtccaagtctatcttcactattcaatcaagaacccacaagccagtgtcatctactagttttactactgctcgtaatgtcaatgtacctcagcatgttgctgatagtttttccattttcaaaataaatgtgtggcataggcgtttaggacaccatcttctgaagtcatgagtcaaatgttaaaatccacaatgtaagaattttcagaaatgaaatgaagtattttgtgatgtgtgtcagtattggaagtcacactttcctccctttaaaaactcttaaaattgtgccaaggacttcttggagctgatccaaatcaatctattgggattcgctctagttgcttccaacaaaagtttttaatattatatccattatgtggatgattttagatatacatggcattacccttttaatttcaaatcaaatgcacttgatggtttcttacaatttaaagtccctgttgaaaacaaatttgacaagaaaaattaaatgcttaaggtctaactggggtggttaattttgttcctttaatgagattgtccaaaaacatggtactgagttcaaccatccttgttcgcacacctcagtgaaaaatggccgagctgaggaaaaacatcaatacatttttgttgattctatttgaggcaagctttctactcaaagattagtgtgatgcttttcacacaacagtatatctcataaatcgactgcctacagttgtgttgacacataaatctccttatcaaattgttgattcttgcaaactggattgtaatttctttaaaacctttgttgtcgcatgtttttcttgtctcagaccatatcaagctcacaaatttcagttccattgaataaaatgtgtgaaattgggttatattgatgatcataaagggtactgacgcttaagtccaacagggcgcatatatatctctcaaaatacaattttcaatgagttagaattccctttcacaactgatttttaaataatcatcaatatgaatcttctgccataatacacaacacctcatagtcctctcctcttacttaatcttttacatccaatgctcccattatttccacttctactgcaacatcaccaacactccctggagtagctactttatatttgtcatcacaccatcatggaaatactaatggttcattgtcaccatctggtacgatttcagtttcattagaggtaaaatctcctaacagtgagccaattaattttaatttcaatcttgatcaatactcacttttctaattttatgttgaaatcatagatcatgcataagatggccattcaaacacacctaataagaactatttactgagatttttggaatctgactatattaagagcttaagaaagaaacaaactaaaataattaacacaagatttttacatgattcagaaattaactatcctttgtctacaagtccatattattagccacattggcaggtgatgaatattacaagtggatacacaatggactagaactctctattcctctcgttactcttgaagaagaagaagcttaataggaatttttttagagttttagtaactagaatgaagtgtttttaccttccaagagttaccgctatcttatggaatgcaagggtgtttataggccatttttcctttcacgtgcttgttgggaaaatcttgctaggtaaaatcaaaccattgatttggtaggtggtcaattcatcacatggaatttaacaactgggcacacatgctctatgctactgcataacgtgggggacaaaaccttgcatcgtacatgaaaaaggatggctatcatgtctgcagtctgacatatacgggcagagtttccccgtgacactgaacaggtttacagctcatcttgacttcgtctgtgaactgtattgtcctactcgaggaagccttcatccttccatcctactcaaggcgttcagcttcaatccctgagactatcagagattactgatcgtggatgttccttgcatcctttcatttcatgggagtatcattttgtaaaatccctattttggagctacggtaatctctcactggagctacggtcaaaagcattaaccagctaactataatcaatgctttcttagtcagggtccacgtgttaagcttgtaaaaatccaaacaacatttaccccaagcttctgggacggcatgcggtctgggagcttgcagtatttcttcacattctcatgattggcttctaacatgtggagtatcttcaagatttttattatgtcatgcaagtggccgtcagttgatgttttactatcagtggatattattttcattgtacacttgcagtactttaaacgtcgactgttgcaattcgcgcacgtcttaggctcatgtctggggagacaccaaaatggcggtgaatcaattgagtagaaccttcatttaataagaactttacacgatacatgttgtgatggatgttaaacgtttagagacgatgcatcttctcagctccccgtttgtcagatctttagataccatttttgtgaatgatctgaatcttatacttctcgtggaaggcaggcctttaggtatccattaaatactcacaacattcatcaccttttaagtttcaatttttttttcgtcgttcacactagagttctatcaattcgtctcatcttttcatttgctttacaagactcgatcaactaacccatcttcagtcgtgcacgccaccaaaccaacatagtagagccatccctcgtaatactcttgtttatcaactagtaagtgtaatctgccactctttacttgacgcaaaaatattgaggttgaatggtgtatactatatacgagtcactattctgagaatgttggtcccatttatacggtcttttgaaaaagaaaaaaggaaacttgatgccttgtcctatactgacgcgcttaaccgcacactaccttatgcaggcaattcttggtctgccatgaagagggccaactcttcaaaatttatgggagacattaatctttccaagaaaagaaaaaggtaggaaactactcctagtaccgggggccactccctgcttacaagacccacaactcaggctaggccagccccgccgatgctatctatctattctcccaaaaattccctctatggggtttgtgttccccacaaaaactatccctcttgatgcccacgccatgcagtgtgagaaggagataaaaaagcaaagaagggattgttacacaggcagggtaacatgcttttggtcgttaagagggctgaaatctcagaaggccttcccaccctaaccctaactaggccaatggtcaaagtggaggccctagagaattgtctagcacctatggccgggagtgaagcttcaccttttgcacttgaactcctggactgggtggctggtaatgcctctgagttacccttggagacttgggcaacctgaaaagctttcgatgcttttgccttagcccatggtgctaagaaactagcaattggggtaagcttctgaacctcttcattctaaattttatcattgtatgtagcattcttatttttttctgaatgcaacagggggctatgctggcaaaaagggttgttggagaggttggtatgctggtcacggagcttgagtaggccaaggttgaaaactgcaacctgcatgatgccaatgagaccccttttgctgaacttgcagaggccaagctttagattgaaggcttgaagaaagagaactggctattggaagataactatgcccagcagaatcgcctcatatggagcatgagggccatccatgacctttacaaggagaccatggagaggatgcctggggtagagtctttcgatccacccagtagaacccatccttttctatccgtagcatacaacaatctttctttttcttctcgtttttctacataatcctccccctttttactctttttatttcatggagacattttaactttgccctaaatgcaggggttctttgtaacaactttaggttcttaccctttccaattgaagcctcacccctgttttgttagacttatttaagggttatttacgttaggttgctttgaattgtatggttccaacggctaccacttcaacccttttcaccaaactttgccctttcagctaatttggggggcctctataaacttcaatttcttattcctagattaccaagttattaaggagccttagtaattttagcatgcccttagtagctaattattcattcgcgaatgtttctcacggaatgctagctcaaggatggttttcttcacgaaaggggagttccactttccaattacctcttaggctcctatatttttatgaagttaggttccgggagtgatgcacttaagttccatagacttcaggcattttcccttgtccgggaatggagctggaaccataacgactttaagcgaatttccctatcttgaaccttgccaacatagcctttagttcgttgcaaaatcccgatatattaaatcttaggaaactaatgagaccattgagaaggagtctgggtggatttttcttcttgggaagttttgctaaaaatgcatctcatcactagagttacgcaaatatttaattttgaagaaggatttaaattgttttttcccttaggaaatttgtgttgaaaatgcttcctgtttttggtttcatacgcatggcccgctaatagctctgacaaggtaagtgagttcaaagcaccattggttcctaggtcatacgcagcaaggcataacaccccctattgagttgagagatttggacgcctccaaattctgggtcatttgtctaaaacataacttgtgacactaccgtgtcactttaggccactgaaggggatatatgagaggtacaacttgacttacgctcatactccaatcgtgctctctccggctatggtcacctgtgaaggactcttttcgaaagacaacgaacgcaaagttgaatttgtcagtggtcttttggcttccacgagggaaggcttgtgccacactaaaattccaacaaaggcttcatgcttaaaactatagatgaaaactaagttcggtgaaggactttaggaaatcctcctcctaaaggggagggttcaagtcgcatctaaccccaagcaatgttttcacccaaaagatcataaaagtaatccataagcacgataaaaattatgcggcgagaatatacatgcctgtggaacccatgttgaattggctggtagactttggcttccatgaaggaaacctaaagtcgcactaaaatccaaacaacgattctattggaaatattttaccannnnnnnnnnnnnntaccatgtatgtttcattaacatcct

SEQ ID NO: 15566 - DNA, 4252 bp, Cannabis sativa
taatatattgtccttgtaatattttgtttagagttgtaattgtcttagtcttttattcatcttattttattcttccattgtaatctctctattatttctaacattaaatatatcagcaaaatagttatgtataacaaaagagatttcagccttagaatgcattttttgacctgcatcattataaaggaatttgactttattgttggacttgcgagcagtggcttttgcatggaaaattttggtatctcggtcaccacaggccagccaatcaacccgtaaatgttgttgccagtagatttcttctgctctaataagtcttctaggatatcttcagcttgttgcaggtcatccagatggctgcttgtgcaagctattgtgttatttaaattagcaactttagcttgacagtcattgatgtttttcttcattttgccatactttctaatatgccaatcttgaagagattcggcacaagattttaggttgcaaaggactgcagaaatcaggtcagttgaagttgaagtaatctaattattggaaataatctccttgctttcaggatcagacaaccacaacttctcaaaacaaaacccgctcttccatttctccttagtgttaggtgatgagagtggtacaaaagtggcagtaatggctcggtggtcagattggtaaaagtccaaatgtcgcacttgaggtgtgttaaaaaaagtctcccaatagttgttgataaaataccaatccaagcgttttttaattatatccacaattgtgtgacttttaatccaagtaaaaggatcaccatcatagggggcttcatgtaaacaacatttatctaagacaactctaaaggcatccatttgtgattcattccgaagagtaccactgatttgttactattggaaagaattttattaaagtctccaatggctagccatggatggagtggagcaacatttgcaaaatattgaaaaaggatccaagaggctgatttgttgttggttttaggtgccccgtagaagccggtaaaatgaaagtttggtcccccatcggtctacatatagcaatcaaaaaaattggggtcgtacgtaatttagtaaagtgacatccacttcatctttccacaagagcataagaccaccactaaggctcactctaggagcttctatcccgttgttcaaatacaaagattgtcagacactattaattgaattacactgagtttgttttcataaaaaacaaaatgtggggtgatttttgttgaacaagcaatcaaaggtgtttgaatgcactcgactcgtgtattccaactaagaattttcacattgatttgtggggttttatagcaacctccgcacttgagtcattagagaaaccagagtttgcaacatcagaaactagtatctcagaactttcttcccttgacaataaagaagataatgttccttggataccacaacatcttttaagcatttttctcatggagaaagtatcatttgacctcttaacagttgagttaggtgattgatttcgttatccacaatcactattgctggagtggtaatgcagcaggggcccggatgactgctggtgagagttgcaaagagaggtgggtttgtaaggagtgaatttgtgagtggagggtaggtagcaaatgtgttgtgcggtccaagatcaagcatgtaaatgtgtgagagatcagcaatggggggactagtgcacgaggttactgctggtttagaggtggtaggcgttttggtttgagtaatgtgatgaggaaacgctactccagtggtactgcttgtggggtggaaaatggtggagatggagcgttgggttcagtagtgttggtggtaatgttgttggtagttgttgtgttcatgattggtggcaaaaagggagcagaagtgtgattataatttggtaaaaaattagtgtgccttggaaaaggagaatgtggtattagtcatattgtggatcatgttacttatagtgaaatacttaatagtccacaattttcaaaatggataaaatctatggatgatgagattgactccatgaagaaaatgatatatgggagttagttttattatctgatgattttaaaccaataggttgtaagtgtatttaaaaaactaaaaacgataataaaggacaaattgaaaggattatgtagacctctaataacatgtcatgtgtacaactgtatacacatcagcagtttgagctggcatttaacattaaaatttggacagaatagtgagtaccaaattaatatgtgagtttggagggttttaccaccagaaaatcagtttgtggggttaagggtcacaagcagtatagttcaagtagtattgccgccaatatgcctattttcttataaattagttgtagatacattgaaacaagatgagaaatttgtttggatgttttttctccatcataattgtatactcattttgtttagagatgttttatttgcacccaaattttttagagataattacattaaatacaaatttaacgatattctataaaaatacaagaaaataataaaaaaccacatgaaagtaacaagaaaataacatcaaagcaacgtcaaaaataatataaaaataacaaaaaatcaacaacaaaataacaagagtaaaacataaaaaatacataataagatcgtattttatgtaaataaattttaaaaattgtaaaaatattaaaaatttcatacagattgtatttttataatttttttttatggtttttatatattttttttaaaattaaatgcaccaaattttgttacttttattttatattaagtatataattttaatttatagtaatttttttagaaaaagaaataaatatttcttccttctcacattctttaaaaacatatatgtaaaataaaagtaaaatatattttaaatatatagataaaaaaagttatatgaaatcttttttttttttttttagagaaaatgctattatattaaaataagaagtcataatacaataggcataaggggtggaggtatttcctctatccatgaacatttagcatccactgaaagagcgaacctagctaacaaatgagcgattttattagtagatctaaacacgtgagacatctgaacttcataaatattggacactaaaaaagaaatattatttaacaaataatgaaaatcataaactaactcttgtgaagaatgtactcatttaactactaagagggaatcaatctcgataaagtgaacaggttgttgaaggtctttaagccattgcaaactatgcataagagccatagctttcataacttcttgtttgaaacatccacgaaatagagcagacatggcagcaacaatctctcccatactatttcgtaagatagcactgaatctagaagtttgattcattgtgtcgacaacaacgtcagtgttaaatttcaggcgacccgaagagggattcaaccaaggagcatccagtgaaatagctaacgtggaatctgaagcattagttgaggctacaataggcatgacttgtcgaacaaccctaaattcatctaggtaggagtgtgcaaaataaagaattacatcaagtggctttggcttagtaccatgtctctccgtgtttctttcggtccaaatgctccaaaaaattatagcaaactgctcaagctgtaaagacgaccatattgtggagacatgtagcagaaattccttcaaattcatatgatttgaaaataactcattaatcgaaaaagaagagtaccaccacactcgtctaggacgcttacagtaaaaaaaaaaggcatgagaaattatctccttttttctattacacaaagaacagcgagcagagtcactaatgtgacatgtatggagaatatcagggacaggaagacaattatgaatagcacgccacaagaaaatataaatcttcgaagagaatgacaatgcccgtaattttttccaccattagagagattgaaggcagcttgctgaaggttgttgctcttcaagttttgttgccagagagtaactcgatttaacagtataaataccgtttgattcatgatgccacattagttgctcttgttgatcaaagagtgttagaggaatactttgtattttgtaaaacccaattccaaaaacaaagttgttaacattatttaaaaaatatgaaaataagataaaattaatacaaaaaattgtgatttcttttcaaaaactaaaaagtaaaggttcaaaat

SEQ ID NO: 15567 - DNA, 5754 bp, Cannabis sativa
gatttaccaacctcctctttagtggaggaagtttggtatttataagaggctctactcgcctcaatttacaagtggatcttcttgtgtgttaggagacaaattagtataatgtacacctgtgtattttcagatagaagagtcatggctataggggtagtggctgcaacttcatggttgttgggatgtcaagtggtcccaacggcacacttgcatgacatgcatccactacttgtcaggtgcaaaagttcaaatcaattttattatttttttattggattggattggttttaataaatactagatctaaaaattgaatggatccaatttgataaaaaaatattagatcgataatttcaaatcaatacaatagataaacataaaatacatcaaatagatggaatcgatctaattaaataatcaattgatcgatcggatcagattgtaaaatctaacatctaatatataattagattaaattaaaattaaccaaaaaatattaaaatgtgatccaataacattactaaatttccacgaacaacaaaagaatactaagtcacatatctttaagcttttagaagttggttttgctgtagaagaacacattggacaagcaaactaagagattccccttttttgtaaattagctttggaagattgcataatgaacaacttgatatttgtttgggatcttaacccaagagatattttctttaacaagtctagtgatattttccactactaaattattacaattataggcaagtccaatagagtgaattccctccaattggaattcaaaaccacaacggtcatgacagctggaccccacacccacatccccacaacggtcagtttcaaattttgaaacgtccccaatttttttaaaaaccgacttaaaaatttgtcctttttataccctaaaaaaaccctagctgctcaatcatattttctcttgtaaaaaaaagtaaccgaaaaacctaaaacagaagaaaaagcaaaacctaaaaccagagaagagaaatgagagagtgcatctcgatccacattggtcaggccggaatccaagtcggtaactcctgttgggagctctattgccttgaacatggcattcaggttggtttttcttcttcttcattttgtgatttattctcatttggatcttacttacaatgattctcttctcttacccagcccgatggtcaaatgcccagtgacaagaccgttggaggtggagacgatgccttcaacacgtttttcagtgaaaccggcgccggaaagcatgttccccgtgctgtgtttttggatctagaaccgacggtcatcgatgaagtgaggaccggtacttaccgccagcttttccatcccgaacagcttattagcgggaaggaagacgcagctaataacttcgctagaggccattacacaagtaagaagctttttaaatttttggttaggtttttgttttgtgagtgtttgttgaaatgtccttgaattttttgttcaaattttttatattttgtttttgttttgtgggcagttgggaaagagattgtagatctatgccttgatagaatccgaaagcttgctgataactgtactgggcttcaagggtttctggtttttcatgctgttggcggtggaactggatctggtcttggatctctacttcttgagagactctctgttgattatggaaaaaaatctaaacttgggtttacagtttacccatctccacaggtttccacctctgtggttgaaccttacaacagtgttttgtctactcactcccttttggaacacacagatgtgtctgttcttcttgataatgaggctatctacgacatttgcagaaaatcacttgatattgaaagacccacttacactaaccttaacaggcttgtatctcaggtataaaagattctagcttgatgtaatctagtcttatgttattcttgttttaggttacttaatgagcttttttctatgtttgggcaacaggttatttcttcactcactgcttctcttcgattcgatggagctcttaatgtggatgtgactgagtttcaaactaatcttgtcccttaccctagaatccatttcatgctttcgtcatatgcgcctgtgatttctgcagagaaagcttaccacgagcaactttcggtgtctgaaatcacaaacagcgcttttgaaccatcttcaatgatggccaaatgtgatcctcgacatggaaagtacatggcttgttgtttgatgtacaggggagatgttgtaccaaaggatgtgaacgcagcagtcgccaccatcaagactaagagaactattcagttcgttgattggtgcccaactgggttcaagtgcggtatcaactaccaaccacccacagtagttccaggaggtgacttggctaaggttcaaagggctgtttgtatgatttcaaactccacaagtgttgcagaggtgttctctaggattgaccataagtttgacttgatgtacgcaaagagagcttttgtgcattggtatgtcggtgaaggtatggaggagggtgagttttctgaagcgagagaagacttggctgcccttgagaaggactatgaggaagttggggcagaatctgccgaaggtgacgatgatgatgagggagaggagtactaagaaaaagctttcattaatataagtatgtgttctgccaatggactcattggtctgtaactgagattacaaacatctactatccttgtttttaatttgatgttagttacattttgttctttggttgttgaagtataacaattgttcattttgcttaaaaaaattccaaatttttcatatgttgaaactgaacatatggatcaacatgattttgctcgcttcttggttattttagataatgattcactttgagagtgaaggctaattaaccatcatcaattttattaaattaaacatgaaaaagttgggattgaaaaaggcttatttctcctcctagaaccattatttcagactgtacagaaaaaaggtaaaaaagaaaaactgcttcactatctatctctcactacttcttggttactgactcctccctattctctaatcaaagaaacataaacaataagctaaagaaagaaaagagagaaaaaagtaactaagtgaccgaacatcacaaacatgtcttctcaagttcccaacttcatcatctgctctgctcagctgatttgcttttgttcttattttcctgccaaattatattatattattaatattatttgtacagaaaaataataaggtaagaaaatatactaacaaatccttatattaaatacataaattatatttttagttgtgaaatgaaatcaaattgtctcagatagattcagatctcaaaaaataaaaaatattaaaataactgtgtcagaaaaatgtaatggataccgctggataatttgtaattgaattcaaccaattatatttttattactttttaaaaaaatttagaagaaaaaatagatttcaaatattacaatttaattatgcagaaaattataacttaattattttattctcatttaaaatttatgttagagagaagagaaacgctgtcgtttgaaatttgaaatagaaaatgatgaatggtattatggtatggtggctatggagtatggatgcgaacctttgttgaaaagatgtcttcagtgcaaagccctgacatttttatcagggtttcctccgccgagaggtgaacatggtaagatcggccttgagaaaaccactacgttcaacgaaaacccactattattgatactgatgttactattattactctcacctaaatcctcccccaaatgcaaatcctcttctctaattctcagaatctgactgtgtaccaactccttctgcttattcctcctcccactaaaccctcccaccgacctcggcgactctatttcctccgacgattctccgctctcttgctccgtaatttctcccgcctccgaacaaatcatattccccttggatttcatcatcaatacccgatcgatcgaaggttctgaagaatactcttcttctttttcgatgatattcttcttcttctttttctcaatttccttattcaaaaccgtcatccttacacgaaacgacaccgttttcagtaataaataattttgattcgaaataaaaatgcaaagctgatctctctgaggagaagtgaagaggcttctgggcttatattgtggcctttcgttacgtgaagtagaggagagatgagctctctctctgacacgtgtccgaagagttaggtaacggagtcttctctttctttccaattttttagttttcctaattcattttaagaaattttttttttgacaatcaactttttaagaaacttttatttacactctaaacctcattttaattatttttatctttcataaaaaaaaaatatattaattatattaattttatttatttttttaatttacattttttaaaaatatacttatttaataaaaataaattatgttataacaaaaaaataataattatacaaaactttatcaaaaaagttacatataatttaacaaaattataaaaataaaattaaaataagtattaaagttaacacaaaatattatgaataaaaattttaaaaattattttaaatttattttttattaatttaaaattttcttggagtgcatttagaactattgattttgtgtgtaattatataattaaaagtaattgtgtgattctatcaacactctaattctcataatttcataaaaatttattgtaattatattatgtaattataaaaaattattatttcaaatattaactatttttttgtgtaatattattttaataattgcagaattatttttaaaaaatttgtagtagtgatgaataaaatttccgattcctttaccgttggcctaataaaacgacatgtgattgtgattatttatttaataatcggatctctctaacggtgccacgtggacttgacttttctctatcatattacatattcaaacgtaacgtgattttagactaataaattaattaagttttgtaattaaaatgtgaacattgattgagtactatatttatattatatgtgggctagtgagattggtttaagggttcacatcaaaatttgcctctacgtgttttgaaggtggtgagagttttggtacacttaggattccatcactttgatatgataatatatccaagagtgtttcacacgtggcagaattccagtacacgtggccccactttgttggactagttgtgatgtaaggccaggacacgtaataataatatgtcaacttcataatgtaccaaattaaccgttatattttggtaagaaggaagtacaaaaatatggatatgaaattgagtatgttgtagaatgttatacgtgtaaaacatagatatgaagatttagaggggcccaaataaataggtaaggagcctttatgtggctgtaaataggtttgggatttaaataaaaattatgatttgattaagaagttatgctagttagatgaaactttaatatatattaaattattattttttattttttattttttataaatgtgaaataaatgtggcatattatgtcgttataaacattagatattcagtaatgggtatataattttctatcgttgattttataattattttcagtattaagtatataattaaaaattccccaattataattccattccaatctct

SEQ ID NO: 15568 - DNA, 4133 bp, Cannabis sativa
aaaactgtaaaatttgcatttccacactcaaatcatcacatcttaaatagaatggcaatgtaggattccttccgagtacgatacctgtacataaaagttctcagaaacgtcaatgttgcagatctcgttctccagttggaatcattggccgaagaaagaatcacacttagagcttcctggagttggggttcccagaaaaccctccactttaacaattcgaaagctgccttcgctaaggttgataaatctttatttgatgtctcctgcaaaaagcaaccaatacctctcagatatgaagaattgataccgaggcaagtgagaaagatacttgaatcagcctcgagggtcgaggatgttttgtttgttagccttatcacatagtcatttcaaggctaatgtgcttcaaacaaaagcagaagctcataccaaactgaaaaatcacttcaagttataaacagaatcaaatttgagctgtacgcacctgcaatgatattacaggataaagtagaccgacgattacatccagcaaataagatgatctcccagacttcagagatgagatgatgaaatggaaaagcttcacaaaacagaaaagtacattgttcagtagatgttcgaaaaagctaaaaatattccattaaaggactttagaagattcagtaccgtttccatccatttgacatcatcttgtgaatcaccattaagatgcccattttgaattgtattcttcttggtctccgaattgtctgattgattgctctgctgaatgtttactaccacctcagatgctcgtcttttgagaaactgaatccaacttctctgttgaagttggctgtcaagatctgtattctcgtccccgtcttgtgaatgattgtgacaaactgatgcataaagctgaatatttgagcacaacacagaaagagtaacacctatagcttcccttacctgtttcacacaaaacatatatcaaaacataattaataaatacaatctatcaaccaatatatatataaataatagaacataatcgaaactcgcttacttgggcagatgaatggcacatattagcaagcagctcttccagaagtttaaagtggagccgaatttcagctgttgacatcttttgtggggatatttcgataagtgcagctgaaataaaagcatagcgcttggcaacaacagtagtagttaccgtcgaaggtaaaggtgtagctaaacaatcgagtatttgctgtctcagaagaggaattctagttccatattttcctttaccagtaactgcgtaacgtatacaagctgcccactcaggtattgattcaaccgattgcgatagaacgatattctgcaattggaccaccatccaactgtcccaagcttcaacaaggccattaacatcggaatgcaacacaccagcaaatgcttccgcagcaacacattgcttagacctctcctttgcaagcgcaaactcttccaatgagcttttgagtgccgataaaacaggcatgccacattcttgtactaaccgcttgaaaatccgtgcaaagttcgagtaaaaattatcagtacctaacaaagatatccaactaggagtacgtggccacgatgaagaaaagtcaaaataaaaacgggtgattgatttatcagctaggctctgaaaagaggagtttccgtaacttccccttgaagatgaaatatcggtatcggtagtgatgtgaacatgagaaagactattcaaagtctcattaaaaaatccatcttccataaaaatttgagttaattcaccctctagagatgattttttagtttcttgcaaattcccggaataaatactctgttcttcagatgaaagtttataaggtgactcttttaacagagtattcaaagccgaaatggcaagtattcttgtttgtggaagttgactttttaaattttttaagaaatgacctgaaaagggatgaatgtcaatatccattgtaatgagaataaaaagataagagggaaattaggaggtagacaatatcgaaaccaacccgcagtttcactcagaattttcgaagaggaactcgggtcatttctagatcccattgccaacaggagtaggactctgttagccatcagattgtacctacaaaaaataaaaaaaaatacatttataaccaagtaaatgtttatgagaaaaagtatccaagaaaatcaagatatctacctccaatgcaaaccagtagaatcgaaactcatcgaaacaatctgagaaaccaaatccccaaagtcttgcccctctaattgatcgttcggtgcactgaaaatgtttttcgatactccagaaaagtggatgttgtacttgacgaaaagctgcagaagctcgttatattagattcatttcattcagaatttcagaatcagaatcaacctgaattatcatacctcatttattgctttctgggatttcagtgactcgtgatgagagcttcaagcagataaaaagaaagaaaagtcagatatcgtatgcacccaaaactaccgttcaagtgtcattaacaaacgattacctcgagagaattccaagaataaacgatgagaatgccttcgggtcctgaaattacaaaataaggtagaatttttttaatttcttagatattattttatgtatagcatgcagtttgtttcgatccttaccgttgtcacatgcttgagaactgtttgtgtcgcaaggactgcacaagaacctagcacggcatattctaatgagctggagtttcgcaagttctcagtgagagtgagaacacattttgaaatcatagtaggccatctctttatcatcttcaaaagcgattttccagcaagcctgagtgtaccatggcattcaatcaaattcggtactcaaaaattccaaaaccagaacaattaataataagcaaaggaaggcaatggctatattcaggttgctatttttccacttctgaaaggctaaagaagatttgaaaacttacgcccgaacagtttcatagctgtgcaacgaaagattaagaagatcatccatcaaaagattcacatggtccgatggatagaaatttccagtagtacgatataaatggtacgatgactgtgaggatctccatgtattgtgcatgtaagccttatcaataagtgcccaccttggcctggattttacagaataatttagtatcaatgctaagataatagaactggagttcccgaaatcaaaaggaaacttcatatcattaccttctttttcccttagaatgggatgacacaataaaattaatcggaggttcgattatagcagcagattctaacttccaagcttgtctgtgatttgcccattcatcgtattccaaactccctataagagagaaatattaaaaaggatgcatgtgtgtgaggcaaatgtaaaaaatacgaaaccatatagatcacagccgttaccatagtttgccaaagcatccatgatacgaataacgagaatcaaaagaatgctgtcatctgatttttcctcaactaagtatctgctcaaagcacaaagagcaacaagcttcagtatctcatatctactaaataatagaaaatccaccatgagatctttaacaaaatattacttgcaagctgtgtgtataatgtcagcagccttttcacgaagagcaatacttccaacagtcgaaccagttgctccagctaataaaaatgagatatgctcctgatctacgaccatcttatttcttgaagatgggatgaaatctggtaaacaagacaaaacaccttgcaaggacgaatctatacgcaaaagagtcacttttaagtgctctttctcatctcctggtttcaaaaaagtgagtcaactgttgtgaaaaacacattatgatcatcaaaaggctgtatgagagagaaattacctgtatcggaatgagttttagtttgacatattttcagcagatcatccaaagctgaactaaaatgaaggtccaaaagctcatttgcgaaatgaacttcttcaacacttggaacgtgccacttgggttccgccaaatttttatcatccaaaatatcttttgtgctgatccattcctctaatccagcagcatttggatgtcgtaaaacacacctaggacaataga

SEQ ID NO: 15569 - DNA, 4466 bp, Cannabis sativa
tttttttttttttttgtttgacaaaaagattagaatcactcataaatttacgacgcagacgtctgctaccggtgctagaaccttctcgaattaggatagctcatcgtctaaacgcagagcatgctttgccaaaccatgggtcgctaaattctcagagcaagctacataggataaaaatgctcccaaaaatttagagctataacatcttcaaataacactcctagctcattgaaatatacctgaaaaatagctaaaaaaccagaataaaacttttattagaacattatcaaattgatcaaaatttactaaataacaataactaagcaaccaccccactaaaaattactagaattagctaaagggatcaccctttggctagtagcaactgaattatagcactctacttcataattttcttaaaagttactatcccttactaaaaccatatcatctaaaataaatgttagtatgtaatttaataaaaagcaatgaacctaaaccatatcatatatgtataattaattaacatttgatctatttctatttttagtaaaaatcttatttatagtcaatacaaacttatttacatctctattggagatgctctaatgtgttaagttttcacagttgtttttttagttgttccgttgttattttaattgttctgttttattgttttacagttattttataaacaaaaagataatatttttataaaaaaatttgtatgacagtaaaattgtaaatttttacccaaaatttaatgtttttgtaataaccactaaaaaaaatatctttattttgcataagggttcataaaaaatggcaatggtaaggaaggattcgcctcgatattagataacaattacattgtgtgtgcctgtgatttttttcctcttttattttttttttagtaagaacaattacgtatacactacaatgttaactgattgagagttgggaaggttatggaaagaaggaaaaagtaaaaaggtgtagattccacaccagtgttgcctaattaatttggcaaagtaattgactgagatcaatggtatttgtagtagtagtagtagtttaatgttgagaatcaattgagttgttaataaaggtttcatttcatataattgttattattatgttaataaataaaggtgtttgattctttactctgaaaagccaagattttcaattcaaggctcatgtgtgtgagtgtgtgactcaaactcccatatatataagcatggttggttacttcccactttcatttattccgtttttttattttaatttgtctcatttagtctcaaaagcctcaaaaacattcatgtgaaaaactgaaatctaggccagtaagagtattacaaagttacaaactttgatttgaacccaaaaacaagaaaataaaaggaaaggaaaaccaacccaagaacctgataaagctaattaaccgtttggaagaagtaatgaggcttattgaattgacctttcctaggctctaaaactcaaaccgaaaccgactccttgcctgtccactaatccatactttctttcttcttattcccctcgtgtccatttcctctgcctccacgttttctcgtgcctaaatctctctctctctatctctctcattctccaaaaatcataaacgaaaccaagaacaagaaaccccctttcccatttcaaatctattacaaaccactgttaaaagttgtagcctttgcaaatgagtgagcgtttaagcattggttttttcaacttttttacattatgaagttatatgtgtatgtattggaaggtaaagacttgcatgtgaaaaactgttacgtgaagcttcaggtagggaagcaaaaatccaagactaagattttgaggaaccccaccaataatctaatatggaatgaggagtttgttttcagagtccatgacatggatgaggagcttattgtctctgtctatgatcatgatattgatccgggtttcttccatggatcgggtgggttaatgggtcggattcgtttgcctatttggtctgttgttgctgaggataatcacaccttggcccctacatggctctctcttgaaaagccaaagagaaataaaggaaaacatattgacaaagactgcggttagtttcccattattcttaatcttctgttctttgtttcttttcctttttaatcttaccaaaataaaattacattagtttaaactagataagtttctatgctttagtttacgtgtattagcttagaaaaggagtttcctttatgtgaatgtgttgcttcacgtcttaataaggaaactgtcacaagtagagatagattattggttaagctcatttgggattaagaaaaactttttttaaaagattatttgactaaattagtgcaatggatttggatttttaaacagtggatagagagctgaggctattgaaactgttttcagctgaatctatttttgttatctcttagaatttaaagtcaaatattcaatatccaaatattgggtgtcttggagaagaatcaatggtgcttaaagcttaatctgtatgtcaatacatggttagacattttagtttacaagtttattggagttttcccctattaatgcaggaaaaattcttctcactgtttctctgcacggaaaactccaggagtctcaatcctattccttcattgaaccaatgtcagatttcaccaatgaggaacctcaagaacttttttgtgtgttacctaacaatggtggtggctctaccaaatctaggggcaggaagaaaacagaaggaaaacagttgattaaatcttttactaaccgtctagagaagttgtttcacaagaatgaagatgcttttaaaactattgattcttcttcggagtattccagtataatttccgaaaatgattattcggtagaggaatttttttctgattgtagctttgaagaagctcttgagataatgaagtcaaaggagaatgaacaagaaatgcctgagaacttgcaagggggtgtactagttgaccaagcttatgcagtttcaccaaatgatcttaacacattcctttttgctccaaattcacagtttaggaaagaactagccgagcttaatggaactacggatttacacgaggagccttggacgtggagctcaggagatacgtcgtgtttgacacgagttgtctcttccactaaagctgcatcgaagttggtgaaggcttgcaaagccattgaggagcaaacttatgtaagagcatgtggaaaggagtttgctgtttttgtaagtgttagtacacctgaggttccatatgggaatgcgttcaaggttgaattgctttacaagataatgcctggaccagaggaagaatcttcccatcttgtaatatcatggggaattaactttcttcaaagcacaatgatgagaggtatgatagagagcggggctcgacagggcctgaaggagagttttgaccagttttctaatttgctggctcagaattttaagacagtggattctaaagtctcagctggaaaagaccatattcttgcaactctggcaacagaacaccaatcagatttggaattggccagtgaatacttctggaatatcacagtacttactactatttgtatggttgtgtatattgtggtgcatatattcctcagtgaaccaagtcaaagacagggcttggaattttttggaattgatttgcctgacagttttggggagctcataactagtggaattttagtcctttatttagagcatgtttatcacatggcctcacgttttgtacaagctcggttgcaaagaggttagcaccactcacatgattgtcatttgtgaaaatatatcttggcattctcgccttttttaagcatatttttgaacaggatgtgatcatggagtcaaagcacaaggtgatggatgggttcttactgtggctttggttgaaggggttaacttgacatccttaggttcatcaaatttatctgacccctatgtggtttttacctgcaatgccaaaacaagaacaagttcggtgaagcttcaaactagtaatccccaatggaacggtaaggatctattaaagtgctcatagattatatctgtattcttcctatatcttggctcaatgattcttggaaacattatgcagagatactcgagtttgatgctatggaagaaccgccatcagtattggatgtggaagtgtatgattttgatggcccttttgatcaagccacctcacttgggcatgctgagatcaatttcttgaaacattcatcttctgaacttgcagacatatggatctctctcgaaggaaagcttgctcaatcatctcaatcaaaattgcacttgagaatctttctggataataacaatggagaggaaacaattagagactatttgaacaaaatggaaaaggaagttgggaaaaaggttaggagtggggacttggtat

SEQ ID NO: 15570 - DNA, 4882 bp, Cannabis sativa
taaactatttaatagtaatctaatgactttaaaaaatataacaataatgattacaataaaaatgtagcaattaaaacctcttccatatatatatttcacaaaatataatgtttaataattcgaagtaataattgctattattatgacttaatttccattcaaaaaataatagccatttagggaattttttttttggaaacagccatgttgggaaattaacataaatgagccggaaccgaggcagaaattaaaaataaagggggccaaaaaaaaataattaaaagggaccaaatacataattttttataaaaataaaacttttaacattaaattactttataaattttttttgtccaaaattttaggaagggatgacccgtccctgtaaaaatgagatatgctcaaagataccagtaatatctaacagccttctatgtgtcaatatcactattactctaattaaatataagtcttatgtaatttaatgtaataattttcagtgatatcactagccaatctcagagcgacatgcctagagatgctaaacaacactcatacctaacaataattctgaacgtaaatatatatatatatatacatataatataaattacggtttgtggctatgatgagggtctcaaaaattaaacataatatatctatatattaatgttaaaattcaaattattggattggaaatatatatatctagctagttactctaattttccattgattaaaccaatgaataataattaaattataataggttggtacttggtcaagccagtaaaaaacctcctcaatccacccaagcagagaatctgaacagatattataatttataacatttaatttttgtgcatgagtactatacataaaattaaataacgtgaataaatatgcttttttcataattaggtattatagatatttataggaaatatcaaaagtgaggtcattaaaatcttaatacgtatacacacaaacttgaaagttacagctataaaccattataagtgagtatatataggaacatctgagttgttgaatgaagtgtagaacagtcgatcaaaaggtatatataattaagaggaattcagtatataccaatatatacaatattattgaaccaaaccaacaaccatatctcattagagaaaaaaaatcacgtttggtgaatctttatgcatgcatgtgatgtatcaacataaaagtaaactaaaaaccccataagggaacattttgtaattggatatatatatatagtaacgataatatatatatggtcataataaggtatataaatgatcgaactaaatattaataatagtcaatttggtgtggttgctctagtacgtttctcgtgagtttgtccattttcaaagttccatgcatactgataatttatgttatataacatatcattatgaatttcattataattatttaatctagtcctaagctataatatagatataataaaattttgggccgctgtacaatatttttgttcacataattaatataaaaaaaaaaaaatttgatgtcatgtaatattcttcattaaaattttagggtgcttggatcactttggggctctgagaactagtctagtctatcttagctcaaaatcaaataaatttgcaattactcatatttaaatgtatgccttgatgcctttattaattattaaaaaaaaaaaaaaatttgtgtgtgttgatatgtcaaaaaactgccaatttcttatttagttatgaatcgcgcgctttgtgtgtgcctcgtcatttatatatatcttctaagtaaaacgatgcgttttggtttgaataattaagtaagcatatatatctttcatattaattaaaagagtatgtatgtgcttcgtaatttgatgtgaaattaaaataactataatcaaaaagtaaatctatattatatcattcatattcataatataaatatactactacgtagtacgtacgtacacctaatttgcagcgcatatatgatcttatccacaggggccagccaactcttttattataattacttaaaaattaattagatcaattataaagtttctaattatatatcatgtactgtcagatccacaaatatatatatatatatcgtaattattaattacgtctaaactactacacatcttaataacatcgatcttcacccttcatttaatcatcattaactaattaagagtagtatattaatttaataatatataaagtaaacggcaggtgacttttttttttttttttctaagtttttcttatatcaatgttatcacattcactacccctaaaattaatttattaattaaaatggttttattataggagctagctagctaataaagtttattattttataaaatatttagtaattaattaatatttaagagaggagcaatcatgtgctctccaacaatactatatatgtatgaaaatatatatttgttctcatcatgtggcatcgtgataaaatatatattaataatgcacgagtgatgaaactcatcttgatacatgtaattaattaattatttgctaagaaagaattaattaatagcatatactactaccacgcacataaaaatgtgtgtatatatagtgaaaatattgtaccaaattctaataaatacaaaatattactcgagacacaagagaactataatatggtgttgtaaattagtgacgtaattaagtttttttattttttattttttataaatcaatgagttgtattgcacaaataaatttacaaactaaaaacacttacacaagggcctcaatctattgcatcttcttctctttactctttgtctatatctacaaagcaatacaccaatctttatctacacttgttattttttttggtaagaatacattgatccgagtccttagactccatttaatctcctcaacaattcggttgctgttcacctgtcctccttgccatatcacaacatttcttgttttctagacattacaccaacagctgcagagtagaccagtttttggaattttgatacatttgccttcccaatccatcgaactagctgctgcatagttatagcttgagctttccactccaaccaacttttgatctccaccaaacattggctagttacactacactcaaagaataaatgttgagcattctctttgaagtcatcacataggttgcacttctcttgaatctgaattccaaatttaaccaaccgatcctttgtcttcaacctgttaagcatggcaagccataaaatcacactgtgttttggtgtattcaactgagaacaaacctctttactccaagccatttttagttgaggagtgctaaacatcttgtaccctgctgcaatggtgtatttgttcctctcaaattcagcaaaatcagttaaggagatgatctggtttttgagagaaacaagcttcttccagtaccaactggagtgaatagaagcattgtaactccaccagggatggtctttgatatatacactgtgcacccatctaagccatgcataagctttcttggttatttgagatagcccaaatgtacttggagatggctgccttgttccaaatttcaagctttttgatccctaatccccatgtagacttatattggcaaacattatcccaagaaacagtccgtgctccatggaaaacagtctgccctttccataagaatgctctacagatggcttcgatggacttcaaaattctttttggcatgatcacaatttagctccagtatgcttgtatagcaatgataactgagttgattagtactgtggttcttccagcaaaggagagattccttgagctccaagttctaattctggatgtcattctttcaaccaacaactcacatattctttcccagaaatctttttagcacaaattgaaatccccaagtatgtgaatggaaccttttcaaaaaaaaaaaaaaagtatgtgaatggaagctcttgccttataaatccagatagttgtaggatcttattcatactcccctgttgcatattactgcaatatatagcagttttactagcattaggctgcaaacccgaggttagggagaaaagctttagtgcctataacatgtacaacacacttgtgaagtctccatgtctgaaaaagtaacacatcatcagctaaagccagatgatttagtttgagacccgagcacctgtcatgaaagtgaaagtcttccttctctccaatcttctccattagcctagagaagtattccatacccaatacaaacaataaaagggacatagggtccacctaagccctctcctagatttaaagaaactatgtaaagttccgtgaacataaaagggaacttcagagtagaaattaagtttttttaataaaagttatttataaattaaaatcaaaagaattagaactcacaatcattatcaagattggacgtaagtgtatagctggggtggctctaaccccctcaaaatttctaaaaataaatttattatttatgtgtttttcttaatgaacaaaaataatatatatacatcaattcatagttcatcactataaaagaaaagtcaaagaaaaaaaagtatcaagctattctttatttttataataatttatatagtaatatattatttataaattaataatagcttgttacataaaaataataataataattagagtgaaaaacaaaattaagtgtatttacttttaaattttgctacaaataatagaagtatgttatttgacaaaaattatagtacatgatcaaaatattgtttaagtatatttttttatctctttctagaagaattttttaatctaattttttttttataatcatgtatattata

SEQ ID NO: 15571 - DNA, 9344 bp, Cannabis sativa
attaaacaataagtcaaccgaataatcttctttgttcctgtttaaagttgcaacccaaaaccacttcattcatagtactcttaaaatgaaaccatggagacttgcccactgtaaacaatcagggtaaaccgtaatacaaaacataagaggccacttgtatatgttcccaaaagtttcatataaagacatcatgactgtacaacctatgaaagaaaactgatcatcaagtagtacaagggtggattcagtaaggaaagttgttccacacaactttcagaagaataatatgcatgacatgatcacaacacatgaggtccataaatcttttatcatttaagtatttaacaggagaaacacgtgaaaccgaatatgcgccagtacttcatatcagaatctcaaacagaaaaagtacaaatgttgaataaaatagtttcccaatagacattgttaggactgctctaaaaatttaaatgacaaaaacttggttaacaagtatttatgaataaagtatgtgcagaaaagcccaattgggctatactttacagaaccacgcacttaaggaacctaaaatgcatgtcggaggctccaatcttctgtatacataaatgtacaaccccacatccaactcgagaaggggcaccgctataaactcacatatgttagaaaggcttaattgatatcttcaagaaagtctaaacaatctctccgtgcctgaatccaccatctccacaatcagcactggagtccaatccacaaggagaatcataccattttgggttatcttggtagaaactatcgacttgtatgccaacaagacctacatctgctactaaagcatcgtcatgtcttaagggcttggttagctttgtatcttcacaatcaagaatgcttttctcatcaaagttactgcatttcagccacttttcagacttacaagactcgcccattaaatctttttgatttctacaatctgtcctaagctgatcccaagaaacaacatcctcaagagtccgctcaaaactttcctcatcatcatctatcaattcagtatccttgccgttcccatatattctttcatggtgatgatcactccaatgagccaaatcatcctccccaaccaatacatcgtcaggatgtggcttatcttggagcaatccgattggcttcaaattctcctgtccaatacgtctaaccctactaacaatatcaaataaatcccgagataccgagcacaataactcgcgcggcatctttccaatctttgcttctaagaatccaacttcggttttcaattcatgcacctgctgcaaaactgaaagatgaaaattaccttcatccttcccaatcaacccaaaaccttcattctccatatcctcgttcacaccatatacagtatcttgatccaacaaaaagccgcctttatggcccacaactctatgcattatcctcgcatttccatctaagggtcctggctcgtgacctgagtgtacagcatataacttgaaaacagccatcccttcttcttgataaacaaaagtcttgtccttctcattataattggcaattggcacaatggcacgaattcgaaatccacacccacaccgtttagatgcatatggttccctcttcaaaatttttgacttcttggcaaccggctcacctgccctgtgacaagcataatccttgacctcagccataaagggcttatatctaatgtacttctgcctaatgcaaagcacgaccttgtgctttgcagccagttgctgaagcctatggggcacctccttcgcaggcacatcaaaagactcagtatactcaaacctacggcgcttattcctccctgttccaccagaagaagcggacgagcaaacaggacaggcagccacacaaaccctaatgtaactttcaggtatgccataaaacttagcacctacagtccacacctgcttaattctatcaatggtttccttaagccctaaatgcttcatatccgtatcaccatgaaaactcataacaatatcttgccactggttaacatgcgaaacgaattgctgggtattattcttgaagcagaggaattcgttaccgttttggtcgacatgggcggagagcttgtcctgaatgcgcttccaggcggtgagataagccgtgtcttcgttccggtccttccagacggcgcgccacgacttgagaacgggtaggggagtggcatctcggatctcagccggcgtggcgaggcggcgctccaaaaggcaacgaatcatgagagaatgggattcggtgttgaaggtgtaaaattgggaggaaatatgacgctccggactgatattgagaggtggctgctggtgttgggggaagccattctggttggaattggtggaattagggtttgtgttggggtgattggaaacgtcgtcgatgtcatcggcagaagagtgggaaggagaagaggaagaggaagaagacctaaagatgacaatttcggggagggagaaggatgaggaaggatcgtcatcttgagggttgggaatggacggttgtgattgggtcatgatctgtggcggtgggcccagatgatgaaagagatcctcttctgttttgctgggattcatgggtaacaaaatcgaatcttgaaggaagaagaaggagaagagggagtgaatttcggtgctggctctgctcttctcttcttctcttctctgtttcttcttctaagctctgttacttggtttctctgacatgttgttggttactcgaggatgaggtgagtgagggtgagaaatgaggatgagttttgattctttctcttttttactttactttaatttaatttaatttctttctataaaattagaggtttttattaatttaatttaataaagctttatttaatttatttttttaacttattatttttctctcttccttttgtcttgtctttttcttcttctttttatttcacctccttctggaagtgcatttgttgttgttgttgtacctttttagtcattctttgcttttctttgttgtttcattgttcgtatgctttgtattcttcttccgcgaactttccccagcttaataatttaaccacatatctttcatcttttctattaatttcacgttttttttaaattttttttctcttaatttatattcttaaaaaaaatatattcatttaacaaaaataaattatatattaaagaatttttaacggttaaattttctcaattataatttcacttcacatactttccaagttcaaatttcggtagtaaaattttctaaacaactgaactcttagtaaagtttaggtatcatctcgttaactgtcactacggactacttatgtgtagattattgtatacatgacacgtttatattaatacatctaatattattattttaaaattataaaataaaaattaaatactttaaaaaatatattataaattttgaaataattttttgtaatttttaaataataatatgatgtatgccaatataaatgtgtcacgtgtacaagagtgtacacatacgcaatccatattgacaattaactatgaaaaataaatgacaccttaaatttgctaaaaattcagtagtttgaagggttttactaccaaattttaaacttgaaatgttaaatgcaagcgaaaagatagttgagatgattcagccgcaaaacactctatattaaatattttaaaaaaataaataaaaaaattatgtaaaattttattaaaaacaaattatactaaaaataataataataaaattatacatttattctcatacaaattttgcattgctaaaattggcacaatatttactaagcattgaatttgtatcaccttatagaacattattaaagcatattttttattaattaagtcatattttagttttctatcaaatatttgtgtcttcatcagagatactcttattttattttttttaataaatcaggagatttattaatgaatgaactcattcaaaacaatagaacgcacttcagaggagcaatcctccaactgaaacacacaacctgtagaaaaacaagagtttcttgtcaagcaacgagccagcttgtttgcaaatcatttaacaaaacataactcaacaaaagataaagctaaaagtaaattcctaacatcttgtacaataaatattacacacatatatagaaaagttaaagaaaataatattaaaatatgtttagctcaatgaatagttatctctacatttagctaagcactattcattaagctaaaaaatatgtaaaatagctaaggtttacctcacttgttggaagctcaattttataattttttctttataatttaagattgagctattttagctcatctattaggagtgctcttattctcttattttaatcacatacaatctgatttaatttcaaaactatttattgactatttataattgttatctatgatttcaaattaaaatttaaaaagtgaaatttaaatatgttttgactattatggatgcaaattgatttaaaatgaaagtatctacattatatgtataataattttgagatgctatatgtcaatgttttattgaactttgtcataggagtatagagagttttcacatatagtgagattgtaagtcttaaccatattataaactactaaatttgacttgtcaattagatatgaagaataaaaattgataatgcaattgacaaaataggatagttggatttttatttacttgataatgtaattactcaattttgtttctttttattcaattgacaaataaaattgggtaattgtattatcagaacattttaaatggagatgcaaatataaaatataacttattttatcaaaaatctactttaatagtgtgtcaaattgtgatgtaaatatctcacataacaaaaataatccaaatttagatcataaaataaggtgatgcaaaatttatataacagtaaatattataattttatatttaccgttattagataaatattaaattttgtataagatttacaatcatgtattgaagtataataataaaagttaatgcaaaattatcacaaaaccattatttataccaaatacagattaacgtattacctattcaaaatggtaagattataaacagctgcaagtcaaatataatttacctagattatcaagttaatcatagtttttttgtttattctttaaattttaattatttgttttgcttaattatttttctctcaaatattttaattaatcaaacataaacaaggaattgattaattgataattggtaatcaatttttttgagaacggtattctactttatcattatattatttgattcaattatatatacatgcgtatcaattttagtgaacattaagtatgtttgtcctgaaataattttatgatgagtgacctcttgcgatgttcctttcaatttttttgaaaaacgtacaagtaaggataaaacacattagttgtgtgggtagatatgcccaacaaacatttataatgggggcattacacaactgcaactccttaatgattaaaataaattgaaaaaatcatacttttataataaaaaagattagacggtatagatatttataattacttttataatacacccttaaaattagtataccgatgcaatttctaaattttcgatttaaaaaaattcatgatagtgtacattatagttatttaaggtattctgtaaaattttaaaaattagaaataatttacaaaatagtaaacaatgttggaacaatatatttcatatgcttattaaatatcaaaatagtgagtaaatcagtgtatccatttaaaataaatctctttatttaatacaatatacctgctataataataatacataagggtgaaacatgtaaatttagttttatgggtgattattagggatatggatggatgtggtaaacaatataatttattatttagatagagatttatttgttacatgattaattaattaaaaataattctttctttcaaaataaaaaattaaaaataataaattttgatcttggattctggtgtatcctaattctatactgttgtgtggtctttcagtgttatttataaagttgtagcaatgaatgaaaaattcgaattccatattttattgccaacttaaaacctttttttagtccattataagaagacttgtacctgtttcgtggaatgaatttctctcctttcaaaaagaaaataaaagtcccaaaatgtgaaattaattacatattagaaaatccaccattaatgagaatgaacgttttcattcagtagttaatgcaaattataatttctaaataagcaacttaattagcaacgaagaatccgaattggaacttcccccaaaaaaaaaaagttaaaactgaattcgaattacaaataattcttccctttcaaaaaaaaaaaaaaaaaattctccagcgcaaaccatctctaccgtcaaaaacaatacagcatacttcaaataacaccacgtagcattaggatcccagacattgctgacgtgtcagcaccgtattgatagtagactagtgttctcgcttatttttccacactgtaacgtcttactctgcatttcttcttcccaccaaatttaaagtcatacaaatccaaaccaaaaattactcttaacaaaatttccgaacgccattcccaattctcaacccgagggttacactatcatcaggttcgttatttgtttggttgcctggaaaatagaatggaaaatccatatttcgtttcagtttacgttgtatgcatcagatggttaatttctcactgaggaaaagggtttactttccattgccttgtttattgttcttttctctttcctctccgatatgaactagtaaatttttgttttatcttaagggagttagaagctcttacaattcaacaaccttcttgtttctttattaaaaaattttcctattgtgtatttatattttactttctttcattaaacgctgtgatgttcttgtttatagtatcaagaactcttttttgggattttatgaggatcatggtaacccatgaagaaaagaaaaagaaaatcctaattttggctatggtattgcaggattctcttgaataacaagaggagaattcataagggtggttagtatttattcttattagcctattaggtgatatatatattctaaactccttattaacttcatttatctacaattgcagttgtaactatgtccaataggcataatgttcctcccgtgcatacagtcacaatttgtggatcaatgctacaggaattgcaggttttcatttttctccagtaaaaaaaatattcaatagctttgtgaaacgataatcagaaaccatcagtttattatatagtaccctttattgttgaatcaggaagtatgggatgaactgggagagcctgatgcagaaagggatacaatgctgtttgagattgagcaagcttgtgtggaagtatacagaagaaaagtggacgaagcaattaagtgtaaagctcagttgcaggcagaaatttcaaggactcaagcacagatttcagatatttgttttgctctgggtgagcaactacctcatgtaagtaagccttgtctacattggtgatcacatgaatttcttagttggtagtttttgatttgggacagtacattggggtcttttcaatttttgggaactcttattgttgtttgcgactgcagtttgataaaagtgctactggaggcttgaaaagagagcttgataactttcttccactactaaaggaaatgcaaaagcggaaaaatgataggaagaaccaattctttgaagttctaaatcaattaaaggatatttcaaatgagttaggcatatcgatggaagatggcctttccaaaatggtggtgaatgaaactgacttgtccctgaaaagactagaggatctacgagcacagttacttatttgtcaaaatgagaaggtatttgatcttgttattctaatattttttagagtggacatctagggtaattattaattaatggtgtggttaaatttagtattaatttaggattgacggaaagaaattgacacgtttctcgaacaggaaacattaaaatgaaagaacagcatatgctattttgtagatttatggcgagttttatccagtatggattgttcttttagtaatttcatctttattgtgttatgttaaatttgattggaaagttgcatatatttttaaatttttgatgattttcaatttgtaacaagggtactgattattttatactttgtccacagcaagcccggcagacactggtggaggaccagcttaccgatctgagtttactgtgtttggttcttggtgtggatttcaaaaacacaatttatgagattcatcccactctgagcaattccaaaggtgtaaaggacataagtaatagtacgcttgagggtttgtctggtgcattattgagaatgagaaatctcaagatgaagagatgggagaaggtgatatttttgtgttagctgtgttagtatctttgtttaaaattcatttgagtttcctttgagaagctttcgttgtgcttaacctttcttcgtttgggttgtgcggtgtaccagcttcaaaagtttgcaacttccttgttggagttatggaatttgatggatacaccaacggaggagcaaaaggcatttcataatgttaccagtataagtgctgcatcagtcactgaagttaccgaagccaacatcctctctattgacttccttaaccttgtgagtatgctaatttgtttgactgaccaggaaatatttattccagtttcctctaagaactgtagaatgtgcacttgtttgactataattattcttcaaccctcaggttgaagcagaaatatcacggttggaacagttgaaatcaagtaaattgaaagaaattctgaaaaaaaagaggtcggaacttgatgaaatatgcagagaagcacacatggttccagaagcacatggtgccactgaattctcatttgaagctgtagcttctggtaaacatacatctgttcttttattgtatagtcttcttctttgattaaaagcaatatctccaatctagttaagtttcttttgctatggaaattttattgactgcaatcctatggcttatgtaacttatcgatgctagaaagaactggaaaataaggccatgtatattagttcataattggctgttgtctattaattcataattcgaatgaaattgagaaaattctttctatttaccattcattcttgtggtaatttatacacatatgacacat

SEQ ID NO: 15572 - DNA, 9156 bp, Cannabis sativa
aaaaaaaaaaaaaaagtgaaaaaacgtcaacaaatatattaaattttgattgaaattgtacagaattcttattaactatataaataaaatttaaaaagttattaaaggcattgaatgacaaatgagtaaataaaaaatgagcattgttattgagtatcagtagtgcctaacattatctagaggtgacgccctataattcattagcgatattctttaaaagttattatcttaaattatatgagactcgatacttaattgtaccaataacgataagacacggagagtgctagacaccacgagtgcctcttagcattttttataaaaaatgatatttattgtgatgtaagttttgtcatactatattttgtgtcaaattttgtacaacttttagcatgtactaaatttagatcatatatatattaagagtttaattttgctaaaaatatatttatactatttttataacactttgttagagatgcttttagacttgacatttacttgtaaaacttaagcctcgacgtgagacgaacaccactcatgagcacgaattgtcaccacaccttcaagatctcacgattgtgaatctatgaacgttgaagctgagattcagtcttcctatccctctaatcttggctactgcaaaaataatttgtaaagagcttaaacattttagattttgggtaaaaagttttagaatagtacccttttgaaaatagtgattatgtattggtggcgaatgcatgagagaccgaaataggtcacaccatttataaggttatttatcatagcaaaatattacaagtttatttagtaacctgaactttttatataatttatatgagactttacattatagttatattcaacattttattgattttaaaaaaatttaaataatttataaaatttgaaataaaattcaaaatagtcaattatatatgtaattggatatttgaattgtatttttgacattacttatattcctcaaaaaaaatttaaaagacaaaagtgatattataaatatatatatataaaaaaaaaagggatggtgacgttgaagtagacggagattttttggtaggttttattaggagttgttggtggcatgaagagattcaatggaccaaaaccaactgaatttggtggtctttataatgaaaatatgcgtccatttaggactataagcgacaaaactgaacatttgtagaccaattttgtctactacactgacccagattctacgacacaaattgctttgcagattctacgagacaaattgtttaactatgtcattgtccttcatttaatgtcctttttacatgttattctcacctctttgtttgtaacacaagactattttgttaccattcttcaatgtccttagttaagtacgtacaagtcaaaaacaacttatttcacaccatcaatctcataaacattgtattaatttgattcctagttttcatatccttttaacttcaaattatacttttaaattttgatttgtacactggtcttttcccatttctggcatgttagccataaccattcccaagatcattactactccatactaatatctaattgtagtccaatccaaatccaaagctctttgtaaaaatgactgtagtttaaaatttcactttgtctaaagccataaaacaattaaaatatagacattgtgtagtcttttgtacttgttggactacttgtcatgtttctttgaatggttcactcatttttttgtactaagttttgatagaaacccttttgctttttctaaagttgttttggccgttccttactatgtttcccaatcccatcaaccatacttcttttgtttttgtttgactccttttgttcttatacgttcactcatttaatacacagaagagatgagaaagcaaggaaatgacttaaaagtttaaaatataaagctccttatttctaaaaataatgaataatcaaacaaatggggagcatggaatcgtggctgaaatcaaaacgttctgttatgtgtgggaatctgatctaaatgataaaaaaaatctattgttgctattgaatatgtgtaggattggataaaaaatatatataattatatatgagtgaggaaacaatgcttcattttatctatgcacttcatttgttgattgtaaattcttgtcctccaatgccttttcctttaagatggctgctcatctgttatttgagttgtttttttttttccatacaaaacgtttctctcttctcaggagccttatctagtaaactgatgggtaccctcttagcaaggagtgggaatttgttgatgatgggagagacccttcaaaattgctttctgattctttagttgaatatggatggagcaataacaagggaaaagtactctaatcttcctcctaagaggtttcatgaggtttatattcacatatttaaggtgacaagctttcatcatctgaactggtatcgtgtctcacattatagcggttgagtacgggtaatgaagccgttgatgatatccgaaatgatctagctgaaccaaccactgttctgtcctgcattctccccacttccttgcacacctgatccagtatggctagaaaatctctaacaatcatgaagattctaaaaggatgggctccctccttggccacatcaccatgaaaatactcggtgacttcttttacaaggaacaaagcatttctttcatcagcctttatcttacaaatttcttcttcagcctcttttagaaacagcttcattgagctaaagaatttcccttggatttctggcctctcatactgcaaaaccagtttgactttctcgagccccatttctagctttgtcacatagctgctaaggacatcggagtccattcctgcagcttttttcacattattaaggtccctactcaaaccagacacaacctgcaatccttgtttcctgaactcttcatccttcatttggttctgaacattcccatttgtggagtcaccaccggcaccttctgatctaataatctcttggaccacaaaatgtagcaatgtggtctttccatcggttccctttatgtctactagttttaggagtgtatcaagcttgaacgatttagcatcacctctattggtgccaacattcattcggtttcctgtcctgagaacagcttcaagaagtttaaaaaataatcggctattctttaattcttcacttgcttcctgtaaaacatataagcagaggatttgagtgtacagacatgaaaatgaaacacctacatgaagctagctgtaagactagtgacaaaaatacctcaagggtttgaaaagacttcctcaagtaatttacttcggagtcaaaatttgctctgtatagcattgcttcaactcgtttaaaggcaaatggtacatcaagcactgccttgagaaagcgctctgcagaccctaattttgacatatcaccttgataatctcgaagcttaatttcttcttcctttgttggagccatctttaccagagtttccaaaagctcaggacctaatccttctggattacctatacttgtcgaacacacgaatcacacaagctaaatcagcaaagagagagaataagagacctaaaaatgttcaaatatgcaaaccatctaccatggcaaactacacagaattctaactgactgatatgctgaggctgttgtttggtagatttttcttttctttgcagactgataatgtactaaaatacaagaaaagttgtttgtaggaccaacatacagtataggtacaattctacataaatcaatttactaatacatgtgcatcagagttatttatatggagagttagtgctgatgtagatatgcagcctttcctaacacaacatgtgcagttagatgaccgcaaaatgttggaatataagctacggtttgctcatggggaaaaactacttagatgttaagtgttgatcaagctacaggatagtgttctactaatgtgccctgcattaagggataagagtctaggtagaacatgaatttcatttcataaattaaagggataaaaagttgacctattgaaaaggggaaaaaaatcaaattcattgctatccagaaagatgccttctgaactatgaagataaataaagataaagatggaatgataggttggagcatgcctagtattaggaaaaagctagtaaaatcattaaagagttgggcaacaataggaagtctttagttgattcagtgataaacattaaatatgatggtttggtttgtaaagaagaaaatgccagactttagaggtaaatagaaggattttatttattattttaaaaagaacatacaccctgtaatgattaattttacgttggcaatttggggaaaaggaggcttggaaatctgaataccatctcttacattttacagcagttatatgatttcttgggtctttcatatttatattttaccgcgtttcactttttccttttcacatttctcaataattgaaaaacttgcataatgattaataatgcatctgaattatgaaacattatagttatttctattattttcttgtgtaatgatgatcatcacatgtaaaatcttcaaccaattttcgtattttgatttgtgccctctttctcttttccaattccctaccaaattgtttttatagtaaaaacttacttaccatgtaatttatgaaattatttataaagcttcaatcacatataagatgttaatagttatgcatttaatcaatgaaataaaataaatatgtaacaaaacgaaattacgtaccatcccaaagagcttcggagacttcatctcttgttacattcagagctcttaatagaatggcaatgttctgtgacttttttgggtctaaaaccctgttttcttgctcaacagggggaagaaccgatcttctggtactaacagcctctctgggagctgaattcgtagtattgcaaccaaacaaagactccatcatgtcctcatttaatctgaaaaggaaaaaataaaataccgtttaaaaattacaaaactatatgtaaaggctttttgctcattgaaaacaaaaaatcgttccgagtcgactcactggaaagaactagctttcagctggtcccagacagtggctcggtcagaggtcgccctgactttgtcccaatggagtggcttcaacttgggttttgcccctcctgactcttccgcatcaaaaacctcagaagcaccgccgttttccttgtaaactggttcctctgtttttacagtaccgttctctgttgccgtttttggtactgaagaccatattggaggcttcgatggaacttgggttgtcttttcgggctcgaccctttccgaatctccgaatctcctcgatgttgattgcgtcggcagcgaaggaggaggcggcggaggaggtggaggtggcggtgggggtggtggaacggctgttcttaacacgtgtattggttggttggttgttgattgaagacgcgggaaatttggtagctgtggcggagctgagaacttgggcttttttagatatgaatttctttgttcgccttcgttagaaagttctggcggtggtggtggtggcggaggaggaccatgtttggaattggaaaaccgtgatttgggagaagttcttttggagtgtgggattgaattaggagctgaactctttgccgccgttgaattagtactgttagcactttgacgagaaaccggtgtgtagtaataactgtcttcgtaactagcggaagagcactgcggcgagtgaaatgccgtgtcccggctctcttcctcgtcggaagaagacattgccgacggcgaattcatgttcgatggcttcgctagcggtggcaacggctgcaattcgggactcggacgataccgatccgatctctttatcgaattcagcttcctatagggcgatttgttcggggcttctctgtttgttcctccaccgccattggcttcacttaacgaagcccgattcggttcgaccgttccgatatagagaaagctcgatggtggaactctagaatcttcaataaaggtctgagaattcggtccaccagtgcctcctccgacgagcttctgggtctctgatgggtgtttcactcggtgacggtagaggaagaaagccagcgcagagagcatacccagagtcacaattccaacagagattgcaatggcgaccttcttaatcggcttaggtggttgagtcgccgtcgggattggaacggagccattggaagataaagaagtaggaggcggttgactttgatctggggttgccccgttattgggcagctcatgaaagaatggttgatcaggggtcggtaatgtagaagcgtccggagaaggtggaggtggtggaggagtggcagtgtcgtcggttccaggcggtggagctgaactcgccggaaacaatggctgatgcagaatccttctattagatttatcaacaaaataactagaatcacgatcaatgacgatccttttcgaagaagaagaagaagaatcaacgtgggcaaaggttaaaagaaacggaagaatagaaaagaagaaactacaacaacaacgacgaaatttcatagtgaatttttctgggtttctcttattttcttcttttcttcttcaacttttttcacccaattcatctctttatcttaattttctttggcaatagtgaaaaattttagagaaaacgaaatcgaaatatcgaatgagagaagaagaagactgagactgactctctctctctctctctctggtgtggtgtattaggcgaagcttcttttggctgcaagatctgggatgcttaccccaacccccaagctcacgtcacacacagccgcatttttatttatttatttttttaaatgaaaaaaaatatataaataaacgaattagttaattaaataatattttttttctttctttttatagtgagaatgacacgtggcacaaaaagattcactttccccattaaatgtacgataatgaccatgtaacactgaatcacaactcgctacgttaatgtctcttttggtctatttgttaattatataagctaaaatctcctacaaaccagaccaaagaaccatccagtgtggtccatttgttaagcttccacgtgtacttagatgtgatatgtctttaggatcttcgtcctttttctttctttttcatatagtggccggcatggacggtagagattgatgggacagacaagcattaaatcgtaatttaggatttttaattgatcaaattaataataaatgaatatttaagttttgggatttgggaggtgaggttaattatgtaatttaataaaaataagggataaaaaggttgtaacgtttacttgtatagattgatccaccgacctatctacatctctcttttgtggggaacatgcacacgtataagggcatatgctttaacacttttctttttttcttttcaattttgtaatattataacaagacgaatacacttctttttcccttttgaagggcacccaacaaatgcaaaaagacaattttatccttttcttgtccacattttgcactgatgactgatcttgtaaaaaccttttgtattttaaagtgtaagtattatgtgtattgtttccaaaattttgaggctgacccaatatttgtatggtcgttttctttgggaactgaacattttagtagctgtccatatttagttcgaggtgcaatttaaaaatctatggtaatcatttcattttaatctattgtatatagaaatcccataaataaataaataacttgtgtttgtgtaattttgtattggtagttgtctttttatgagtatgtctgatatgaataatttaaacttgttcacaaaggtaaaatgaatatattcttatgatatgagtagtgagtggttgttattacatatattacaatgacctgtcctttttatttgttttctttttctttaataaatttataatttataaatgaaaaaaaaaaacctagcttccattattctgactttcagccggttttaaccactaacgtaatgttacctagttcaaaatttctatttttacctagacaaacagtgttattctttataaatttcttatcttggaatagaagcgagtgttattgtacttgagaaattattctttccttacaaacaatttgcataaatttgttataggatacttgacccatctgtcaatatcaatgtactaaattatataaataataggacaaattattctcaaataatatcaagaaagagtacatatataatatattgttaaagctctccaaccattataagttttagcatgataggtaggtagtgcatatatttttaatttattttagaaaccaatttatactcattttactaacggaaagtttaagctttaatcactcttatttttaggtttgttatttttagatgtttttgtttaatgtaccaaaaaaaaaatgttattgttttatcatgtgtcaatttacagaagcataaaagttgctttaatattaattaattcatcacggcctttaaacatgtaaattcaccattaatttacataaaaagtccttcaaaagattatggaccgttaatttcttaaatatcattttctgtaaatataatatagctcacaaaaatatgttaagaagaagtattgtagtgtcatacaaaatgaatggagaaaaactatgggcaagtttgtaactttgcaaaaaacaaataggaatattactctaaattaatagaataaaatcttagctagggtcctatacaattactgtcctctcaaattcacacataaattaagcaacaagtcatggtatttacaccaactctatctctatattgagcaagaaatcatggtatttactatttacaccaactctcttgctctacatacaaatttacgtaagtcatttgagaatatatatatatactgtaaaaacctttattgaaatctctatagaatattttatttaaaaataatctctaatttgttataagaaaaaatcaaatcttaatttgagccaattataaataaaaataacttctaaattgtaattaattatatattttttaagtctcgcattaacaaagtatacctctctataagaataatta

SEQ ID NO: 15573 - DNA, 3048 bp, Cannabis sativa
ggttcgccgtataacccagttagacgccaatgacctttatctggatcgcaaactaccacatcaataaaagtacgcccaaattctaacacctttacctcctcctcagtcctccaaaacaaagcaactcctccactctttccctgaacatcaaccgaaatggctgcctcaaaaccaagcaacacccgaaccttctccacaacatccttccttgctaaagtttcacataaaaacaagacattgggtttcttttggacaactagatccttaatgaattgttgagcccatgggttcccaagcccatggcaattccaagatataatgctcataatgactggtgggcctgagatccaaggcccacctttgaaacgttttttggaacaatgtccccttcatcacttgagcccaatattggcccatcttccttcacaacatgtaatgacttaacagcccccatacgtctccttttgctgtcaaaaatcataagaggatcttcctcattaatctcatcctcatcacctccagccacactagcttgtcccctcccaacaactttatctttaagcacataattccctcccaaattatctccactattcacgcctgaactcaagagattgtgatcaactctagagtcaaccttatcaatatccatgattctaggaatcaaattaactccaccatctgtagctggttgcctggaaaagcttccaccaccgtcagccccctcctcctccttccccgtacggagccattgagccccaatcaagtagtttttctttttcaattgagccttcatccccatgccgtaaggcttaacaatttcatccaaaggttgatcgaaccttttcggacaaaatctttcggaatgtccgatgattccacacacaaaacagaaagttggaagatgttcatattggaagtttgcccaaatccaatcaccattttctctgcacaatttcatgcgtctcttcaacggtttctcaatgtcaattgtcgttcgaacacgcaggaagtctcgccataagccattgaaattttttggatcagacttgacaaagctacccacataatttccagcccttcgtaccaccgtttccagcataaagccagtcttcaagccatgtatttgaacccaaatgtccatcttatttagcagtacttctctcggatcctctcctttcttcaaacgatgaaaaatcagaggacatctattaaacgtccagggacttccatcaataaccgcttgtatatcaatttcatgataaaattgaaagagatacctattagtatctagttctttgatgtatacacccttcccaggctgccaaagggatgccatcatatgtctcattgcatcgaaatcgaacgtcctaccagtaaggaatttacccaccaagcaccacctatcatcaaatatagcctcctctccctcattctcatccccgattaaaaccccttcttcttcatcctccaggcagatttgactatatttctcattgagatcaaagcctcctcgactacttgaagccatgcttaacaaacagactgaaacaaacaaaccagcgtagcaacagacaaaaatacttagagacagtataacactctcaacatgtcacaagacaagaccttctttgagaagttaatattatgtatatattagcatactcatcatttaaaaaaagatattaagaaaaatgatgctaagaaactcttcaatctttctatacttgattgtttttgttatcaaattttcttcgaccactaatgcaagaattcatgattatcaatatccaaagacaagttttctccaatgcctctcacatcattcttcttcaaactcctccattaatgatatcaccaaggtagtttacactaccacaaactcttcctacttctctgttttaaatttcaccataataaacccaagattttcttctccttctacaccaaaaccgcttttcatcatcacaccactctatgaatctcaagtccaagccgctgtgatctgcgcccgaaaacatggcgtgcaaatcagagtaagaagcggcggccacgactacgagggtctgtcctatgtctctgaaatcccatttatcgtaatcgatatgataaacttccggtcaatcactgtagacgttgagagaagaacaggttgggttcaaaccggagctaccctaggcgagctttattatgaaatcaacaaaaaaagtaaaaccctagcctttccaggcggagcatgccctacaataggtgttggcggccacataactggcggaggttatggcgcaatctttcgaaaatatggccttgcagctgataatgttattgatgctcagttagtagacgttgagggtagagttctcgatagagaaactatgggggaagagcttttttgggccatacgtggtggaggtggagcaagctttggagtaattctcgcttggaaagttctgttagttcgcgtccccggaacggtgaccgttttctccattaataggaaccttgaacataaccttaccaaacttgttcataggtggcaatacatagcacacaaactacctaaagaactactcttagcggttaggtttcaaactgtgaattctactaaaaaagggattgaaatgaaaaagcttcaagccacattcatttcggtgttccttggaagagttgatggtcttctttacttgatggaaaaacgattccctgagttaggtctggtgagagaagattgcacccaaatgagctggattcagtcagctctcttcgttgctggactaccaagtgagcagtctccagagattttgcttgatcgaacacctcaatcaagattgtctttcaaagcaaaatctgattatgtgaaggagccaattccggaaaagggtttggaaggaatatgggaaaggttatacgaagaagaggttggaagtggtattgtgataatgagtccttatggtgggaaaatgagtgagattccagaatctgagcttccatttgggcatagagttgggaacatgaataaaattcagtatttgatttattgggaagaag

SEQ ID NO: 15574 - DNA, 10562 bp, Cannabis sativa
  modified_base (80)..(83): a, c, t, g, unknown or other
ttttaatttgataattatagactaaaataataaaaaaagccccatataaatattttttaatgataaataagcccccacannnnaaaaattctgggtccgtcactgcagtattgtcacaaaaaatgataaagagattaagtgtataaaaattaaaatggcagcaaattatcctattttaatctgcattaagaaagtcttaacaatatgcccatgttttcatacaatttaactactatgaacaaactcaactctaaggcatatgtgcacacacaagacatttcttttcatagctaattctttcttcattcataatctacaccagtcagtgaatacatatatcagtagggtacatattagatgttcaaaacaagtatgaacagaagattaagttgataacaacacttataaatgttataaccatttccatcttcattcattcatacaagtttcaaacagaggaaccagacttcaaactacaagcatatgaatgctcttctacattatcatctaactcaacatctccacacgcggcgagaacagttgtacggacataatcatccacctcaaaaccttctgctcgcattcgatacatgagtttcaaagcctcgttgcagaatccattccttgcataccccataatcatagatttccaagcaacaaaattcttttcaggcatgttttcgaagacattaaacgcttcagttacatacccgcactttgagtacatgtaaatcaaagcgctgcccacgaaaacatttgacatggaaggagttttcttggctgagtagtgaatcaatctgccttgaaggacagtttcaagctgagcacaagcttttaaggctgatgaataagtaaaagagtttggttctactccttccttaatcatttctctcaagaactcaagagcttcagagtcatatcctagatgagtacaaccggaaatgattgctgtccatgaaaacacatctctatgaggcaatttttggaggaccttaatggctttagagtactcaccaaatctacaatagaaccaaaccaatgtatttccaaggtacaagttagtttcaatagagttcttcactatctgcgcgtgcacttcccttccaagcaatgaattttcgatcgagccacaagccctaagaatgttcacaatggtcaagttattaggaaagatgtttcgcctcttcatggctcggaaaagctctatagcctcctcgccacgccccttccgagcatatcctgctatgatggatgtccaagttacaatattcctatgattcattctatcaaacacaatcctagagtctacaatctcaccacattttgcatacatatcaactaaagaagtgcctataaaaacatcattcttgtacatttccttaactatagcaccatgtaattgtcttcctaagcttagttccttcttttcaccacaagctttcaaaaccccacaaactgtaaatccattgggagaaaatccctcatccaacattctagagaacaaagaaatagcttcctccccattcccatgttgagaacaagcagtgatcatagtagtccaacaaaacacatcccatttagccattttctcgaattttcgaaaagcactcttgagatcaccacattcagcatagaatttcacaatagaattatcaacaatcatgttactcacactacctttgataacacctccatgaatctgcctcccaagctcaaaatccttcctcttactacaaagattcattaaacacacaaacatcttctcattagctcgaaccccatctcgaatcgaatccttaaacaacccaaaagcttcttcatttaaaccaaatctcatgtacccatcaataacagcagtccaagtaacaacatttctcacagtcattttatcgaacacattacgagcatcactcaatctctcaaaattcaaataaacacatatcaaattgttataaacataagtttctggatacccaaaacacttcaaaacaatcccatgtaatcttttcacgtcttccaagctctgacaagaccgaagccaaaccccaaccgaagaaggacaaagactatggcaaaaggaggaggaggactgagaagtagtagtatcacataattccgcttttgggtcatcgtaaaatctcgagaaatcgtctgaaatcttggaatcatgataaaaagatgaatttttataacagaagcaacgaaaattccaagttggtctgctctgtttttggttgtttgagttgatggaattttttcttgttttttgtagcttaaatggttgaatagacaaaaatggtggttgtgagggtggaggagtaagattgaaactgatatttggtgatgagaaagtgggagaaagcattgcccgttatcagaacgaaaattgaaactgcagaaaatgaatagaagaaaattcagtatgggaagctctcttcttttccgttttttattaaataaacattatcagttataattgggctcaagaaaaacaaattaatgtatcatctaaattgaaataattaatattttttaaaaataactatattgtgtttcttaaaataatttttttttacatcaaaaaaattaaaatagattttttttttctgaacaattaactttcattaaaaataattagagattaatatataaagaaaaaatgaaaaattatctatccaaaatctctatacaaattatgtacattatctactttgagtacacgaactgtgtacagtgtgaataaaaaatgtctcgtaaaaattgaatggcaaattagtaataaaatttaagaaagatcctatctcaaaataaaaatgtgggatctcttataaaatacagtagtcgaaaataatcaaccagactcaaacatttaataggtagctatataaacgagatctcgaaatctcctagaaaatacattaatcgaaaataatcatccagacttaatgcaagagactaatctagtgcaactactaaagttatataagtggacctccctacaagagtaaagaaaaaaaactaataagaacatattcaaccaataaaaaaaataatgtaatcgataaaatacgtggctgcggctgcgtatgacacgtgaatcacactgacgccttatcaaaaattagctaagtcatatacagacgggcaagtgtacttcaaggagtgagcccctagagaggaacataaagtatgtcattcttctccgggagctaaaaatacaacgaaacatctctgggaggaggagaacatgttcgaacagtcacttcgcattaatacagcataggaaaaacgtctcaaaacgcccataaaaagacatgacaaacagcgtaaaccatataaaaccatgtaaaaactatgtaaaaaccacatgcattaattattctaaagctctcatcattatctcatttaattgattgtaaaaaatttcggtcaaaaatataaatgattagtattttttataattattattaaaatatattgatatctaaactaaattatttatttatatataattttaaaaataatagaatttaaattttgggtaaatattcatattccatcgtctcccgcttgtcttcctctactcttcaccatttttctcgacggtgaaccaccccatttcaccggcgacgacgagcgagatgaatctttgtgccaatgaattacatttttcatagcaatccaacgcttaagccatcgactttcatgctgaccctgaaacgatttcactccattctttcacacacatctttctctgactccaactccattaaccataaaatctctttcttcctctccacccaaaatctcaccctccaatctctccttacatatcatgctctcatcatcacttccggtaactcccacaacgttttcattgcatcaaagctcatctctcactacgcctcttctctcaaaggaccaaccttttccgctaaggttttcggttcagttcatgacaaggatacttttctttggaattctataatcaaagcccatttttctaatgggggttgctctgattcccttaacttgttttttcaaatgcgagttgcgggttttgttcccaaccagttcactcttcccatggttgttgcttcgtgtgcggatttgtttttggttgaatatgggaagagcattcatgggttggctacaaaaattgggctttttcaggggaactctgttgttgggtcttcttttgtgtatatgtatagcaaatgtggtgaattgggtgatgcgcatttggtgtttgatgaaatgtctgagagagatgttgttgcctggactgcacttgttattggatatgttcataatggtgagagtgagaaggggttggagtgtctttgcgagatgcataggattggtggcgaaagggagagaccaaattttagaactttggaaggtgggcttcaagcttgtgggaatttgaatgctttgattaatggtaggtgcttgcatagtttagtgttgaaaaatggaattgggtgttctgaagtagttaagtctttgcttttgtctatgtattcgaaatgtggtactcctttggaagcttattttttgtttagtgaagtaatgagcaaagaccttttgtcatggatgtcggttattagtgtttactctagatttgggctaatggatgaatgtttaagtttattctgggaaatgcagattgctgggatagttcctgacgaaattgttatcagttgtatctttcatggttttggcaattccttgtgtgtatactcgggaaaggcgtttcatggattaagcataaggcgaaattatttgtttggtgagattgttcacaatgcaatgttattcatgtattgcaaatttgggctgttaaatcttgcagaaaagctctttagagggaggttggaatggaccaaagagtcctgcaactctatgatttcgggctattataagataggacataatgcaaagtgcatagacttatttagagagatgcaatgtctaggcattgaagctaattcagagagtttggtaactgtaatttcttcttgttgccaattgggagcaacacatcttggtcgatcacttcattgctattcaataaaaagttccatagacaaaactatctcagtttctaattcactcatagacatgtatggtaagaatagtcatttgacaatagcatggagaatatttttccgggcacagagagatattgtcacttggaacacaatgatctcatcctatattcacaatgcaaattttgctgaggcaatagctctatttgatgaaatgctttcagaaaacttaaatccaaactcagcaacattggtaatggtgctttctgcttgttctcatcttgcttctcttgagaaaggagaaaaggttcacctttacattatggaaagaggacttgagatcaatgtatctcttgcaactgcattggttgatatgtatgcaaaatgtgggaagcttgagcaatcaagagagttgtttgactcaatgagagagaaggatgttgtttcctggaatgttatgatctcaagttatgggatgcatggacatgccaaatctgcaatagacatattccgagatatggaacattctcatgtacaaccgaaccaactgacattccttgctcttctctcagcttgtaatcattcaggtcttgtggaagaagggaaatatctctttaacagaatgcaaaaaacttatggtctgaaacctgatttaaagcactatgcttgtatggttgatcttctcggtcggtctggaaatttgcaagatgctgaaactttggttctctccatgcccatctctcctgatggtggagtgtggggatctttgttaagtgcctgcataaaacatcatgaatatgatatgggagtaagagttgccaggcatgctattgagtctgacccggacaatgatggttattatataatgcttacaaacatgtatagttctagtggaaggtgggatgaagctgaaattgtaaggagaatgatgaaggaaaggggtgtggataaaggagctgggtggagtgtaatataaataatgtaaagagattcttgttcattcttgtttatgcattctcaacctgggttaaaggagtcatgggatttacctttcattgagtgatgaaagggtgaaaacattcatctgaataggtgttggcacatctggcgaaatggggctagaactgcttctaatctgaaaagataatcgggtaatatcacaatcacaattaacttgttcaatcttttccccttgtagaaattaggtattttaaataattatttgattgtaactcatgtaaatacttttcaaatgaaaaaaaaaacagattgaaaaatgaatctgtaactgtgatggtacaatttctttttgcaggttcttaaacctattgtggaacgcttttacttaatcttgtggagacctggttgttgatttgaataaatttaatcaatcatattcactttggatatcattgtgaaagaaaaatccacccttaagtgtggtttgggattttcacttgtgaatatttatgcagtctggaattattttagttatagtaaaacaatggcattaaacatgcatatgctgttatctttgcagggacttaaagtagccatggtaagtcctggcctgggtttgtttatgagccatatgttcctcgtgaagcggtctcttttgggcagatagttatctttcaagtgagttagagtagttttggccctttgggggataatgttttcttattgattttcatttcagtaaattggatttataacaaaggtaatggaggcaaaactgcttagtttcattgatgtgattgtactgtcaagattccattgaattcatttaagtttaaagagtatcctcaaatgtcattgttaagactgcctttagtccattttggttttcttcctttaatgcagtcctcttatcagatcttttgatgtttgctactctcatatggtttacaagacccggttggagatgaacgaaagatgatatgattttcgaggtaatgttatcttaaagcattgtagagaatgttttgaatggtttttggcgttgcgtatattcagctttccttcttcacttcatcttgtagattttttcctggattattgttatcattatattttctttgcattgtgatgttttgtgttagcaaatgtgtagtcttattataaagtgcaataaaaatttccttttctaatcaaaaagtttatctcataattcttaacataattgaaataactcccttacttttaacttgcatgcactaatatttggaccacaacatgttgatgaggaatttcatgttaattttagctcttgctgtttgttagcctctaattattgttgatagtgtaatacaagattattattacctttctagttattctttttctagttttgtttagtctttacctaatgattttatgttgatttatctacattttctccagatcaatactctaatatcaaatggagacgaaagctcacttcgaaaagcagttacagagacatacttctcccctttttacagacacgaaagaatgaaattaaacaaagagaatccatgcgtagcgaggtgtgatctaacttattgtcaaaattcgaacccttctagctcgaatggcaagtttttcttttgcatttaaagaatatgtacaatgttattttttttaggggtcccttctttttattggtggccaaatattagaaaaggatttgtaaatgtgagagtgtttggagaagaggcttcttaattttgtgtttacaatgtaaattaagagtggtgagtagaaaacattggattggaggtgtttcaatgagttttaataaattaaattctttgtttttatgattttattgaaaattagtgaagtgggggagagaatatacatttagtttctcattatattacatcttctctatatcaatagatcaaaagtcttaataaaaacaaaataatattatataaattattgtgtatataatgcatgtagcttttacttagtgttatttttatggtaaataaaaaattaaacataaaatttcaaagttaagtagataactatttaaatgcataatcaaaggtacttagtacttaacaatattaatgtgggactttgcttgatcactttacaaaactaataagtttagtttcttcatgatctcactttaaggattggctaatacaacctaaacacaattaatccacacaaattgttagcaactagttagttaagctagcgcaattatatatgtctaaacatatttaattcctctcctctcaatagtatacaatctaactcttctaaattatacaaatatttatagaatatagttaatctcagttatacaattaaaagcaatgtaatataaatataaaaaattctaaaagcaccaataatgcacatgttactaggggtgtagatggtttgggttggccgagttagaagtgttttaatagaggtgttttaataggccaacctaatgactacaatttgaagaagttataagccattcaattttttttgttatacaatccaaccctactttgtacaataatttagaaggtggggtcggttagatttattgggttgagaaaaatattttaggttttaatatttaatgataaaataattttaccatgtaaatatatatgtgtgtatgtaaatatagtgctataaaaaaatctaaagtggcgatggtatggtatcattatatgttagacttgtttgtagaagtagtagagtaactatggactatgtattagtagtgtgttttggtcaattcactttctaaggttatcctaataatacaatttatttattaaaatataaaatatatattttgttaatgtaaaatatattttatatataaaagttgtctcaaatttgaaacatctttcaagaaattgattgagttggggtatatagagttaaagtgtgcacaatttataactaactcatagttatatgacctatcactttttaacccaatgagtcatgacctactcttaatataatcctttactacaaaaaatgagttaacctggttgaatagtttaacccatattttgtgcacccgtacatgttactgtaaaatattataataatggcataattaactaccaaacactctaatataatttaataattattataaaattatgtaagacattcttgcaatcttctttaaacatgtattcaaacattagatcatcaaatatataaatattttgttatatttgcaaaaaaacatttttttttttttgtttgagtatctggtaaagattaaaataacaaaagataacaaaagttaaatagtatgtgagtagaattgttaggagagttgaatctcctagccattggaccttagatgaagaacataacagtaaagaagaaacagagagaaaacagagaggaaagatacagagaaagattgagaaaggagagtgaaagattgattcattactgggaaagatcagtacaatatatactcatcaaagatgagtgaagaccaaacaagaatctgttacaactgaaaagcaatcctaacagccgaaaactaaaaacagttgagaaccaacttaacagaaaataacagacttgtaactgaattcccttaacaagaatatataaatattgtgttatatttaccaatttttttttttttttttggtttgggtaactaataaatattaaaataacaaagataacaaaattatacagtctagggtattttttcatttaagaaagttcattgtctatcataagagcattcttaaccaatctatgagtctcaacattaaagttgtggctgacatgagagagatatcctatgaaagctaaataataactttaatatcaaaaaagataacccccaaattattcaaatactctatttgaccttccaaagttgagactaaagatagtgaatctgaaagaccatttctattgaaattctcacattttaagcccaacgcaaatctactaataagtgcaactatttttacctgaaaaattaaaaacgaacctgcaatgaaataatttaacagcaataagtatttttaattttcaaaactgaaaatcattataatataattgtactaaagtcaaatatggaaggaaactccttagtttgattatttacttaatttcttattaatgtttaatgtcacaatagttatcattatgttctgaaaaaataaaataaaaaaaacatcatgttccaatgcaaaaggaattaaaattgatacattttttttttaatttatgttcatattcataaaaaaaaaataataaaattttagtaattggataaatatatttagtgtgatttatatacattagtagatattttttttttaaatttactgtttaggttgctccgataatttttatgtggattactacgtagaatttgattgcgatttaaattgttgtgttagttgctatgtgtatttttatatatactaggtgattgttacgtgccaagccacgtagtgttagttttatttaatattttagttttttattttaattaataattaaaatagtataatt

SEQ ID NO: 15575 - DNA, 5183 bp, Cannabis sativa
tatacattggagtatttttagaagagtgctaaaaataatatggaagagagataaaataaaatataatatttttaaataatgtgtaaattttataatttgtaacgtggacaaaaacatattgtggagataagaaaattgatatatttctacaaaacgacacaatgcacataacaacgacacatataatatatataattttttatatataaaaaaatatgcaataagccacgtgtatggtagggatttcgactccatgtactgctctaaaccactccgactgtgtggataagagtccctcggacaatatagagaaggggactcactcggcgaacaatcaaaaaaaccaacgaaaagtcagccaaaaatgtccctgaacgccgtgctccggcttccattgtcaaacttcaggacccttgaagatgggttggtgaggcactccctcgtctcttccaaccggacgagtctaaagcaacaccccgaactgaggcaacagcagcagcagcaacgccaccaaacacttgtggttcaggccaagggcaagaagggaatgcaagaacgacagtttcagagacctcctcccatgcccaagattgaagacgatggaaacccacgttttgttatcttcatacgtatggccgaggttcgtttctgtaattctcatgtctttctttttttgaactcaaaagtttaatctttttaagctttttagttgaacttgttggtgggtttctgcagtttaaaaagaaaaattctgctttatagctttctaagcactaaatttaaataattgctatatgatcataatattgtacagtagttttcaattgggtcacctataataatataattgatactgtagatataatgatttatatatgctgttcaggttggtttctggtacccgcttagtgtagtaacaggaggtaccactgctaaaatcatggttgcagccaaagataattttctgggaaaatacatatacaaagacacattggctagaaatcttgctgcagttatctaccgtgtaagtttttatgcttgttatgattttgtcaactatatttctcttacatgtgctgatatatcactcattaggagaagtaatttgaagatcatgagctacaaccttaaactaattttaggccagaaatattgctgtgctaaatgatcacattctctcttctggacatttcattgttctgattcaattttgaaataacaaacactattttttgttatgataagccttactaatagcttgttattatctaaataggatgagaaggagatacagaaatcagcacttaagcagtttaaagtgctgcggtcagctaagaatttcagatatggatacaaaattgtcgtaatgatcttaaattctctactttccatgaaaagattattccttttctctgagatattctgtcatgtactcaatgtgatttatttcaaatatgggattagttgagtttctgttgctctgaacttacaggaaaatgggaatataaaagctgcactttctacctcagatgttattgaggtataaattaaattattaagttgcaaatatgtaattcttttatctcttgagcttctgatctttcccatttaacatctttttatttgctcctgaacttagcttccaacaccagataagctcaagacagtagtagacaaggtgaaagatttttttggtgatgcaaaggactcttttgggaagatttcctcgttaaatgccccaactgaggagtcccagcaaaacatccaagaaaaggaaaagtgagttacatatgtaacattctctgaactaatttatctcctttccaagaagctttagttgttgaagttaagaggttttgttttctttgtctggttatccaaacctaagctacctccatcaccttttaacatttgaaagtctcatattgatttcaactctcttagctaaaatggtttgttggttcatctaccagggttaaaagctgaagttaaagcacccaattgcttgattcacagtggccactgattaagggagatagagatcttctgtagtacatacaacgctgctcggaaagttcgtgcacaagtctcttcctcagttttgttcatacatcttctgctcatttacaaagtttcatgttatttttcactgatgtcaatatacagattttaacaagttccgggcttgtatattatttttgtaacattttaaactcctggaattgagtagagtacatcctttggaagaagggaatatcatttgaagtttttccttatgcttaaaccaagcttcatagagaattctcattcaaagttcagtagcatagaaacgattacaatataatgtccaaacttagcgttttagcatgaacttattaacaaactatttagaacactactcactaatgcctccaacgacaacagcagcaaatatagaaacaaatggcaactcttaagtaacaaacaacagtagagaagcaagggtcttacttaggcagaaaggacttcgcatcagtacttattatcactcactttgacacaaatgcatcactacacttccattcataatcctttttcacagttgggactacaataagaggagtcttctttcttgtagcgagcccaaaaatctcctcaaggtctacatcatcagcaccaacaccctcaggcaatctccaatcaaaatgacacaacagcagagctagtccaagctcaactgttgccaagccaaagttatatccagggcaccctcttcttcctcccccaaatggtagaaacttgaaatctgtacctttaacatccatgttataaccctcaaatctctcaggattaaactccaggggattttcccatgatttagggtcccttcctatagcataggagttgatcaaaacccgagttttcgcaggtatgtcatagccatccaaagtacaatccgccatggattctcgaggaacaagtagagggactggggggtgcagccgcattgtctccttaacaacagctttcatgtaatgaagatactggagttggctctcgtcaacttttccggcagctgaagcgatttttcgaacttcttgttgtgctttcttcaacacttttggatgcctaactagctctgtcattgtccattctaaagtggctgatgttgtatctgttccagctacaaacatgtcctgtagtacaagctctttcaaattctcaagttaaattagtcattcaaaaaaaccaaacatgtcttaactcagtaacttgttttaccagaacaagagctttaagattgtcatctgtaatgggaacctccaagtcatctcgccgctgcacccgaagaagcacgtcaacgaaatcttctctgctatccaatgacgacgtcgttttcaccgctaacgaatgatcttctattatttcatcgcaaaccgctctcagatcatccaagttcttctccactctccttttgaacccactcaacgagttgacccatttccactccgggtaaaaatccccaatgcaaaacccaccaagcaactcctgcgtctccgccaaaaccctcaccaaatgacgcttctgcccttcgccggccgacccaacttcatccccaagaaacctcctcccaaaagccactcggcacagaatatcattcgctaaggtaaacaacaccttgcttaagtcaaccacctccgacgacaaacaccgattcgtgatgtgacttagcatacggttcatctcctcgactcggacgattccgaacgagttgactcgctttgggcttagcaactcggtgacgcatatctttcgtgcttggcgccagtagggcccgtagcgggagaaggtgacgtctgagcagccgaatgagaggtactgagcggccactagctggggtcggctggcgaagacgtggtcgtgagttttgaggacgagtccggcgagtcgggcggaggagatgactagagtgggaactcggccgagtcgtaggaggaagactgggccgagtcgatcggcgagtcgtgcgaaggagtggtgaggcatgtccgttaggaggtgaagatggccgattacgggaatgcatggcggtgaaggtgggtcccttcctgtctgccacgtcgacttgttagtgagccacgtgggtactcgaatgacgtggaggaacaaggaggtgccaagtaggatagcaaaggtaagaaagagaaggataaaatagtccattcgattattttccaagcgtagctggagagctagtgaagagaattgactagtttttgtagttacaactaacgagtttgtttttcataggacaacttatgtacatttcgaaataataatattaaaaaccttatatattttttttttctattttcttttcgtaaatattagataagtatattataaaatttatataattttattttgagagaaaaataattttttttaataataagtaaatcagaccagagtccattacaaaataatatattattcaaataattcaaatagtagaattaataagatacgtaaaatatatcgtttataaaaataggaatgaaataagtcgacaatgttgaagcataaaaaaaggagccaaattacctatctccagttcctgtcccactctctgacccaaccaataatattttaccacctcaattaaaattacacttatacatttaacggtcccctctaaaaacttaactctgttagtctatttttttatttaatattattttaaattaaaataatatcatcactactccctcactctctcatgaactcttaactcttctataataaattattgagtctaactgccattgtcatttcttctagcattttgtaaaagaaggaatatattgataaatggaaaatattttctcacacgattaattaatacgactagaaatatgaagtgaggtttaaaataatttatctactacgtactcaaagtctaataaaccagaaaaatttaattggaagaatacatacaaattaggggaaaatctaaatttttctaaaaaaaattgaacacaaactaaacccacaaaagacataatttcttataattagagggtatatataatataacattccatgggactgcctttctaaagaactggtcatagagaaggtagattttctgaactgaaaaacaaccctgttcaattcgatcaaagtcggtccccaaatcattg

SEQ ID NO: 15576 - DNA, 9552 bp, Cannabis sativa
  modified_base (3979)..(3979): a, c, t, g, unknown or other
aaatagtcgtccagatcaaaatgttatttgcaaaagttgttgctggaaagagttatttattagttgttttgccagattaaaatacttatttaattttaaaaatacttatttaatttattatgaaataaaatacattatgaatatataataaaagataaaaattaataggaataataattttttttatatgattaaaaaaaataaatataaaaaagaaataaaaaataaaagataaaaaagagtatggtaaaaaatagaagagttaaatagtcattttatcaaattgtaatccttattcattacatatagctatgtaattaggattcaaatgagtagtgtaataccaattacattgttaaaaaattacaaaagttaaaaaagataaaccaaaccaaacattagaattggaaactttcattccattccaaaaatgattacaccaaaccaatgggctgtaaattgtttgattaccttaaaacaaactagatattacaaatgcaacatatatttttttggacaaaatattataatacattttggtaattttgcattttatttactcaaaaaaaaaaggaaaaaagtagtctatatatattatatagtattgcagttcaagaaaaagattggatagttatataataggatgattaaagactgaaacggattggagttggagcaatcctaggagtaggaggattagtgagcatgtgaacaacttctctcatggtgggcctagcagagctttcatcctgaacacacatcatagctatcttgaacagatgaatgacacctgtcaatgaaggattgtgaagtctggggtccactaccgccagcacagcagcctgatcggacggctgagctagctcggaggtggtcttagtgacccatctcactatgtccactccgtccccgaaatccccaactggtctccttcccgcaatcaactccaacaacaccactccgaaactgtacacgtcacttttctcgtccactttcaacgtataagcgtactctgtcattataaataaaattaataaattatattattgcttatgttgaataataaaagttagttaagaaggtaatgtaaaagaagtaaacctggagcaatgtaaccatatgagccagcaatagaagacatgcactcagaaacaccagcgtctctcaaaaacttagcaagcccaaaatcagcaacatgggcctccatatcggagtccaataaaatattattggatttaacatctctatgtataatcaaaggcgaacaatcatggtggaggtaacacagacctttggctgcttcaacagcgattttgtaccttgtttcccactctaaacgccctcctttagaaccatgcaataactctcccaaactcccattaggcatgtactcgtacagtaataaattcgtatcattattagaaacataacccaaaagcctcacaatatatctgtgcctgatttgtcccagcgtttgaatttcagccgagaatccatgatcggaacccccgcgaccgtacagtttcttgatcgccacttcagctccataaggcaatgacccacggtagacgatccccgcgcccccttttcctatgatgttttcttccctcacgcaatcgagcacgtcctccactttgaaatcgaggcgctggaaggctgtgagcttccatgctcttgatttttgaagctttctcttgcgtattcggtagagtgtgaggagaaccagtagaagtgcagtgacgaggaagattagaattatgctgagcttggttgggttcaagaccttgttgcctccactaggggttccgactctgttccccatggatgaacatgttgaggaggtatgacgtggcggacagagatttgggttcccaacaaacgacgtgtcgttgaataccatgaactgtccgtctactggaacatggccaatgaaatcgttgtaagagagatcaagggtagtgaggctggtcatggatttgatttcgtatgggacttcaccagtgaggtggtttttggacaagtttagaatacttaaatcccttagctttgatatccctttagggacttcaccgaccaagctgttctggctaaaatcaatggcagtaagtgaagcacaactcgtaattgttatcggaacttcacagctaagattattagcacttacattgatcctagttaaattatttaaaccaaatatctcactagggatttcaccataaaacctgttatgttcaatggaaagagtttgcaaattcttgaggttaccaatcgcaggtgggattttgccggagacccaattgttggaaagaactaaaatccccagcgaatctcccgaaattcgagacggaagttgcccagaaaagaaattatcattcagctctataatgcttacgttaggcaaattgaaaatcccagttggaatggtgccattgaagaaattcttaccaattcggattttagttagcgatgtacactgtccgagctcatcaggaatggttccgaagaaagaattttgcatcagaatgagagtcttcaatcttccacctttgcacaaatcacgtggaatgagtccagtcaagtggttgttggtcacgtcaagatccttaagcttcccgttccggccaagactctccggtaagtaaaacgtgaaattgttatcccatatctgaagcacctcaagatgtggaagctcacctataaactctggtatagtaccgaaaaaacggttcctgaacagattgagtagcgtcaaattcttcaacccagagaaactagctggtatttctccagtaagctgattgatcgagagatctaaagacatcaagctctctaaaccagaaagctccggcggaatttgccctgttaaacggtttatctgtaagaacaaagagtgtaaattcttcaattggctcagagttacgggtatctcgccggtgaggttacattcacccatatccagtaatttaagtgagttcatggaacccaattctggaggaataccaccatcgtaattgttatcgtacccaacatacatttcctcgagattctgcaacagagctaagctagccggaaactttcccgtgaggctgttaccgttgagacccaaatacatcaaactctgaatctctgagtagttttccggtatgcttccagagaagtaattcccaccaagatgaagatgcttcaattttttaagcccaacaatctcaaccggtaatggacccgtgaaactgttgtcgtaaatgtctagaacttcaagctctgtcatcccgagtgtgatttctccagggaaaataccactgaaggcgttgttggagatgttcaagtgcttgagtgacttaaggttagccatttccgccggaagcttgccagtgagattgtcacaggcgattgtcaggttcactagcttgctcaacatccctatctctggtggtaagtaaccaaagagaggtaagtttctaacgactagtgtgttcacacgtgactcgctgtcgcacgtgactccagaaaaggaacagtacggtgaagatggtttccaatcctcaagacccgaacctttaggtccggtcatggcagtcttgagcttcaatagtacgtctagttcactgttcccggaagaactagttgttgttaaaaataaaaaacaaagaaaagaaagaagaatttgacagaaaaaacagtcacccatcatcattatcatccaaactccccccctttgtttgtttcagattattgagataagaaaacaaaattcaaaaggtagaagaagaagaagcttgtatgttcacaatgtggcgctacaaatagtaataactaatcagtatatataaaaaaattagtagaattaaataattaataaaaagaaaagttgttccagtttagctgtagaaagaagagaatcgaagctttaaatttaataaaccaaaattggaaagtgaagaaaataataataataataaaagagagagagagagagagngagagagagagagagaagagagtttgagactgagactgagactgagtgagtgtgtaaaaactaaaaagagttgcatgaggtttcatgtcctagaggtgtaggacctggacgcagtgggtcccatggttactgatttcacggtgatttaaggtctctgtttgttgtttttactattttatccatcgtcgtttgtttcagcttagagatgagtgttagggctaaaaagggaaaagtagaaaaggtaaacggtggacgttaatattgatgaagggggggttagtacaacacgctagtctgtgatggtacgctgatagatgtggttttgacggcgtgatttggttttgtttgaattccaaagcccatgataatatatattgttggactttgcagacctgtctcttctactacttccattcatctatgtctttccaccagttgttttatgacgtctgaacatacaataataataaaatatattcttattatttttaagaattttccttcaattttattttatgtaccaaaaacacttgttaataaaattgaacagaatcaacttgtactaattagccttaaatttatttataactctaaaataataaaacagcactcccccaataattttgtaaatctacttctgtacttattaataattaatattggaatggattttgtttctgattcttgtatccaatgcccccttgactttctgttatggaattggaatgggctttttgggcttttactgggcccattaaagcaaagcaaaggccctgggtgtcttttcccatacagacaactttccacactctgactccatttggccgtgagctaaaagtccactctttttgtattttcctatctctttctttctttattttaccacttttaattcatttctctctctcacacaaacgcaaacgatccttcggatttcttctcacttcagtttttacaacgagtgtttttaggaataaaaatataaaaataaaaatagaactaagaatataatagaataaaatttaaaatgttaaaaaaaattaattaaaataatattaaattttttctgttgttacattaaaataatattttttttaaatagaataattattctactaaaatagtagaaaaaatttttattaaaatatcattttaatactttaaaatgcaactaaatagaaaaataaaataaaaatatttactttccattccattatattttattacctccaaccaaacgctacctaaaattcttataattattaggagataaggttctataattagttaattagttaatgatttattatatttttattaaaataacatatataaaatttaatattaaataatattatacattacagaaatattagacaccatcagtgaattttaacatttttctttcatacttgtactttctcataatcttatacttaatactcccttgttcatggtaacacggtctacgaaatcttcttttcaatcagattctacattatcaaaactcgtaatgagaattgttagtgcacaacactgtatcttatattgtttaatgcctattaatttcgaattatacatgtcttttttgaaagatacatattttattattaaatgagtgatataataccattataattagtctcatgtcttttatagctcttgtaaatacttgctcttaatagtgtacaaaaaaattacttttaaatttggattacaatacaacatatttaaaatttatatcacaataaaaatattatttttatcacttttgatatattattattaaatttaattaacggattaaattataaactcttatatttattttttttttattattttacataacaaaataataataataataatagtgataaagttattatttttatatttttataaaaatattaattaaaaattaaattttacatcaaattttataatattatattgaagtacaatattaaagattaatacaaatatataataaatttattttttacgcaaaatataatataatttttacatatctcttattaaagatagtctagctaatattgattatttctttaacgataactaaaaaaattaattcattaatataaaatatcagtaaaaaaataaaattatttaatattataaacattctgattttttacataaattattatattatatatataatgtttaacaatatttaaattaaaaaaataaataaaaataaattttaacctcattatgggggaatttcacaggttaaatttacattaatttataatcatgtgatactattttcaataaatggtaactcaccttttattttctttttttttttaataaaaaagggtctttaatcgtttttatatggtgggcgatacgaaagtgggggtataaaatggtataatatttgggagttgcacaagtttgtgttaatcaagtaaagaaaagcatttattctgtttttccttctaaattagctagagagaatagattcatattctcaaataatgcgttagtggagcattctgtattaggaagaatctaactcatttatttttagggagagaataaagattttgattgaaaattaactatgccttcttactttttacttgtacataataaaatcaatattaatttatccacagatttgcataactttttggatactttcaattctctttccaagcttaaaacatatttaaactttgttgtggctgctttactggtgcttcatataagacttaatataagtggttgaattataagtattttagactttatatagttatatatttatatatgtttgtgctctgtcccaaacatgtccacaaagatggtataagatgtatatatatatgtataagtgggttcatgatttttgtataatgtaatgtataaataatgaaaaatttataaattggaaaagttttgaagcttggttgtccaacatcgaatcatttaagatttaagaaacttgtggtggagcaaacctagctataccctacctttaaatgaagtcaatgcaaaaccaaaagcaataaagaaaaaaaaaatctcatgaatttgtattcttactacaacttgaaaacaaccctattaattgccttttgtctcttatcattaacaacttttatgctctttttttttaaaaaaaaaaaatagaaagctaatgttctctagttagtgttttttatgatctgtgtgtttttttttaaatattttatactttacgtgtttataattaataatctaaatttcagttagtggccattgaattttgacaactacgtacatattacaaagtgtgataggatttgcatcaataagagtaaattaatataaaatgtttggtttaaagaatatttatttttgaatttattctttaaatattacgagactttgtgcatgactatattcgtggtccaattatttaatcacattatcaattaacttaattctctatttttagatgtataattcatattgtagataaatcaaatcaataaaacgatatctttgtttgagactttattgaatgtgacttgatctcaggtaatcccacggctctagaaagaaatattccatatattgttgttaaaactagtcatcatcatcatcatcatgcatgtttaagtaatttaatttctggcaaataataaaacaaaaaaggaatgatgaagttgcagagggcattcaatggtgtgtagacctagacagtgtatccaagttgcaaagagggcctctccctctgctacttaatttataaatagagaaatgctaaagggtactagtggtgtctagcaccttcttacgtgtcattattgttattagtccaactaagtatctagtctcatataatttaatataataacttttagagagtatcattaaccaatcgcaacgtgacatgtcgagaaagtgctaggcaacactggtgcctaatatcaatcctcttataaatattatatatattttaagaatttataaatatttttatttatttattattattagtaggtgctcttcctatatcctatcaactagagaggtacttgagttatgtagattagatttttttaggtatggaggatgattttgatggaggagagcagagcagagaccatagctgcagaagtgattaaattttagcttatttatttcaagtgctgttgctcaacgctgccatcatgagaaatattctcactagctacggctagttttcaatcaaacatacacacacacaacacaaatgtcacatccacgtggttttaataggcaaattttaattatacaatattttttttctatttttcaacttatattttttttttatttttctttaaaaatttatatattggtccccctttaatctttattattatattttggcatcacatattttctcttgcactcaattagaaatagagtatttatacttttaatataatttcttcccaaatataatcttacatttaaaaaaaacctctctctaactctctcacctgcgacgttgaaccctgacccaaaacccatactatcgaacccaaacccagaacatcagtcacaagccccgctatcatcttctctctctctctctatatctatatatatatatcccgaagcctcaaaatacatgagctcaaccactctaaaactcccaaaatctccactcatcactggagttctcaatccattgcttgttttctatatttttttcttttgatttttagttttttgcgatatcactaaacacatcgctaaatgtcgctaaatcacactcaagttttcacgatggttaatgatgtttagcaatgtgctttgtattttttagtctcatatcacaaatacactgctaaagtcattgcaaaatatgcaaaacatcacttaacttcactcctaatctcaaatttaatttatcattgcaaataccttgctaaatatcacaaattattgcaaaaatctggaaaaccaaaaaaaaaaaaacacagaaaagacaaaaaattcaaaattcaatttttgagcaaaaaaatcaacaaaacacaaaaaccaatatatagatctgttaaaaataaactatatatatagttttagaaccccccaaataaagagcaagagaatgagaggggcgtggtagtgagtgtttgagattttattacaatggaagaaaatcaagacattacaattatattgcaatataatatactacaaagaccaacaaatagattaaataaatgttacaacacataatatacaatatatatacactatatatattatatataagaaatgtataggaagatatatatatataaatgtatgtatacattcactcacaaccttaagtgtagaatagtgggaatcaccatgacttgaacaaggtattacactgttgtccaaaagcttattttttcttatctctaagcattttggtacgcaggactggattggattcgacagactaatttatccaatccaatgtttgggcatgttagaagtctggataactaatccagctaacctcgtttgtctgggattatttatcccatccagtagggtgggataaataa

SEQ ID NO: 15577 - DNA, 7763 bp, Cannabis sativa
cgcaacgtggtgctaggcctaggcaccacgcaccactggtgccttatagcaatgctcataaaattaagattctagtccttaatggaacacttgtcctttatgcactacacaactttcacggaggacatgtcaactgactaaagctccacctatggagtgagaatgaatttagtatttcttgaatttttatacttagtctttgcaaagataatttttatgcaatttttaactattaaaatattacctttattttctggaatgtaagtagctaaactcatctctatatgagtgctacaataactagattttttatttcttttggtaaacccaccaataggcaacataggattacacccaacctataaatactcaggggcaaaagagcatagaccatcactatactccacaaaaaatctcaaattcgttaccaatacatcacattaagagcatagggttttaaaaataaaatttgccttgaatattttttaaaaatttcacctcgaattagaaacaaaattattatacagacgatagaaccaatagagggtgctccaaggatccataactcaaaaatccatttaacaaggctttaatggcctacatttgatacttcgacaaatatatcatgtgcgaaactcttacctaaagagttaacgcccaagctaaaaactcgctcaagaaggcaacacccaaaaactagccaccataatgatcccatgtcatggaaaaaatctaaagagctaagatataacttttttttgcctaagcaagagtcctatctctattccaaataagaagaaaatctaactctatttgcaaccgatctttctagcccaccaacttgaacaagaaaatttaactttgttcgcggcagacgttaattaccaacaattttgagcaagagatttactctaatcaatgatgagattgataaagagatataactttactcttcactcaaaacttaaccaagagatttcaaaactctgcaaaagtttcaaactcgagcaagaaatataactctgctcctaagtcaaaaatataagcaaaaagtttaaaccttgcaaaagtcccataattgagaaatagacataactctactcgactaccacatgagatatgagatataacttagctcacatttcaaggataagccacatttaaaaactccacctacctaagtctaaggacaatggaagtgcccatgcacacatctcttgaagagaagtaacatacatgcactccataaaaaagtaatttttgtgtcaatctcgagaaaagttaaaaagcattgctcgaaggcttacaggaaaatactattggggcgaatgttatacccaatttcggaaaaaaaatgacaattccctcacgaggacccacaagccaagaataccttgaagatacccaagccaacaaggacggctttaaccaagactcaaaataccaaatggagataagacttaatccagggactacatggtaccgtgtttgagtgccccatggcacaccaagaaggccatgcaatcactgaacattcactagtgtcagtactcacacattagggttttaaacctagggtttcatgaatctatagtagggtttcgctttaaaaccctaatcttagaagaaatataacaagtacttgatttattgaggtagaaggaggccaagactttaacatagagtcaaaactgcacaagaataaacccctcaatagtgttattgaccagtgaccacttccaatggtcactgcttgtgttccatgcgagcagtgccactctaaagtggtcacttctcccctaggaaggaagagaagaggaaacttggccaattgtgtttctccaacattaaggagcataaaaccaataaaagaagccacccaagggtggagaagggtcttatgcgaccagtgaccactttttcactccaaagtggtcactactctcccaaagacaaggagaaggagaaagttggtcaaaagtgtttctccaacatcaagacacataaaatgaatgagaaaatccaccaagaggtggtgaggggccgtatgtgaccaatgacaactttgagtggtcactacttgcataatgcattttataagggttcactagggttttagggttaaaaactaagagaatgtttatcaccatcaagaaacttgccaaaatacaccctgaggtgttagaaatcaagtaactcaagagcagtgccatatcttatggtcacttctcgtgtaagacatgaatttgcaagcattgaccaaccctaattgtcactgcctgcagcccttccgtaaaattgatataactcgctcaattcttatccaaatgatgagggtcaaaatgggttagaaagctcttttcaagacgatctaagcttgtacaatattcatatcactattttgatgtttttggtcccgaaattgtgttacaagattaacttcttaattcgactggcgaaatgaaagcttcatcaaaagggagtcgcatggagttggcacacaaactgtgtcacttccctagcggcaaggctcccccaaatagactatatgtgagcggtaaccagttcccatggtcactacttgcccatttcattatcctctgaaaggagaatctcactgacacatgttaaacttatcttggaagatacacttccacaagacatttatttccttccatgattatatggatatgtttggatagttcctttcaatgcaatttattacctttattcaatgagagaattagtgtgtgtattaaatttcttgagtcatgggaaatgaagaaaggaaaaccctaactttttcctaggtctatataaactaaaagataagacctaaaaaagggatctgacactagtgttatacccaaaattcggctgctatctcagtggaagatgcatgtcaagataaagggaatatggatcgatgcaatcgctttttatggaaaaactcattaattacgtaagcatcagagtgtatttgtaacctgcttactctaaagtcttatgtgaggaaaaaatatacaaactattgcttagtataatagcgagaaactatatgtcgctgaatgtgaatagtgaggcattaagtatgttacatctaggaatacgaaagtgacacatatcgactgcaaaaacccttagtgtataatgtacagactaagtgtgacagtcaggttggctcgagacctagcaagcgaggtgcctatctcgctatgggaagacttcatgtaacttcacccagttaacttcagacattttctcaatgaggtttacaatcttgacgagtcagaagctaacattcaaacaagccttgaataattatttgtatataagaaccacgatcgccgcaagacgtgcatcatcgacctcggaaggaaaaaatagccccagcttgctattgtgatcactggaaccaagcttctatcaagacatccccatatacaataattagagacatatttaaatacacgatcattttgacccagtaaaagcgggaaaatcacagctgtataatttttaagtaataactgcatttacactgcgtgatgtgtaatcaaaccccatgattttaggatattattgttgtaaattaccatgattctttttggttttatttctcaatcagagagacatgaaacaattgtcaattaccatcaccatttttctccatccttttggtcattgttcccaagaactttgatcttgtacttaccactagtaaaattcgtaatgtggttatcttccaaaaaatcatatacaaacaccaccaacactttgatttcaccaagaaatttcttctgtaatttactcaagcattcttctgagaacctaactctagtgtgcttaggtcttattaataaaaatcaaagtagacgtagctttataccatcgcaatatgggggtgaacttcgataaatcctagggtcacttttttttacgattttatttttgacaaccattgtcttagtctagttctcttttattattatgatcttcttagatcagttgatgaaaaactgcgtcaacatatatatttatagcggtcaaatcatgtagaatcaaactatatacaacacctttactaagtgcctacccacatatgtcatttaaatcacaatcacatgctactactaattaatgcttactaaaccgtacttggtaattctatattaaagattacatacttttatacactaccaactagttatattcatatggtatgatctcaattctctagtactcttataggatcataaactcttatatgaatagggattgttctgatatttattacttatttaataataattaacgtattcatttataatatttttatattttatatatttaataaaatattatttgtcaattacttatttttagatcataaaccctaacaagaataatagtctttttcttctttttttctatcaagaacaaagatacatttcctagccataaccaaagttctcatttattgataaatactttgatccagaaagtaacatcgttctctatgtgcccacacacatcttgaggtgtagagaacaatctaaaagatctaaggtgtgagtacacaagctcatcaacgagcaaaaatatgaagatcatgatttcatacgaaaagatataaagatacttgatagacttcaagaagtaaaagaatcttaatcttttatatgttatttgcgtggatcagaatatataagttaagtatataataatatatatgtttatgtggtatgtgtatatgtgtgtatgagcgcatatatactttgcatgatcatcaatgtgatatattaatgagatttgtgatcttggatgaatataaactatttatatcataagttgaaacaaaatttatatacatgactatatacaactactcaccaattgtattctgttccataagactctgtctccaacatattcaagcttcaaatggattttattcatgatattcataggttgcgttctcaattttggtggggagggaaagatatcaagagaaatatacaacaatattgtacttgaaaatgtctctgttggcacaaaaataattgtgatatgggtattcataatttgcacctttttaagcaggttttattggcaaaacatgagtggggattttacaagtttacttcttccttggcagctcgagtgttcaaagattgtaatcacaataataactctttcgacaaagtttctattgaaaaaaaaaaaaggttcttatacctagaaaaataacttaagggagagagagagagagatttttgatagtggtgctttatggagggtttgtggtggctatggtatctcgatttataagccaaaatggcttcaaagtgttgacatgtatttacttgtttccccttaagtgcttgatgagcaagcggtggtggctttcttcatcttgataatggtgtttggagtgacatatttttttctagtgaggctattgcttttttttacatacattggcttctattgatgctaaagaacaattaatctgaagtcacgagacttctagtttctatacagtgaagagtggctaatggttcgccacacgcaacttgagtttgagtcgtgcctcctcttctcacagatctaattggtggtaccatttggggaatttgaatcttctgccaaaggttaagaatttttcttcttctagttagatccctactatggatcacttgaataataatgattttttcaattactatatttttgtttatgaaaatgaggcagatatttttggttgtcacaaaatatttaaattaattaaaagttttattatttaagaaactatcgcctaagttgaataaagctattgaccttgaaaagtgtcaatgagaatgacatctaataagtggtagttgttatatagagagaggaaacataaataataacatattgtatagtaattcatccccattatcattggtaaaaggactatatctacttgagcttttattcattattcagcacttagaacactcaacctaagtgatgaaagcaaatatgcttaaagaaatctgacttagagcactttgtatgaagtttggaaaagctacttgattttcagagcttaagttctccaaaaaaaaaaactcaaaatatatagaaagaattaaattatctttgagtttataggaaagggtggatggatatttaaatttaaaataataataaataattcaaataaaaggtatatattttagggatattcctttcaagttgatccaggtcgttaattgaggacacatcatctgaactgtgactatacatcttctaggattgatcttgaccgttgatcttatttcttgatgaatagttgagattcacccatctttgttgacattatgaccattgattccaagatctaacaacgtctgttgatcaaaatctagatgataccctaaattcttacttacccttgcaattcgattttcgactagaagaagtccaaatttttctctcattgtgaaacatcaatcgaacaagcatcaaaatatatttccataaaatctggaatgtaatattagggcatcattaagataaacccttgaatttttcatcatattctagaaaaaagcgagattgcagactagggtggtgcctgatgcaccacctggacacccatttcggggattaggtgttcgatcctgcattttgatgttggtttgatgcgaacatcccaatatgattgtattgaccaagtctggaaaaagttcttaggatcaagtgaggacattcatctgtttcagatggatatatgttttgtatgtaccagctgattgtggtgcacaaggatcacttgggtacatggtgtcacatgggcacccaatgcttggagcccagtgttagttcacgtggcacaaattatctaagttattcgtgatgctaaagaaatatttttcaatcatggtgagatatctggtgaacagaaccacactcttaaggataaagctcacccgtgcatagcgcaacttaggcactgattacttgggaaccatgtgggtacaacagcttcggtgacttcttaagtatatccacaacactcgtcgtgagttgaaattagattttgtcatcgtcttgaacttttgcatctaggaataacacatttgagcccaagtgtggaccaagtttccactaggacattggtgcctaaagttagggaaacctaggtgcctcctaggggcacaataaattgatgactatgtttgatgcttgtacacttgtattcactaccatttgaaaaaaaaattgttgatttttaaggtgtaagtcaaagttaacaagggaatcaattttgtttaaaatcttttattgaaaccataagggcatggttctcaacatatttacaaacattaaatctattttgtgagtaatagaacctttttatgattgttaagcccaaaaattagcaaggctagttcccaagattagtctaattaagtgtgtaatcaatggagtctcatcaacaataaaatgttcaaatccctcaaaccataagcatcaattctcaagacttaaggctcgatgttcaagcctcggggaccatcttggctccaaaagatagtgatcatcttgacatgccctacaaaagcaccatgtcgacatgaggaagtggtgaccatctcagcaccactcccttggtgataatattaacacacccaagtggagaccatcttggcatgtgtgccatgaagaccatctcgccatgcatgcctcaagaacatcttagcatgcatgcc

SEQ ID NO: 15578 - DNA, 4958 bp, Cannabis sativa
ttaaaaatgttagatattttttttttggaactactttaaatcaaaaaagtaataataataataattaataccaagataacataatttaatatttactgttaatttattaatcaaaatataaaaactttcatgaatttatagtaagaacaaaaataaattatcttttagttttgaatgagaaaattgcataatcagttataagcttttttatttattaaatttataaactattattttaaaaataacaaattatgtttttaattttaaaaatattactttctttaaaaaacacacaaaatattaaattttcaattataacataattactacaaaaaaatcaaaatttaaaaataaaattacaaaagttaaaaacacagcgtaattccatagtataataataaaataaaaagattattcccaagtcaagacaaaccaaagccaacttaaaactccttaccccaaaaaaacaaagagaagaagacgccaacttaaaactgaattttcagggaaattattacgctttcctccaaccaaaaaaaaaagtataattagttttattcaaaatttcttggtagtttatcataatgatcagtctacatagctatttttcacactttacataattgttaccaaaaactaaaatcttagtataaaaacaagaagtcacttggtatgaacagttggcatgtaaaacaatgatttaatataaggcattcttcatggacaaaaatacactgctttatgagacagacaacaaacaactgagcagtcagtcagcaacagtatatcaatatcagtacaatgttacaaattctccaagcctacattgcctagacaaagcttcacaaacttgggatgatattcattcctgcaaaagtagaatgctcaacacagacaagttgacattatcaacttaaagttaatagtaacatgttaatgttttttatacttatcattcgtgacattttcacttcaacgaagcccttcaatactcaccattattgtggtaaaatttcccactccacctttgtcatgtcaagaaattcactatcaccatcttcatacatgatctgaaaaaaaaaaaaaaacattatgtcaagactttatttctttttactctctgttgggttttaagagtgtaagtagatacttttctaaaggaatagctgtccattaacaggagagaacttcattttccagtatcaatatatttgatacccagaaaccgtagatttttaatgtcatcttttaatttgagcaatttgcagcatcttcaatatttcatcactagtagtagtcacagcattaaaaattatgtgtacttttctttcccttatatttgaattttagaaaatgctgacataataatttcagttcaaaggatgtcaccgaaatattgaaatgtttcaaaaaatgccaagataatcttcccacttaacaatgaccgagttaatctcttaccaagtgttttttggaatatgcatcaaaccgttcgataatcccaaatgacctgtggaaagttaaaaaattaaatatataaatatatagaattaagatttaaaaacagcatttcaagatctagcacaataaatattaatttctagaaatttaaaatggaacaccctaagcagatcccaacaacataaaaacatttaaaaaataaaaaactgtgaactgcaaaaagtgtaccacataaaaaacaatgttcaacttaagagaagactcaagtgagtagcaacatctagaaaagaacggaaaaagggtatcaaattacttgaaatcaaactttacgatacaggccaacaaatgctagaaagttgaaagaatcaatgaaacatgttaacattaacaccacctttccatgtagtgtcgaacaaaattataataatatcaccaatgcagtttttttaagttatcccttgctacaacataggcctcctaacaaaatctaaagttatgcttagggtaaaagttgtagacattctgaaaggaaaatacctattagtctccatagggtgactgatcattaccacttgaccaatgcaattgtaagaacaagttccttgcttaagatcagagcgggaacttcctgagatacaaaataaagtgtaacaaagtagttttgttctttcttccttaaatataaaaaacaaataatatataaataactaaaacaaggacagtcatatggcatacctatatgcggctctccattctggcaaaccttttccaaaaatgattacagaattagattccactaagaaaataatgcactaaatatctgatgatgaagaaggcaagctaattgaaatcaaaactcacaagctttctgaaaaattaaggttatatttcaagttccgtgtctactattaaattgaggatagaataccttgattgttgtctgatcattgaattacaaaaagttattaacttgatatcatgcattaaaaaaataaaaataaatcgacctgcacaaatatatcaagccgtccaggctgtagtttttctgacaccataatcattttactgtgctctaaaaacagtttcccaaacgccaattacatatctaaatgtatgccccaccaatacaaatatttctttttcttttttttgggtgaaacaaacatttcattttgtctctcaaaccgagccaccatgattattactcatttcattttttaaatagcgtgaggtgataacacaaccaaaagtattgccgaacaagggttagtcaagtatcgacctgtataattatgagatgcagttttcaccaaatgtttgaagaatttgaaagagaaaggtcattaaaacaaaatacatacatcatttgcagatagaattgcctttaatttgggagaggacacagcaacctgacacactagtttcaatgcagcatccgatgacattttcggtttggttggttttacacccagttttcttctgcactcaacagctccacaatggcaatcttgatctgcaccaaattgcacaaacctacaaattttattagaccgaactacaacgtatatagctcagtttcaaaagatggtatatcaagagcagagtccccaaaagaaatgattgcctacagagtaggaagggaaaaaaaaacaataaaagataacaagtgttcatactgataatcataggttagatgttcgcccttcttgatgtcacgtgtggcaaatatgccaattcttgtttcaccatcaattatccttgaagaaacaaaaatatctaataaggtaataaactaaaatttataaaaattaaatcattggccaagaatcagcaaaggaccatttctgcatctcggtattggggcaacagctatgattaatatatcttgacttgtttcccttgtaagtggcatcaataaccatatctcggttaatctcacataagtaaaaatttgtttctccacggtgtttcatttgccaaagccttgtttcacaagttttatcatcgataactgcgtagaagagtaaatattacttaatgattttaaacataatattaatttaatataataaacaaacaagggctcttagctatcaccttctccaacatattctataacaaactctccttgactaatatcttcaagggccacaattccaaaaccacatttcttagtctgcatgcaacatgcaacatcccggactttaaatcacaacttgaacaatctaatagctcaaactatttaacaaaccatgcctaagaatatacaaaggttagcatgttcaaaaaaatacatagattctcccagcaaaaaaaatagaaaaatacatagatttaggctttaccaaattagaaaccatatgcctacgtatttaatatgaagtgcacggcacaaattaaagtttcaccaaactagcaatgatatggtaatcagtcaaccacacaaacatcagtacttcctatttagcttgtatttatgagaattagatagtttgctataaaatggtgttggctaatcatggtttatatctttaattgttgattttttttattattttaactactcgtcatcctgttgaaccctacaatctttgggaggtagaaagatctcaacctaaatctcatgggggctattcagtcagactaacactatgtttggtagagtgaaagggagaatagagaatgaagagttgatgaaaggagagtaggaggctgggagatgagagtactgattcctttgattgtttagcaagagggatggagatgtataatgataaattactacttatttatgactatattttccttttaattatattttcaagagggtatacttacaattttatacaaattaatgtagatagtataaacccttctattaatgggttcaaaatggttgattaaagaggatttccaatccttctgcctcttctcatcctcccaccattgctctacctcctctccatacactcattctccatcctaccaagcgtcacctaaatgcttcatactataggtttttaaacctgtacaaagtagctttgataaggttgagcttacagctggcctcaccaaatcaaaaacgcttagtacacaaattagcattttaaaccttggtgaaatctaaacaggaatttaattttataatccaactaaaactaaaaaggatagtagcacactaataaaagtactagagaatacaagagaagaaatcaccatgtaaagaaatgaaataaagacaaactaaaacaaaaacatcaaaaaccttaagaaaaaagaattaaccacaaaattattatattcaaaataaattggttttaaataaagcaattttctaggtaattctaatagtctgtgaatattcacatacgtcactaccactacttctgagctataataaagttctacaaaacacatcatcgtttattaggaaaacaactgccaaaagagaaaaaagaacagtgacagaaaagtgagaagaatgcccaattactcta

SEQ ID NO: 15579 - DNA, 3881 bp, Cannabis sativa
aaaaatcaaattaataccacaccaccacacctttctcacccactctcctatctccgttgactgtgttgattgtctactctgccacggttcatttcctctgactccgatcatctactctggcttaaaatggcttccggccaatcatctcctctggccgagcatcggaagactataacatctggtaacattctttcttatttcaacatctgttgtttaccgttgttagtttggatttatcaaatgttaaaatcattgaaattagtggttccttttaggaatagctaccatctgcttgataaaattcttcactgagctctaattctgctatgaagattatcttgataaaacaagcaaatattcctttcctccattgcatttacttttctagttcagaaacgcagtacagtaaatgagtgaaaacaaatagtaatgttatttaaactctttcgcacgcttctgatgttgaggaaatgcagcagagaacatactgcattattcatcaaattgatctgagattattaaccaacccttttatcatgtcatgcttctttcccgtctcatcgtatctctggcttcgagaagcagggaaaatgtgtagtttccactatttattgtgccttttgctttgttaggccacataatcacaacaacaacaatggtggagggaaagactaaccaatactgtttttttgataccactctttctttaaccctaagctagggttttgagacaaacccatttgaattcaaaactactcaatagttttgagtgttttttttttctttgacaaataatttcttagagttggacaagtttcataagagatgaatcattttcagccaaaaatggagatcaacaggtgatcagtactattttcagggaaattctgcggtgggtatactttatacttcaccaggggaacacaattttgactacttatttagttatttcttctcagattttatgagcagatcctttcctttttagaactcaaacactataaatgtcaattcaaactgcctgcgcagatgccataaccgttctcttcctaatgaccattccttccatggaaactctctaagaattaatatattctcccatttcgaatctcacgttttgctcctcaacagtctaacatagcttatttaacacttccattttcgtaacatctctagtttctacttatcaatgatcatattgcagagtctccagccaagatccttcgacgaattctgagttcaccaggacttcaccaaacccctgcttgttttgatgctctcagttccaagttggtggagagagcaggctttaatgtcggttttactagtggtatgtgctgttacttttacttctttcatatgatttattcaagttctcttatgatgtttgttccttttcctttttgggtgcttgttgcagggttctcaatatcatctgctagactgggaatgccagatacgggacttatatcttatggagaaatagtggaacaggggagacttattaccgatgctgtgtcgattcctgtaattggggatgctgatactggttatggcaatgccatgaacgtgaaaagaactgtgaagggatatattaaagctggttttgctgggattatgattgaagatcaggttaaaatgattctactatgtatataaatttttagattgtactatatattgagagttctttgaccttagtcttggctaagcatcttacttaaccttggtttggtttatgcttgggattgattcttttaaaatagggtgatttgatttgttagtcatctcattgtccaatctttacacttgttatccatgtttttttttggtttccatcttacttgagaaatatctgttgaaaggtactaccaaaagcttgtggtcatactcgaggcagaaaagtggtatcgagagaggaagcagtgatgcggataagagcagctgttgatgctcgggaggagagtgggtctgacattgttattgtggcaaggactgattctcgtcaagcagtgtcttttgaagaatcgctctggagaacaagggcctttgctgaggtcggagcagatgttcttttcatagatgcactagcttcaaaaggagaaatgaaggctttttgtgaaactgctccccaaattcctaaactggtagaattaattttgttttgttagatgtcaagtcatgggcaaccatatttttgttgaaagaaacatataacttccatgatgtgtttttttttttctggctaattgcaatgcacatgaaagagtcaaatttagatttggattttgcttattgaaagagctccttgattctgctaggccaatatgctggaaggagggggcaagacaccaatacttactccatctgagcttgaggatattggatataagcttgtggtctatccactttctttactcggggtttctatcaaagcaatgcaggttctgtatctaaaccttgttggttctctaacatttttttcttttagaaccaaagaaaagcacaaacaatacaaaattgttctttaccatcatttactgatgcaactcgttcgaattttcttaaaatatttattcaatgtatgtaaaaccttgaattcactggttccttctggtatgaaagtccaaatattttcttgaattgatttgttctctgattgccacaatccaggatgctctcatcggcatcaaaagtggccacattccacctgttggaaccatgccatctttcgaagagataaaagagatcgtcggtttcaacaagtattatgacgaagagaatcgttatgctactaaggactaacaacccgctaccttcacaaagtggtgagtgagagacttcatagagtttggccttggttggcatagcttcccaaagcacttttctttgttgtttattataaaagctgttttgataactgtttgaatataacaattcgaagtgcttaacactgtcatctgttaagagtactttttagagaagtcaatgcgtggtaaataagtgcttgtacaaaaatcacaagcccagacaaataagcctttcagctaaactggttatggaattgtcttaaaattggcattggctttgcataattgcattgatggacatttccaccttatctgtattatcattctatcatgatacaacttaactaagttaacttcatggttggatcaagaaagtggctaactagctatttgttgggttacctaactgattggaatatttttcttctagaaaacaaagtaacatcgatctttcagaaggaacagtgtctatctttctttgtttcaataatgcgactatatgtaataaaggaacagtggctagcttgttccatattgtcacaaatgttgaacaagatttgtttggacttttttcttttattaatgaaaagatttgtttaagttgagaatagttttgttgctctcaataacgagctggtccattgcgcaactgtaaaatgagtgaaacttccggttccacatctttgcatactcttaacacgcagatgagatgttttcttatttctatgaggggattactctaactcagatgagatttttctttagaaaggttgattataagaaatatatatcatgtttgttagaaattgtatcctagaaagatttgtattcgaaaatattttatgaaagagtgattatatatgcacgtatatatacataagtgtcacacacaattatgtaagtgggacccattttaaaaatagatgattggctgaaatgttttgtgtaatttgtgtgtaattgtagctacaaagaaatagtgaagatgagtacaaaggttacaattacaacaagagcaagctctccaaactaactccctattaagttgaaatgcatcttgagtattattat

SEQ ID NO: 15580 - DNA, 12532 bp, Cannabis sativa
  modified_base (5764)..(5777): a, c, t, g, unknown or other
tgaattaatatatgtatatatcaatatgtgaaaaatttaatgtatatatttgagtgagggctttagcctacacataggctaaagtccctccgtccctggatgcaggtattatctgtataggtgacaacgagtcacaaggtgaaattttgacgataaaggcacaaagaggaccacttgacaatgacaggtggcatgcatcgtcgatcgggcacagtacccgttagagaagaaggtgttggacaaaacgcatgtcccttttggtgcggtgtgcatttcccaagcctaacataggggacaagccgctgatttcgtgggatctagtgtcataaagatcctacatagaatgatatccgaatgtcttcaaatgcctctttagtttccctttctggattactccatgagggtatctagatatactttgttgggcctgtaatcttctgggcaagtcgctcttctaggaccaataaggcctaattttattgtatttgtaaattggacttgtgtctaaatccaaagccatgacctaactctgttgtgtctgaatccaaagccatgacctaactttgttgcattttaaattatttcgtattaaattcaataattattttaattttacttttataatattttaaaattatgtttatttattttaattttttatcttaatatttaaaatatatgtaattttattttatagggataaataaattaaagataatttttcatataaaatcaatatatcattaaataataaaatagagttggacaatctcataacaattaaactaagtataaaaataaacattattattaaatgaggtgactttatgataaaactggcccaatatgaaacagaactccgtaggcaaattttcccgctcctcataaacattttgagtgaatttgaaatcagtaacgaaaaacaacctgaaaaccgctagaagagaacctctctctctctctctcatggctccccccttcgtcttccccagagttcttggagatttggaagaagagaatgaagataaccgcctctgcgctcagaatcccatcgacataactacttttcgttcatccgaactcgaagagttcgtcaaaggtcggacttttcttatctctttttcatttgcaaaattctgtagcatttttatgacaattacctctttcgttacctagaaaatgcagctaggttaggaaagtaccgaaaataggacaaatgtttgctttcttcactttaaagtgtcctagtgttggatgatgagacgtaggagaaccctaattttcttatgtttgtcagtgaaattttgaaaagaaacgagatttaagcttggtaatgggtagtatatgctataattgcaactagtttaggtgggagattgaacttagtgcactttcccagtgttctttgatttcagttaaggaatgtgtttcatatttagctggtttttttttttttttttgcaaattgcatgtttcaagccttgaaaacttataatttgtattgtgactcaatttctttaccagatgattatactactcaagattgtaatataccattttttttttcaggtgtttcgtttgacctatcagataaggagctcttttgtattgaagagcaagatgtgtttgatagtgtctactcattgatcaagggttactcaggtctcgccccatcttgtaaattcaaccttgtagagagtcttcgatccaatctcagtgttcttctccctaatgttgattcaatctcacggctttcgcaagatcaagatggtgattctccaattcttgatcgagttgtgtcacatcgtaatgcttttaaaatctacacgtttttcctgttcagtgtgattgctgctgaggagtcaaagagtagctctaataataattcaaaggtattggttctataagtcatcaagcattctatctatctaataataattcaaaggtataagctctgtacacacacgtatatattttgcatacatgggcagccctttcaagtcttcaatgaccattattttactattaattttatgtttggccatgcactcaggtcattgctaattccagaaagaaacttcttgtaaactcttggaattgggaattacaaaggggtcgcatactcaacttgattgcaaattcgttagagatcaacctttcgttgctctttggttcaccaaatctcgatgaaagctatgtttctttcattgcaaagtaagttgacgaattagttgtatgattatgaacccattttcttggtgtttaattcaagctgaaattatttttgccttcttttaggaatgctttttctctctttgagaatgctgcaatattgaaagacactgaatcaaaagacgctctctgtcgtataattggggcctgtgctactaaatatcaatacttggcacagtcatgtgcttcaatcatgcacctagtacacaaatacgattttgttgttactcatattgttgatgcagttgccaatgctgagaagaagtatgctgatgggagcttgggcagttctctcattagagatataggcagggctaatccgaaagattacgtgaaagacacagttggtgctgaaaatgttggccgtcttatggtggaacttgcagatcgaatgccaaagttgctctctaccaacattggagtcctggtcccgcattttggaggagaatcttacaagataagaaatgctcttgttggggtcttggggaagctggttgctaaggcatataatgatgttgagggtgaattgaatactaaatctgttcgtctccgaaccaaacaagctatgctggagatattacttgagcggtgccgagatgtttcagcatatactaggagtcgggttcttcaagtttggggtgagctctgcgaagaacattctgtttcaattggcttgtggaatgaggttgctgaagttgctgccggaaggttggaggataagagtgcaatagtcagaaagtcagcactaaatttacttatcatgatgttgcagcacaacccatttggtccgcaacttcgaatagcatcctttgaagctactttagaacagtacaggaagaagttgaaagaacttgaaccagaaatttcttcggagagtgttccggatgtgtttccatctgaaagtgaaaactgcaatgaagatggtgaggttgatgatggtgctgacagagggacccaggagcagaaggatagcttaactgatagttgcttgcccaatacagaagaaaatattattcagaaggataccactgtgccagatgttgggaacgtggaacaaaccagggccttagttgcatcccttgagtctggtttgaggttttccaagtgtatagctgccacgatgccaacccttgtccaattgatggcatcatcttctgctactgacgtggagaacacaattctcttattaatgagatgcagacaatttcaaattgatggttcagaagcttgtctacgaaagatgttgcctttggtaagtactaagtggtaaatattttcctccgatttatattagaaacgaatacaattttattgttccaattcttcattttaatataatataatattttctggtttttggtacaaaacttgagaagatttaaggcttttattttttttttcaattttagttttgtttgtcgtggtaggttttttcccaggacaaatccatctacgaagctgtggagaatgcctttataacaatttatattagaaaaaatcccgtggatactgctaagagtctcttgaaccttgcaatcgaatcaaatattggagatctagcagctctggaatctatagttggtttgttggtatccaaaggtgacataactactgctgcggtatgtcacttgtttcatttcttgactagcattttgcattatttagttgaattgtttgagttgaactgccttttaaatgtacttgcatagtaaccaaaagcttgagaaatttttatcttatcaatttctttcaagaatagttatgaatttatgatagcttaaaacttacgttacaaagtatagtttgttttaacgttccaaaaattattattatctgaagcaaacaagaaattgattacgaaatatttatgttgatgcgagtgaaatgaatgatgcagtacaaacaaatacttcagaaataggaatgtaaaatattgggatgatttctgggagtagaaatttactttcaagtatatagactttattgagagccagctagaatcaggctgtgaaacatgttattctgttcagtttgtatactcacttgctcttaaagaaaagcattatatatttgagaaagtcatatgtacttcatgcccaataaactctcaatgaatgctcataactaagggattgtattttttttttgggcagatgtcagctttatgggatttcttttgttttaatgttagtggaaccactgcagaacaaagtcgtggtgcattatctgtcatttgcatggctgcaaagtcatatcctgaggttctcagctctcatttacaagacattattgatattgggtttggtcgttgggctaaagtggatcctttgcttgctagaactgcttgcattgctcttcagagattatcgcaagaggacaagaagttgttgctgtctagtaatgggaccagagtatttactactttacaaagcttaattactgggttttcgctaccagaaaacatatggtattctgctgctgacagagcaattgctacaatatatacaattcatccaaccccagaaactttgtctgcagagttggtgaaaaaatctctcaattctgtgtttgaatgtgatggtggtgaagatttgcagaatgagatagatggtggcaatgttactgtgcttaccacaattcaagcagcaaagcttagtcgatacctatttattgtaagtcatgttgctatgaaccaactggtatatattgaatcttgtattcggaaggtccagaaacagaaagcaggaaaagagaaggaacctgaaaatcagtcagagcaagtcaatggcacaactcctggtgatgcttcaaaggtgacatggaatcttttatctctcatcatcaaggaaccttgattcatttatactttttcattactgtgttattgctgtatctggaaccatttgtcaactttctcttgttatataagactttttatctttttaatgtttggtattcaggaaaatggaattagtgcagagcttggccttgcggcctctgaagatgcagtacttgatacactatctgaaagagcggaaaaagaaattgtttctggtagttttgatgagaagaatctaattggatgctgtgctcctttcctgacaaagatttgcagaaattttagtttgatgcaaaaggtgattgcataagtttcatttattctgagatttgtaaatgtaatgtctattttggtttcataaaacattttacttcagatattgattttgcaatcaaatgcatttggttttcgaaaaaggaaaattcagtagagcagttatgagactagaatatttcaaaaaaatttaagattgaatggcaagtatgtaattctttactatgaaattatcatgttagtagttgctaaagttacaaaggaattttttattagcactgtaagatttcaaaaatagactgatttgtcttcttttcagtatccagtactacaagcgtcaggaatgcttgctctctgtcgatttatgataattgatgcaaccttttggtgagattctatgatctctctctctctctctcnnnnnnnnnnnnnntctctctctctctctctctagacacacacataattgcgctgcttctctatctatctatctatcaatgtaacatggtatgaatcaatattaactttttttttctgtccttttgcagtgaggcaaatctccagcttctcttcacagttgtggagagtgctccttctgaaactgttcgttctaactgtactattgctcttggagacttggctgttcgctttcctaatatcttggaaccatggacagaaaatatgtattctaggttacaagactcttcagtttctgttaggaagaatgctgttttggtgctatctcatctcatactaaatgacatgatgaaggtctgagagtctaaatctgaatattgtcacttcttcaacctgtttttattaaaatggattgtggtctgattaaatgattatgattattgctcaatcaggtgaaaggttacatcaatgaaatggctataagattggaagatgatgatgagaggatttcaaatctggctagactgttttttctggagttatcaaagaaaggtgttgccttaaccccagtagtagtaccataattcttatgctgttattttcctatgtttcaccatagaatttctcatttgattgctgatcgttttcctaatttacagggaacaatccagtttataatttacttccagatatgctcggcaagttatctaaccagaacttaaagcgagagtctttctgcaatattatgcagttcttaattggttccatcaagaaggtatgaactgcttagctggttttatcaataacaacataaaattgctgtttagtacttagtttacgatatttgtgttaacattttccaggacaagcaaatggaagctcttgttgagaagctttgtaataggtttagtggagttacaggtattgctgtgaatcttgtggtcaatattgttaccaatgaagttgcctaactggagccatattcttttactatagaaattaaaataatgtaatagaagctaaggtggagcactcttctttgcagatattaaacaatgggaatacatttcttactgcctttctcagctttcattcactgaaaagggagtgaaaaaactcatggacttattcaaaacatacgaacatgttctgtcggaggactctgtggtcgaccattttaaggctataataagcaaggtattgaattattatttatataactaatagtttcctattaatttttaattttttttacttaaatcgtgtaacagagcaagaagtttgcgaagccagaactgaaatcatgcattgaggagtttgaggataaacttaacaagttccatatggaaaagaaggagcaggaactgacagcacgaaatgccctaattcatcaacaaaagattgatcgcatggaagaaatttcaatgactaataattctgaaggagctgaatctaataccgctgaaggttggggcaatgaacttgttttaatatgctttattcgtgttgcatggtcgttccactctagattcaactgggttttccatttagaaacttttcgcgatatcacataaaaatcaggccacattagaaaaaaaataatataagttaggttagagatatgttggtgcgctgcaatgtgctcttaatagatgcatgtatcaatcaagtattggttaagcatttcatctaatgatttttccagaacactcttaatgtcgttcaaaaataattttcaaacattgttatgcaaacaacaaaatgcaaagtttcttattcttagcatgcagatggatatttattgcctttatgatataatattgagtgcatgactacgtaagtaagaatgtgtatattttctttttcttgctgtgcatgccatttttatttgttattttttgaataattatatcccttattgccatatgtatgtgactgaagctcttgataccattatactgcatagcacattagcacgggcctgaaaactctgactctgacttggatgtgtgaaaactcttaaaaactctggctgtcttgagtttgttacgtatgatttatttattctaatgctcttattctgtttgttgttttccttttgaaattcatacagaaagcgaagtcattgatccttcatgcgacgaagtgagtcagtccataaatgtggagtcaaattctggacatgttgaatcagatgaagaatcaggtacttgtagcaaattaaagaagtcagaaccaagtgaaatcgaagttcaatcaccaaaagttaatacaagaggtaaataagcaacacatacttctgtttttagatgcaaataaatgaaactttgtgctttatgtaatgctgttagcctttgcagtgtcaagggctaagaaaagcaacttaaaagctttgaagggtaatactactaccacaacgactagaagaactaggtcgtcaaataagaggtaactgtctatcttttgtaactgtgcacttgacatggtattgtttttacttttacaattttttttttctttcaatttcacggtgtcttataaaaataacatgaaaaaaaataacccacatgaaaataatattaaaacaacataaaattaacacactattatcaaaaaaccaacaacaaaataataagaaaatatcaatagttcgtatttattttaaataaaaacttgtaaacctagaaatgtttgaaattccggacaactttatttttataattttttttgacattttttttaagtatttatgaaaatattctcttttttgttattatttctggaagaagtaaagatcttctagttttttctttgagattgtgttttctaaaaaagtttactcatgaaagacatttctttttattgatcatccgaaaacttaaaaaagaaaatttactctcagactgagtcatgtttctggaccagtttttagttctatatatagtcatgcttctcttttatcttatgtgtataatgtcaaacatttcatttatttagatatttttggtggtgtatgcaggtagtaaagaaggaaattaccaaataaacaattgtttgttactctttcttccaagcaaccccaggtaggtattttgtattgtattttaagtacttgtctggctaaccaatacttcattgaaaactttaccctgtaaatttagtctcatttataattagttcataaaaaaacatgaaacgggggacattttaccccaaaaaaaaattatccagtgagcttaaagctctatgaaaatgtatcatgtgatttgaacaactccttttatttgtgttgttgattcatctacatctatcaaacaactttgcattatacagtgcttaatttatttgatttctttattttatggattatttattattctaatttgagaggggaaatgcccctcttaaaacaaattggtattatgtaattatagtatgagacattttgctcaaacattaattagctagatttgtattattaattgattaataattatattcaaaatgaacaaaccacactatttgaaggataattaaaaaagtttgttgtaccccaaattatttgggatcctactatttatatctcagaaattggctatgtattaacacttaaatatagacattttaacaaattcatactattattaaacaaagaaaccatgtgtatttataaatatacacacaaaactagcaattaataaaaagtatttctataacatatttgattaggaagaagaagaagaaaaataattatgggtgagagaattatgatgaaattagtaatccaaatattactaagtacatcaataatgatgatgatgatatgtgttaatgaagcaatttatccagtaaatccattaagtaactttggaagtgaaaggacttacgttcgaataactaattttgttggattaaacaatgatgtgaagattgagtgtcgtgataacaaaagtcgtgggcaagttaatgttcctccattcagaacctacgagttcaattttaaaaccaaggttgaagcttttggaggtacgattttcagatgccacttccaatggatgaatggtactaaacaagttgattattatgactatgagatttacaatcaacataaaactgataatcgtctaaattgttgggtcctcaaggttgaaggcccttgttactgcgattgtaaagatgagaaatgtgattacagcaaatgtcgcaaatggcccaacaaaaattgattctatctactacgatctctattgtaattttatgacttgtattaatatctattttttaaataaaatatataattattttgaacattttatcattctctctactaattctattatatatattttagagtgaatacatctaaaaaacttttttagagtcaaagaacatttgttggcttgtatgcaatgaagaaatggttcgattacttcgttaggaagtctggtaatattgtttggtacgttacatgtaaggatacagattgtgggtagagattaagaacgaagatgaacgtactttctaacatgtttgaggtgattacatttcaaaatgtacatatatgttcccttttttcgagaaaaagataaccgtcaaacatcacatttgatagttgctcacctaattaaccataaattcgcaactgacggctcggatcatttgacctctaatataaggaaagatatgcacaaggatttcgggatccaaatgagttatgaaaaggcttaaaggtgcagagagaaggcactacacctagttcggggtacacttgaagattcatactcgaaattacctatttaattgcacatgccaaagttgagaaattcaagtaccatcacgaattttgtggtagaggatggtcgcttcaagtattatttcttcttgctaggtccttgtaggtgtaggtttagattttactgacctgttgtatgtgttgatgggtctttcttgaagactaggtatggtgggcaaatattgtgtacagtggcactggatgcaggcaaccatattttcctgatagcttttgctgtagttgatagcgaaaaccacaacttttggatttattttatgagaaaattgaaagaaacgattggtgatgttgagaatttagcaattatgttagataggcatcaaagcattattcatgctttggagattgtgttctttgatgcacaccacgatgcatactaccaccacattactatgaatgtcaaccacaagtttaagactcatgtcttcacgaatcatatttatacatatccctacacgtattcaaaaatagagtttcatagagaatttgagaagattcgggcaatgaatgttgtggttgcataatatcttgaggaaattggatttgagaaatgagttcggtcgtacttctaagggttaagatatgccactagatatatggttgagcttccatatcttaaaacaaattggtattatgtagtgttgtaaatgtgggttgagttttttgatacgacacgaaactgacatgagcacgactagacacgaaaaaatatagacttgggcacgacacgacacgaaaaatatgtctttaagcacggtacggtacgaaaagcacgaaatgcacgacacgtaagcacaaatagattagcccgaaaaatacagcacgacgtattaaaagacgtttaatttattattaataataatacatgaatttattaaaagttaaaataataataaaacttaaatataatactaaatattataattctataattaaaattaaaacataaaaaactaagattatatattaatttatttatagggtgtgatataaaaatttaagtatttataagtaaatattcaaattctaatgatgttaataatttttttatatgattatcgataaattattgttaaaaactaaagttttgaaatatacatataatttaataattgtaaaaaaatgaaaatgtaaagcatgaatttaaacccgaatatgaagacgggctgacttgtttaagaaatacgggccgacacgagtaaagtacgacatgaaaataccggtcctgcaggctgtgtcaagcttgcccttttaaaatgttagtacgacatgtcacgacctatttttttctgtgacatggcacgacacgacttattttttgaaaagcacgaataaatacggactaaaccaacacaacacgtataaacttacaacattaatattatgtaattaactatttcctttttaaaggtattgtgttccatatattttttcgtatgagacatttttctctaacattaattagctaggtttgtatcattaactaatgttgccccttattttgtccaaaatacgtggaccaaccggatcatgacacgtggactgaagaagcgagactttgagataatttgactaagtcttgttaatcaaaaggatcagcattcaacatgcctcccggagtgggcatgtaagtttcatctactcccggagagcaagactacaaatgaggcatctccgggggtatcaaatcctatctgaacagtcacctcgcatttaatgccgcatgggagaaggcgtattgaaactgccataactattaaagtctgacgacataaccccccttctgcagctactacgctatgattaatgagcctagtgacggctactttatgagaaatcacatcaatcaagaaagaatgatgaattacatccattaaacccctaaaaagcctagggattagaccgcacatttcctatgatgtatccattgggaatgtgtgcctttactgaatattacagaa

SEQ ID NO: 15581 - DNA, 10702 bp, Cannabis sativa
gggagcaacgaagcatgatgaacagcaaaagaagagcggatactatcaatactcttaatcacatcaaccaaatatttattatgtaccttttcattcttggcccgtcagatagtttcaacagttaatgaagcataaaagaacacctcattagaattgatgcctgtgttcatctcaaaatcaattgttagctcattcttcttttgtattttagtatctttgcacactctctataatttttttttctttttctttgctcatgacctaacttaggtaaatcaaacaattaaaacttagtctactaattaaagtagtggctagctgccatcaagagggaaagccacctatcctcaaaactaagatgcccattttaccctcacttaaatgcttaatttataaaatagtttaaggataaaataggtcaacaccataattccgcctaatcttgatattccaaaaatcaacatatagattccctgctaaataaaagggttctaagctagctcatgtgactaaattggccatctgtcgcatattttatcgtcaccgaaaaaaaatcataagaatcgtaaatcttgcatatgacataaataacacactcagaatttaataaaatctctaaaattagaaaattataaccctactgcccatttttgaaaataggaccacaataaatataaaatcatatataattatatgatgtcaataattaatgctaattgcctttactaatccataatctaatcatgcgtttattataattatcccccgttgaaaggatttcgacctcgaaatctaacctgaataactctggatattaagttctcatgtcggactctaactcccaggtagcttcctccaccttgctattcctccagagtaccttgaccaacacgatggtcttatttcgaataactttttcctttctatcgaggatttgaactggttgtttctcataaaacatatctgattgtagttctaaggtttcgtaactcaagacataagtcgagtctgacatatatttcctcaacattgaaatatgtataatacattatgtacaactaataatgatggtggtaaggctagccgataagctacctgcccgaccttctcgagtatctcgaatggccctatgaacttagggctcaactttcccttcttccaaagcgtcttatacttttcattggtgaaacctgcaagaaaatatagttttctacctaaaattcaatatctctacacttaggatgacaaaaatatatttttttgttgttgtttatatcaaaatttcatttctcatttccctcttattcttatatttttattacttaattccaagttccaaccaaatggacgagcaataacattttttttttggaaggaataatcattccaaccaaatggaccagcaataacaaagagcgagttattaatattaatattattttactttatggacattttattgttatctgaatgaacaaacgtttgaagacacgaatatcaaaatcccttaaaatggtgttctttgtgatatcttatctaaaaagcccaaatgaagtgtgtgaaatgtacaccaactttttgctaatttttactaagcaagtaaaacagttgagttttttcttgtcagactgtacaccattgtacagatcacaacaactcctacagatacaaatctacctcaagttcaagttgaaaagttctacttgaacttcaacaacaaagagtctcaaaatgtcagttgttcaacatccagctcagtgattagccttcatcaacggacgaattggttaaatcgggtgataataagaagcgagtgttggttgaaaggaaagacttctcatccatttcgggaccaggaccaggaccaggaccgggacggggaccatctgctccactgctttgctccatatttaccttttcgatcagacatttaagtgattccacaacttcagacattggtggtctgaattccttcacaggctgttcaagtttaagtcaagctcattatgttttgttcataaacaacttacagccaataaaaagaaatcatatactcaagccttcatcaggtgcatacctgtatgcatagggagactacatcagcaaatcgagatagaattctgaaagaaaatgttcttttaatgcctggatcaaccatctgttccaaactctcactgtcatgaagccgtgacgaagcccatttcaccagacattgctcttccctttgtcttgaactgaataaaaaatgattgataatcaaagtcataaaatcaaggttgttgataactaaacagaatagagcagaaatgtacttgtcaaaaggtttcctccctgttaatagctccaaaagcaacactccaaaggcataaatgtcactttttctgctatcaacacctggttgaccatgttctggtgcaacatagccagtgtcaccaatagcaatttccgaagcctgtttatgtcagcaaaacagcaataatttatttgtgttcctttattttctttctaactaaccagcctcattccaaatactacttcatattttaggctactacatcagtgttgcttataccaaactagctataaatgaactcgaataaatcccaaataaataatatatgtaaaagaaattagtttgcatagtaaagttgacaaatgacaacaagtttcaactttcaattatatcaactaaaattcacagccaaaaaagaaaattatatcaactaacaaagcatgcaccttgattttgactctgttacttgtaagtggcctcaaaattgctagcccacagtcgcagacatgaggcataagttcttcatcaagtaagatgttagctgattttaggttgctgtgagcaagaggaggcgagacagtggagtgaagatagctgaaaaataatttgaataatagttacatgcagaacttgaaaaaaaaaaaggcttctccataaaagctttgtttaaccatattttcctggattaaaagagcatgacaactagcaaagtatctcccaagaaagaaagaaatatataaacaaaactactaacatgcagaacttgaaaataaaattttatccaagagatataaacctattgctagatcatacttactccaaagcctgagcaacgcctatcgctatctggagcctgaggccccaagacagagacttgtaaccactgtagtgcagggcctcatcaaggggcacacttctgatatagttgtatatgagcagatgttgcccgtgctctgcacaataacctataagtggtacaatattcggatgcttcaatcttgaaacagtccaaactacatccaaaaactgttcttcttctttgaaagtcagtgttaccatgttgatgttcttcactgccataacctggatagcaataattcttgttagataccaaaaaacaaacaaaatgtaagaagatactaagaagcctacaatgtttcggttttatacttggccatctggaaactctgctttgtacactgagcctagtgatccctccccaagaagattagtttcactaaagctatttgtagctgattgaaggtcggcaatagtgaagagttttgctctcatagggaatccatgtttcctcgtgacactttttcttttagatgtcttttgagttctgctattgtaaattggaggcatcctccttggaccaaggatcggtgacctaaaagtcaacatctgtgggctttcttcaacttcagcaggagaactgtctacaagtttacaaccatgaaaaataaaagtgaaaattgagattgaaaaataaaaagaaaaagaaaaaatgacaatggcttcactaaatgtttcatacaaggttagaagacctgtttataactaagaaaatagaaagtgaaaatgataaaatcgaagaagagggggaaaaaaacttatgccatcattctttagtgtttcatacaaactcagaacactactaattgatacagataatagactaaaaccagaaggtataaaaatcagcttaacagcattcgaaatatttctaaccactaaatactgaaaacattgtattgcatgatgcaaaacaagtaaagattcttgcacaggattgagttgttcattcttatgatatgatacatcacccagaaaatcactactcggtcttaagataagaatatacatcagatcttaaggaaaaacttgtaagaatttcaatcgtgcttaatgagagattatatttttatctaaacaccaaatttgaaataaaagttgtgttcacctcttactgcagtgactggaagcgaatgtgttgtattgttgttcaaacctgagcgttgaagccttcttgcacggtattggttgatccgaatggacatgtagattacaatacacgatgctaccagagtccctccaccaactataaaagctattcctccaggacccatacttttcttttttgttataaatgtttcaacaataggatagctctcaattgcgctcgactcagttgttgggggcctactgatattttgttcaatgggcactgtttccaatgggaaatgccaaggtggagaatcacctgaatggaaattattgccgcccatcctataaacagtaaatgaagaaaaataatcttgaatgctagttacttaagatatgaatgtttgattcatttaggaagagaataatagcaagaagagatttatagcttaccataaatttggtattgtagaaaaatgatcaggaatgatgccactgaaataattatttccgatattactgcaagagataggtcttagcagggaactaaagaaacatatctactgcaattgaaaatgaagtcgtggagcaaaacttacaggtcaagtagtggaagtccagataggtatgtgaccgatccagtgaacttgttattctgcaaatatctgcacatatacattcacataataatctcagaatatacaaccaaaaaagactctccaagcacttaaggaaacaactcacagtccagtaagatttttcagcgatccaaatgaactcggtaaatctccagtgaaattattaaatgacaagtccctgtaccataaaattattgtttgacatatcagtcagattaaataggtctgttacaaaattatgccattcaatcagcaaaaagtgcattagttgataaaacaccatttcactgaaattaatacagctcaaatcattagcagtagatagtcctttgtttgggaatgattctaaagtttcaatataataatgttcttattttacaataccaacttaagcaatttagtaaattggttcacttttttatcccaatcttccaatttctttctcttcaaagttgaaataaattttttaaaacaagtacaagtaacaagacaagaacatacatctctctaagattactcaagcctgtgaaaacattacccacaggtccagataagaaattatggctgaggttcctgcatcagaaaaataataaattataactgaattaaaatataatagttagcaaaactgttttctcgtagacaaagaactcacaaatgccggagatatttcaagtttgatagagagttgggaatgttataggtcaaattgttgcgtgccaaatttctaaataatcaagaaaatggaaattgagttagttgcacttgcaatagtaaaatgtaaattaataagagcttatagaaatggaacaaattaaaacaagaatcatgtttacatatgagtggcattgggaggtaattcatctggaattggaccccaaatcttgttgaagcttatgtccctaaaaaaagaggaaaaattaaacatctgttgattgagcttctacataaattgactaaataacaaataaacaatataaaagtcatttacatttgcttcaagttacaaagactagaaagctggtgtccaagaaaacctgtaaggtttaatccacgaagtttactgcaaaagaaatgtaatccattaatattttttaactattacatgaggttagctaataacaccaaaacaaagttacaatagttacagatatataatagatgactcataacatgagactcctgcccatgattcatcacatggatctccaccctccgttctccatcccctcagctctgatggaaggttgagattccagtaaagatcttgaagagctgtgactgcatggaaaaataaagaaattttgcctacttttaagcagtgataaaagagagtagctcaaaaagaaaccttaaagaagaaacaggcaaccgttttttaaaacgaacattagaaagaacaataatcttaacacgatactgattagaaagcaatcataattagaaaaacgacatgaaacatcttataagctcaagagacccactaatcctaaatacaacaattcatatgaaacatctaatatttgaattgaaccccttttccctccactaccgaaagatacagaagcatattttaattctacacaaagagaaatcagcgtcactttttgtttgttttcccagaaaagcagggaaacaaaacgaaaatcaaatccgaaaatcattttcttacatgattttatttctccaaatcaaaatatatctaaagaacaaagaaaaaaagagtaaaagagtaaaagaaacaagaaacaataaaaaaatcgatcagagattaccttcggagggattggtaaatgccaaagtttgtgaagccataattgccgagaagacaattacagtcgaccacatggatgcactctgctttctcattttcttactgatcaaacaagtcaattacgcactaaactactccctgagatttctggaaatacaaagattagagaaagactacatgaattcagcattttctttctccctcatgcattttcttgggaaccaaactagtcggagaaaaaatagagaccaaaatgttatcttgaatagaataagtaatgagaaaacaaatctttgacaaagtgcaatttgtaaattggtagggaaagagaggaagtactgaggttatttttacagaggccgaaacaatagaggaagaagaagaagaagtagtagtagcaattctcactgacctggactccacgtcatcaaaaaccgttagtcgttataggattccaagtaatcctctgctctcgtccacacggtacttacattttggcttctttccctgaaagcataagtgggccttggaccactgatagtgggctttcgacttggttagtggcccaaattatgggccattttaattagtttctcattttcttctctctctctgttctgaagctcttgggctatggcggaaggagaagaaaacgatgattacatgggggacctctctcagtttcttcctcaagaaacatcaatccttccaaaaccttcttcatccaaggtaaaaccattgacttttttgatggtttctcatacattttcctttaagtttgtcagtatccaaacagtgaaatgatttctttatgaacctttatcaggtttcccattccgaacccctagtcgttcaatcctcaaagaagaaggccaaaacccaaaattggcaggagcacagaaagctcgaaagagagaggaagcagataaaagaagacgaggaaatcctggcgagaatagaggacccgattccacaatccaatatagggttcaaattgttgaagcaaatggggtacactcccggttcagccctagggaaagagggtacgggtcgggctgaaccggtggggctggagattcggcggtcacgagccgggatcgggcgggttgacccgagggaggagaagaggaagagagaggagaggaaggcagagaaggagatgaggaatgaagctgcattaatggaggaatttgggtgtaggaagaagtctcagtggaggattagaagagtgtttgttaattttaacaaggcaaaaggagctttggatcaattggagaacaaggaaattatggtgccaaagaaagatgaggatgaggaggaggaagaacaagacctagatgatgaagaagaggaagaagagataacagaagaggtatacatatataaatatatttgtatatatatacctagctttgaaatacttcatttatgcttttaaattttgtgtgttttccttttgtatttgggtgggcatattggttgtacttttccaatagttaaacctgaaactctattaacaaatgaattggttaaaaaaaattgataattgaggcttttaagttttaatatagttcatattgaactattattggtaaatggtaatcattcagacatgggttttcttttatttatttgtttgttttatttagcttaaactaggaaatatttattaggtgaataattttggttttgggtcaatgcaggatttgctgaacatattaatgaaactaagagatgagcacagatattgccttttttgcggattccaggtgagtttgtcttttttttttttttggtttaaaatctctattttactagaaaaattgttaatcttcttattggggaaattttttttatttgcataatatatttttgctttttagaaagagtttatttgcatagttgtactgattgaattttgccaattcttcttccagtatgaatcaatggaggctctcttgtccaattgtcctggaattgatgaagatgaccactaatatatgatattctttgtcactttattacaaatgcttacttttgaagaagattatgtaggcaactgagtaaagccgaaagtttgtaaaaaataatgtgagctcttcatagtttatatataggataagaatttttcttagaagttgtagatttgattttagaaaattgctttccaaaaattagtgataatagttttgaaggttaaatttttatttatgttgtagccaattttaatagatttttttaaatactaataaaataacaagtatcaattttttgttatgagtaattggcggcaaaatctcaccaactattaatttatttataaataaccatccaacctcaaattttagtgggaaaatttttaaagtactattaaggtgtcgtttgttcaatctcgttaactttttattttacttatgtgacaatgacaaatcatcccgttattggccaacgtgaccacatttaccaagtaatatataaaaataaaatataaatacttacaataaataaaaatcataaatcagatactcttttctttaaaaaaaaaaaaaaaaaactaattaacataaatcataaacaaaacttaaaactaaaaaaatagaagtgaaactcaaaatcacaaatcaaaatgaaataattagaagaaggagacgaacgaggaaaagaagaaggtttgggagatcagaagcaagaaaccaaagacgaagaagaagacagtcgagacgaagaggagaggaagagagagtgagggtcgaagcttgaaactggctggaagggggatgaaatggcatttcgaaggcggaacaaggatgatgtacctcctaattacagtaagtgttcatcttaactcttcctacttttgatttttagggttttctgttggagaataatgatccattttatatgataatcttggttagtggtgggttagttgatcaagaataaaagtaggtgtggtccatcagtaggtgtttattaaagttaaaaaatttagggaatcttagcaagttgtcggcaagacccaagcttgtttaaacaagttcttcaaccaattctacgaacagtataagaacaaaataaacactaaaacctagttgaacactctaggttttcacaaaagaaattatctcctcacaaagataaaaatatgaaaaaagaagctagaagatgtgagaatcagttggctgctctctaggtcctatttatagaaccaagaaaccctagacaaccacaaacacaaatttccagttgtacaaaactttcctaaaaaattctctgatttgcggcatctgaatcgaactctgcatcagatcaggaccataaaaaaaactttccaaaaatgaccaagattatgatttggtcttcaatgcctaccaaatcaagattatttgatctgctaaaatcatggcaaaactgaaatcatcaattagaaaaagagaaagttaagttttctaaaaataggcaactttctataaagaaaatttcttctcttacaacaaaagattcccaaacaaatgcaaccagctgagaaaagaatttttcataaaagaaatgagcaattataggcacaaatttaacacactaaaatcaatttaattgctaaaaaaacacaaattaattaataaatattttatcaactaatttgtcaaaaaaagactttacaatctccctatttagtattttagataattaaaatatttttaattaacaagaacctgcaaaacaaaattagcaaaaaaaacatataaactccccatgagaagtacaacattaaaccaaaataaaagttaactttaaccaaagtttaacacaaacacaaacctcaactccccttgaacaattgagtatacaatccacattaaaaccaaaattactctctctttttgtttatctataatggccaaagattaaaataaaccaaggcaagttcaacaaaacacaaaaagagaaataaagaaagataaaacaaactggtataaataatgagataaaaggaaaccaatttaaaattgaaaaaagaaaactaaaataaataaccaacccccccccccc

SEQ ID NO: 15582 - DNA, 5708 bp, Cannabis sativa
tgggccgaacttttttttccttccatttattgtagagttttccagtgaatcttgtacaactgatgattatttcattttgctctgactttgcagttatggagtaatgtccgtaatgcttttggggatcagcctgatttggttgaattggctgatacattgtcgcaaaattttgagaccttgtatgatgaggaggtaggagtttctcatcacctttttctttatctttcttcaactcgtcgttttactcttaactgttgttgcgacttgtgagtgcccaatgaaattgatggcttgatccagcacaaattctatctgtttctcattaatgaggcttctgttttgcaaaggatttgagagaaactagtttgtattagtaccatgtacatgtgttttattggatttttgcttgtagtttaccctatgtttggtatggtggaaaaatggaaggaaagaaaacttaagagtgaaaagtagagagaatgtatcaatgagcgtgtttggtatgagagaaaaatataggcattgggcgcaccaaaatttatctacccagagagaaaatcaatgtggacaaaaatgtaaatataaattactaaattaccttcactaataattattaaaattttaattatattaaacagaatagtaattttcatataagaaaaatttctctccttgtttaccaaacaacatggaagaaaattaatttcttttcttccttcatattttcttcaccttcaaatttttttcatcccgcttattttctttccttcttaccaaacatagtgttagtgcctggggaaggaaaagcagttagtaacaaacttatataaaaaagaattagttcagcgtctagcttctctgcacagcctatttttctgatgagggtgatgtatgaaattttaaagtacttgattttatgttcataaatttacttatttttatttttacctgccatattatctaattgttgtcacttttttttccccaaaccttaaacaggttgtttctcttgtcgataaatttgcggagtttgctaagttggattgcttgaactctgaaagaaaaaaggagatagatgatttactttcatccacaactttgattcccaaggccccttgggatgagggcgtgtgcaaagtatgtggcattgatagagatgatgacagtgtcctgttgtgtgatacttgtgatgctgagtatcatacttactgtttgaatcctcctcttgcaaggataccagaaggaaattggtactgtccttcctgtgttggtaaacgggttgctcaagatgtaccagaaaatatccaggtgattaagcagcggtctggtaaaaaatatcaaggagaagttacccgtgtttatttggaggcactcacacaattggcttccaaaatggaagaaaaagagtattgggaattcactgtggacgaggtttgtctttttactcgcactgtgctgattctggcttttgtgatctttatttggcttcacagtgctgagctggtacttatacatgtagtagcccatctttccttcaaatgcagtaggttataaatggatggtgtatggaagttgtttagatgggcaaaagacatggatttttgaaatagatactaatcttattgatagttatttttgatatgaaattttttcaaggacacatgttcagatacatgccttgtatttgttgttattgacttagaaaaaatattctgcactcacgttattgttctgagatttgaaactgacagagctggattaccagctcaagtctgctactctttacgactttatttgattgcatcatttgtctcattatagattttagaattgagacaatgtctttatgtctgactatgtttatctctacttttgattgcagaggaccttcatgttgaagtttttttgtgatgagctgcttaactcagccattattcgtcaacaccttgagcagtgtgtcgagacatcgactgagttgcagcagaaactgcgttctctgtttgtggaatggaaaaatctcaagtccagggaagaaagcttagtttcaagagctacaaagcttgaccctaatatactcagtgcccttggagcagttgatataaaggattcatctcctgctaaccacagcaaatctcaatcacaagcgccgggtgataggtcatcagcagatgatcttccagcagtagcgggtgatcaagaagcaattgggaatagtggttctgatagacgctcatctgccaccgagtctgagtacaattgccgagatatttcagatagtgaacttcatttaaaagaagcctatgcttctgctggggagagcaatgccatcacccacaaggattcacagaaaaatgggaaatcatttgggtcaaacgagttgcctgcatccaattcttcgccgcaggaagttgatggttccagcagagaactctgttcaacaagtaaccaacaaggattaatcagaactagttcaagccaccagcctttagatcagcatggtcattcagatgcgaggggcactagcgtagctcaacaagttccccctgttattgtgaatgagttgcaggcctaccatgctgagttgaactctgttaagagtgatattgcacttttgcagggttcaatcactagtgtggaattagagcttctaaaggtatctgtgaggagggaatttttgggtagtgactctgtgggtcgcttgtactgggcttctggcacaccaactggacatgcacagattattgttgatggaagtgtggcattgcagaatggaagaatgatgaactgtcttcgaggaaaagctgttaatagttcagctttgcagtattatattcagccacttgtgagtaatgatattctttcagagggatcaaacggtttctatccttaccaacaccaacaaaataatgcttctgtttcaccttgggtttcttataaaactgatgaggaaatcaatgagctcattaggtgcttaaagaatactgattctaaggaaaaagagctgaaagagagtattttgcactggcaaaagcttaggttccaagaatttcagaagggtcagtttgattttgcagcattctcagcgaccgcaaatgaaaaggctgtattatccgactctttggtaacaaaagcttcctgttggatggagaaaagatatggaccatgtgttgagttagaaagtgctgatatcttgaaaaaacgagggaaaagggctaggttaaacaatgatgataagatgtaccgttgtgaatgcttagaaatcatttggccttgtagaccccattgcctctcttgtcaccgaacctttcttaatgatattgaacttgaaggccataatgaaggtaaatgtaattcagctgttatagcccgtgagaaggttaaggagccaactgatgctgccaaagttaaaggcactttaaaatctgagagtagtcgtgaagatcgcacaggggaaattagcagggctgcaattcctgaaactgttttgtctgagcttagtgctaagctgattaagtttcacgatgaaggatttggttgcccatatgactttcaaaagattcgttctacatttgtgacacaagactcttgtaaggatgcaatagaggaaataggtcttcttggttcaaaggggattccttcttttgtcccatcaatggctccttatctcactgatgcttcccttgctttaatgtctaagaaagatgtgggtttacaagttgatggttccgacactgcagaaaggttgtattctctaggaaatgctaatgcaactgtttcttgtcatgacggtcaatctgacagatctcctaagagatcagcagacattaatgtggttgtgaaatctcagaaatctgccttggcatgtctagaacaaagagacagggtacagtcttctggtagtcattcctcgattagtgggctcacttgctgctgtgtggttccccagtcttctctgacaccattggtgggtaaagtgtctcatattttaaggcgactcaagatgaatcttcttgacatggaggctgctctgcctgaagaagctttaagaccttcaaagtcgaatttgggaaggagatgggcttggcgtgcatttgtgaaatctgcaacaacaatatatgaggtttgtgtctcatttttgttgattttgtcttactcttgtgctacagttttacatgcatatttctttcattgatatcatagaacatgaagttggagccatatttttcactaggatcttgatcatgctttcaaatatttgtatatagctttctgccttttgttatgttatgagtagagatggtttctcataaccaataatcagtctatactatgaaactattaccagtggtgtcttcggcacatacaagctttgggttcccaagttgagtccacacttaaaaattagtttcatattcacactctaattagaattagttcttcattgcttgtgcccttccctcctttaaccaatatcgtgtcacaaaacaaatgattttgataaattgctaatttcccacttgtgtcagatggttcaagccacatttgtgttggaagatatgattaagacagagtacctaaggaatgaatggtggtattggtcctcattttctgctgctgctaaaacatccacgctatctgctcttgccctgcggatatactcccttgatgcagctattgtgtatgataagactttatccaactccgatccaactgatcatttagagcctgttaccttgtctgaaccaaagcttctggctacattggatgcaacagagagaaccaagataaccagaagatctaacaagaagaggaaggaaccagagggttgattttacattcaaatccagatgtagctcatctgggcgggtgtcttaaatgcagcatttggccatgttgccgaaatggaaaataactctcaagccacacatggcttaattgaatcataaatgactccccgagacaagcttgactgtatgaagtaactgccgctgctgctgctgctgaatcatgttcgtgtacatagaggtaaaactgacatgctaacttgacggccaaatttgggaggttaatattatctgcttggagtgttgggagggccactgaaaaatttcgatatgtatatgcagatacatccaattttggattgatttctgctttccataattgtttgtttggaaagagagatgcaatggaatgatagcaaaaacatccatatacatatacggaatagtagtgtaaaaaactaaagaaaaagagaaaagtacaagggaagtatcgaagctgatcagggttaggcaatatttcattctttatatacatcatcactccccctctctcattctcttactaggcatagttgtattttttttcccaaatgcctgattaaaagggaaagttgagaggttatgctgttccatctatctgagatatctgtaactggcatgaaagagttttcggaactggttcatgcccctctgaatcttttttttattgttaattgggtttctaacaatggtttgtttttgaccagtctaggtgtttattggaaatactgactagtccttgagtccagtacttcctttccatgcgtaataatgtgtgaaggaattgtctatgctcagaaatatttttgagtgtaaactgttcccacttgtaacaaagtaacagcaaccagttcatgattaataggtcactatttacaaatctta

SEQ ID NO: 15583 - DNA, 5711 bp, Cannabis sativa
aagaaaaaatttgtagttttcattgagaaatttgatatttcatgtttacatgtgattaaaaattttcttttaaactcacaataactaatatttgtaggatataataacttttataatatctttaaaatacctccatttacatcaccccctctctattcttctctctttcactcttactgccgagctcccctacccccctcatcggaccacacatcggataccgtgggaccccaaatcggttcccaaattggaccccatatcggacccctcccatcggacttacgtctcctacctcgcaaactcacagtttcattcgaccctatcggaccccatcggacctacatcggaccttgcccaaatcacagatctgaaattctaaaaactaaaaaatggaacacgaaactcacctttgattgtttgatttggtttcgggtgcgtcgtgggtatgtcgtgggtcggtgggggtctatggggtggtgtgccgtgggttgggattttgagagagagagagggagagagagaacagagagggagagagagaacagagatgtagagagaagtgtggtttgaaaaatgagaggacatttttgggtttaatgtaaaattcacttatttttaaaattttaaaatacataagtttagggaattaatttttcctaatagtatgcataaatagctaaatttccctttttattttaatttttttatacgatgatgcggagtataattatttaagacattcttgcatatttttaatgaattcacaataatttataatatcacaaaatatgattcaaacggtttatttcaaacatataaaataatagagacattacaacacaaattatttaaatcttatttttaacataaattattttaaatatttagaataactataatatacattgtcatataaaaaatagaattaaaactattgaaatatctaaaacacaaaaataaaatacactggtacactcaatttttatttttagagtgtacttaataatcatttattctgattctacatattgaattaaaactaaattttgtaagagaatagtcattttgtagataatatttttactctcaataattacatttaatttatagaacatagaaaaacaaaatgctaatgacgtatacatgtagatgagccaaatcttcacttgatttctccattagaacatattcgggtaataaaaagtttaatttaatgactggcagatcaaagacgtaatcattaatagcaaagtgaataaaatttgttatagtgtgcaattgaaaagtcaattgccacgtcataatctcaataaaggcaaagacaataataaaaccaaaagcacaaacacaagctcgaattctgatgtggagctacgacaaatcgttaatgttaatttcaggtgaaagggatattgccagagagaagaaaaagctagaaggaatggaatgaggtcgttttcttgaaaagatgattaagtaaggaatgttcatggaggactgttaaggtgtcattttgtcgtgttttatttcatgtctgaatttgatggtaaagaattcgaccacgttcaaaccattttcacgagacatctcaaacacttcaaccaaccaaccaatccaaccataatcaccaaatcattattagcttgagttgtgttttgtttttggcttgtgggattgttaaaatttgctgagtcaaactctaaagtttccacctttgaaaacttatcacaacataatgtatgtaatcagataaatgagaaatcaacttaacttatatcatacaaaagttgcacaacagtatttcacaatacacaattggattacataaaacatctttcttcaactttgattctaaacattcattcatgatcccatcagcatattcttctatgctttttcttttttggttccattctcatggttctggtagagacttgagtgaagaccctttgaaattcccatcaccatgtctggcatacatgtactgaggccgtctctcttccaccaccaaacaggtgtgtcggtccggctctctgaaaccatgttcccctatcacgaaagatcgaaaaagcaggatctttctttttcttttttctgcaaattattggaacaataatggtgatgaaaccaactgtgtcaggtttagaccaatgctaagctgacaatgtgatagaattacagtttcattagaaatcaagaaaccgtgaaaatttaccagagatagggaaaaaatggcttcactatcatcatggctgttcctcatcagacctcgaccttgtcaagcgcctacgccttctgggaactgaagaggtatcttcaccagcgtcgcttgataagcgttgttcttcctcctcgtcttcctcttcatcatcctgaagacccaaaagattctcgccccaaatcaatcggcgatcagttacagccccacctgaacgacgatgatgcctagtccatgctcttggccttggtcgggattccccaccattgtccattgaaccgatcatttgaaacagaaacagagtagtccaccatgggccgttagcctcacttgttccattagccctctcaccagctagacgatctccattttcaatgacatagtcccccacaacaacagctccaggcattgctgagcgaatagcactgaccacatcaccgagttctctctgatgctctaggcgtcgccaggctcgttcacgagatggatcaatatctgaaggtcgtgttgcaggatgaatgcgccgagcatggcggcggagctcttggtagttaccagaaaaggagcaagtttcacgggagcagcttcgtctctttgagttgaggtactttcttgcttcttcaacaacatcccagccaagcacatctcctctgcacaaaggacatttcaagctcaaattgggctctgaagaattctccacatctaactcatcaagttcaacaaccctttctctaaaagactcagattcaacagcttccacaatgccttcctgtgtatctaaaatactatttggaccttgagtgttgttattttcttgtggttgttcttcatgcaaatcaacagataaaacagcattgttttcattaagattcagattatcattaccctcattcagatttggtctcaaaggtgtgttcgtaccataagtattgacagataaagaactggattcagtaggaatgtcagtagtactgtcccttaatttcttaaaccggtccaagcagtttgaatgcctgtggcttgtatcacaaatgtaagatctacaacccttgtcatgagagctgcaacggagcagaacagcattatggggatgatccatgcatatggggcaagaaatttcatccagttctttgtgaagaccacggatatctgaatcagtacataatcttcttttgacaccagccatcttgaaagatactgtgtagtttactcaacacattataactcattagaacactagtactctaaaataattcaatattctaatcattcaaaaaattaactcaatagcaaataagcaacaactacaccattcaatgacttggagagagaaagaaaacaacaaaccaagaatgaaaaaaataaaaaataaacaagtctgttctgccaaaaggcatacacattatgttcattttacatacaagaaaaggcataaatttcaaatctttgtcaaaactagacccgatattacaccgtcaaaatttaccgaatcagttttgttgtacaagtcataatgagagagcaaatgtttccaattaggtatcttcaactatctattcaagcccaagtccaactagtcattcggaaaatcattttctacccacctttctcatatcatcatctcaccaggttttatcgtccatccttagcagaattatgaagctatcatttcccaatcagtcaccgagttgatgcaagcctgttacccttagttggtcatgtaaatccaaggagaatctcacaacattcccatatttgttacaccaaaaagttacctctcaccttcaaagatcttaattgttatttttatgactgaagtccttgatccaatgactatcactattcttaagaggactaaaagtatagcccatctttaatcgaagtttaagagaaaattaacatctgcggagagtaagctttctaaatgaagtcgaagcacgaagcaagggaaagttgtgattgtgatcgctaaaccagccacaaaccaaatccctcaaagaatgacaggcataatgcataggaaaaaaattgattgcaaacgaagtttcttaagaacatacagaagttttcaaataataaaaaacatactgaatgaaaacaatccagaaagaaaaacttatcagtaatggaatagaatcaattcactttgagacttagaaacataaaagctcacaaagatcatgtggaacatgttcaaacaaaataaataacctagaaatacagagttgaatgcttgtgcaagacaataatcatagttatgtgatcacatacttatacgagataaataagaacaaacaataacaaagcatacatggtcaaaaacagatttttcgggcaaataatcattcaactgcatttatacttaccaagaggaagacctctaagtatagtccctacagagcttcggaatctcaaattctgttaccaattccgaaaaactactgaatctttactcaactctataaagcaaatcacaaggcaagcactcaaacaaaggcttcaaattaccggatagcactacaaaacttgaaaaatacactggttgaatgaaaaactagcaagtatacttgtcaagccacaggctcacccatgaatccaaaaacctgcagttatgccagaaaacacaagtgatgatcccatacgcacattatctagtaaagacgtgctgatcttaattttatcatgtatgtttcatttacaaaaaaaaatagtccaaatatatttataaatacacaatatttaaaacctcacaatgatgttaaaaaactaaagcagaagtacagcaatagatgatgaaatgccagaaataatcccaataattaagataatctccgatcatggttattatgcaaccaacttaaacgtgtagattaaaagaagatcaagtataatagttcaactggatactttcctaatttaacccaattaaaatcataaatccaaattaatttaacacggcattatacgattccaataaaaaagatacaccttttcagtaaaaacaagcatctaaacaaatccctaaaccgcttaatataccgatcatccatattcccaacgattatctaaaccctaaccctaaattcaaaaaaggggataaattgggtacacaatcaacaagatatacatacataattactttttccctaaaaattacccaattgaagaatgatcaaagataagtctcgatcaaacaatcagatcaagattgaactaaggatgaatttcatcataatcaaaaaaaaaaaattaaccaaaaaaaagggaatgaaggtcagaattttacgaaaagaaattgaatccgtcctgaaaatgtgtctttggtgagattgcgtagagaagttgctgagatttaggaattttttttttttttttttgcgtataaatccgaatatagtgatatgcacatatatatgtagagttgttgctgttatctaatctcttcttcccaatattatttaattgaatttattttatattaattaataaatag

SEQ ID NO: 15584 - DNA, 2894 bp, Cannabis sativa
catagtgcttcctatgatttattagagatggttatcttactagatagcgatattgaaatgtgtctcattagatagcgatgttgaaattgttactttattaaataacattgaacgtttatcttgttagacaaatatttgatattaatgttgtttgcaacatgtgatgtgacttcttgcatataaattgaagttcgtgcttattttatcgtgtttgtataatgatatataatgtttatgttattattttgagtgtttgtaatttacaggtgctttctagtacaggtaagaaaaaaaacaaattagatcagctatgaattagagtattctccagcaaaatgtatacatcaactcatacgaccagcagcgccaaattgtcaggacataagttgtctataaaaataattagttgtctttggatggaatgtcaagttggcaactttgtaaaaatttaaaaagtagatcccttaagtttaaaagttgtaatgttatattttaaattattttaattttaattaaatcacatcgttttaataaatcataatttattattataaattaatttataaaagcatatctatctggcgtaaacgatctccaagtcgcaccctatttagcttgtgactcttattactagtctgatcatagttttactgagagtaccattcttgctactcttcaatcttttgtaacagcgaatttagctatctaatagttccctactttcattcaaaaatatatatataaatatatatataattattccatacatgtttatacagaaaatgtatttaatgaaccatatccctaacctactagatgaaagtcccaagtgaaagaggttcaatctcgcttaattaaattaattttcagtaaaatttcacttgccaaactaatttcttctgaaagaaagaagtaataatgcccgggagcaaagaaatcaacccaaaatgaacaataaaacatattaccgattctcttaatgtggttctaggttattaaaaaaaaatctcttaatgtgattctagggtcacaatgcaaagcactgcttaagtagtgaaaaacagactaaaaattcgctcaattgaaaaagcaaagcaagaaaccaaaggagattttattaccacttcagtccatctaactggataaaagactccatagatgattgaacaacggttgtttgttacggtaagacaagaacatactatacaacaaccagtcttaaacaagcctcagagttaaaacttaaaaccatgtacagttttattcttcatgatgttccaacttccaagactaagagttcatcagctagctagtatagatagccaatttcagcctcactgggtcccatcagttttctgagaaacaatagatgaaacatgtaaatgatcaatactttatcatgtccaaccaaaagaaaagaaagttgagagactatatgtgaacaatttgctatacacattgttcatggtcttcatctgatatatgacaagtgggaaccaaagtcgctttcaaacatgcttataagcttatacggtagtgcctagcaaatattataaaagcttgacgaagatgcatttatgacaatttgaactccaaaatttcatccttctattcacctcttatccgttatcacagtagataatcaatcaaaaagagaaatatacaaaattgcattttccaaccagtgagctaagcgtatgcaatagtttaccaaagaatttctggaatctcaatctctagactaataatattcgttttcttagagaagaaagcttcaaaatgcataaaggtgaagtatcgtccacaccaaaactacctccacttacaaaagcttgggtaagtagaacagcagtacacaaaggcatatgcaaaacaaaccagactatgaattaaatgaatcttttctacagctaaactcaaaaacgtctgaataagtgaacacacaacatagtattgaatcttggtaaatatctatgtagagtatcttcaggggagttagtgacaaaaagggcatagtattcttcaaaagaattgtcacatataagcataagcagacatgcacatgttacacacacgcaagcctagcgacattaaagcacattatcatcaacaaaatcaagtccacaacaattccattcccactaagagctaccccaagaacatcactcttttggagtctttagtcaaaattttgcctaaatcaatcaatcatgaataaattggcaacaagaatatcagtaatcagatggtttccaattaggacttaagctaaaacacaaacatatttgacatttaattaaaaaattcaaacaaaacatccttacgttttcagcattctctttctctttctgggctttttccttttcagctttcttcttcagtttctccatcttctccctctccattctcttcacaaaaacatcatttcaaaatgaaccaatcaatcaatcagtgtaaatcccaaatcccaaaaaccaatacccacatcacaaatgacagatattttctcaggaaacaaacagaagagatcgatacagagagtgaacagacctggatgtaaacattctcagcagctctttcctcctcgctcaaaacctttcctttgccatcactgaagtagcgagttgagggccgtgtggtgtccatcgcgcgagacagtgctgttgctcttgccaaggtagatcgcatagccattttctttctctctctttctaatagtcttctactttctacttatgtttgtcggcgtccctatcgaataatcgatggctccttagaagtatccggtttattaataagacaaaagactctgatgtttcgggttatcattgcgggtacgggttcaagtcggatggaggaccgaactcatattccagaattttcatatcttcaat

SEQ ID NO: 15585 - DNA, 5121 bp, Cannabis sativa
cagcagcagcagcaatatcaaatgcagcaacaacaatttcatcagaagcaaaagcttttgcaggaacaacaaactcatgcgcgacagttgattctcgaacagtttttgcataatcaaatgcatgaacctggttttggacagccacatcttgatcctgtgagagccaataatgttctagatcaagtatttttagagcagcaccttttaaatcaactgcaacaacagtctcatcacactcctaggcatgtagatcctactctagagcagctatttcaagccaagtttggtcagacctcacaacaagaacatcaaagatatttatttgatgcactttcccgtgcacagcatgaacagcggcaatctttggagcaacagatgcttcagcaggagctgcaagctaggcagatgtcgatgggattgaggcagcgaacaagtatggaagaagagaggcatgtcaattcagtttggccagcggatgaatctaatcagttcttcagggcccatgctggttgtcaccgagctcactcttctggatttagtcctttagacatttatcagcggcaacaaagggcaactcatgaagagcaggtcaaccatcttgagcggaatctttctgttcaggagcgacttcaacaagggatatttgagcctggctcactgccatttgagcggtcaatgtcctatcctcagggtgcttcagggatgaatttggatgttgtaaatgccatggctcatgctcatggtctggatatgcacgagtcaagtgcacgaatgaaatcttctaatcaagtgggaccatttccttccagtgttcatggtgttggtcctcaacaccctttagttcctaatcaatttcaagttccacatatggatggaactgagaaccgatggtctgaaaagaatgagcagctagaaaatgactttgtcgattctcggtttcaacagtcttatatctctgcagagcgacataatagggagtctgaagttaaaatgacttctgaggattcttctttatggatgtcaaatgatgagaagtcaaagagattattgatggatttactcaatcagaaatcaggcaattatattactgaagatgcgggtaaagaaacatcctttgagagaaaggttttaggcaaccaatatgccaggtcaagctcatcagaactatctttcacttcgcctcctgatcgagaagctaaattaaatagttcatttggggtgggaatatatggttcaagtcgaagtgaaccagcacaagaagagagcactgattctggagtatcctctctgcacaaacagcaacttgagttgcgaggattgaaaagtgagggtatgatgaaaggtcgggaatttgagcccccacaaaggatggtggagcaagcaggcttggaagctctagatcacgagaggtcaatgaatgccacgagtaggcattcctcccttggggttacaggtaatttgattttcttttccctgcgggtggaactggtcatttattttcattgcttctctgttagcccctgcatatacttttgtgagcctcaatattatttttatacatttcagttggaagtgccggcacttatgataacaagtttggaccttctaatgcatttttggacgatgctgcaaaagataggtaagtttgtatagggtatatgtaaaggtttgagtattgctttaaaatgcagcacaaatagtacctgaaatggagccgcctgattattttgattgacatcttttatacagacatttggtgtaattaattgtgaaattattagtaatcatgattacacattggagcatatgtttgttgcttgtttcttattttgaacctctgtatgacagggcattctcaattaaagggcaagaaagtattctgctgagacgtcctcctgtgctgcggacaccctcatctcagaatggtttgtctgagctaccatctgatccagtttctaggggaaaatcttcttctagtggcatgcctgatggtatgttgatatttaaatacatttttccactagtgtctttgtgtggttatttgtacacgaaaaaagttcggtgctcggtttatcttcttctaagcaccacacttttttctctttacattatattgttcttttcctctctatcctttatatgtttcctgttggttggtgacaaaaggaaagatgaagttgaatggagtgctagacttgtaataatgatatcggtttcattttcaggggtttcccaagatacattgagcaatccaacaaaccaagctccagatttaccagcctcttccaagagggacatgcgcttccgccgatcttcatccggcagtgaggcagatgtatcagaagcatccttcatggacatgctaaagagtacagcgaagaaggctgctccgtcagatgcccattctacatctgaatcatccgatgtaacacaagggcgaagtgggaaaaggaaggcaaagaaaggaaggcaaatagaccccgctctcctcggcttcaaagtcaccagcaatcgcatcatgatgggtgaaatacaacgagcagatgactagtagtttagaaccaacaaccatttttttgttttgttttgtttttcctttgtattattatccttttttatatataggtttataggttttcagtgtaaagcattttttttgtcatggaaattctttattttttttctttcccctttgccatcttagtgaatggtaagaataggaggggttgtattggcaaaattacctgtctataatgatagtcaatagagttagttgtacacaagtcacaagggtcattgttgttcctctgctctttattttcttcattattaatttattctcacgtggaagggactaactaacaaatacactcttaacgatccttactattcttccttttcattttctctaataacattttaagcaacacgctcaactcggttatattgattacagtagcacatgctttagatcaaagtgttgaaacttgacatacgattggttataaagagaatacatgaaaaatatgcataataatgtagtagcgatatgacccagctgctctttaattgttgggctttcctaagctgtgatgtgttcaagcaaccttataagatatagaggaacttatgagcaaattacgttatatattcactttataaaatttattttaattttttctattttttttttttttttaagatatactcatttttataaataatgttcttattatatctcgtaagaactatttggaatggattaatgtcaggaaggaaaagataattttaatgattattatgtttgttatgaagttctaaattttttaagtcttttaatatttttacggtagtattccaactaccttgaaaatgtataatattgaccggtaggactcaaatattccctcagttatattaacgtaagattaagctttttattaaatagaaaatccaataataaatctgaataaaacagaatacgatcgtaaaaaaaattatatagtgctctttcttccgtcattattattatccatcatcttcttctctttgctccttcgaacaataattaaatattacaatttctctttcaaaatttgacattgcaccgctccctcattctagctttggtcgttggttgttgtagtttagattatgttcatcatttggaataagttagtgagttctaaagtgttagctctgtgcatatatatatatgtattttttttatatatgaatcaaaattattggttttcaaatcgttgtttttttaatgttattatatgatatccattatctgaattgaatcaaaaaactaagagttctataataaaaaagcaagagataaagaaatataacaaccactcaaccagtcccaaagtaagaaactagcttcaacatcactactaaataagctaatctactggtactagacttgatgtctcaaaagtcatatttacttctatgaggagttgggtccccgcttctttccaaatccaacaacgacggtgaggaatctcctgttgtactgcatacgcttgtgagcgcggcctctgagcttcttcttcttgtcttgcttagcaatctttggggtctgaccccagacctttccagcacgtgctaacaaactgtgaacattacccatatagattcatatatatgaattagaattgtatgcgtatatatttttaaatggttttttttttcagttttaaccataaaaaataatagtattataaaaaaaaatttcaggtggccaaataaataaatatatagcctaaataaattttttttacacaaataccacttacacacatcttcaaccaagaatctatgcttcctgggcaaccatcgcacaaccatgcagtaacccaacacaaccgaaacgaaaatttaaccagaaagaaaattaccattaattccagcgacttcacttgaaaagacgaccaaaatcaattaaaataggagctatttcgaattcatgaaaaaaaaaagtgtagaaaaactactacgaaactaaaattcaattagaaaaccagtttaatttgcatacaactaatgtcttgacttcaattttcgaatccatgaaatccagatctcaaaaaattgaactagagttcccaaacaatccaactcaagtataatccaaaaaaatttacatcaatactatagtaatatatttatcttggtgtattttcttaatggtgaatttgttcatattaaatcatgaagagacatatagttagagttacgtacgtggaaacactactttgatttttaatatttcataacagttgcataaatattttgctaacagttatttagtttgattgaaaccttcgtttgatgtaaccttcggctaaccgcccagcaaccttcgtctgattgaaacctcgtttgatgcaaccttcatctgattgaaactttcgtctgatgcaaccttcggtcaaccactcagcaaccatcatctgattgtgtaagtaatagtgtaagaaatattttggtaattaaaagcacataaaaaatataaatgttgtccacagcttatggagatatttttataaataaaatgtcattttgtaatttccatgtattaattcatttctataattgtatttatct

SEQ ID NO: 15586 - DNA, 4718 bp, Cannabis sativa
tttagttgcttcctcaacatttgactatctaaagagttgcataaactcactcacccatgttcccatatacttccaaaaagggacaatctcacaaggccaactgcataattgcatattattgtaaacctattaattaacataacacatgctctaatccaatttagtattatctttttcagtacttaaaatgtcattttacaatacattccaagatcacctcttctccactactttgcttactcttaaacagcctgtgatacctcattacagaataccaaatcccatgtgactcggtttaatccccttaatccaaatccaatgttggagagagacaaacaaaccctctataaatatacttctccataaatctatcttcctacaataaaccaaattaaaaaaccagaatgggaagaagccaaatcctcttgttatgctctttgagcctttgccttagcatagcagttgcagattggaatattttgaatcaaagaaccaaaaatggtctccaaatctcactgagaaactactgcgagagctggagaatgaacgtcgagcttcacaacattcgaggcttcgaagttgtccccgaagaatgtgctagttacatcggaaagtatgtgacttcaactcagtacaaagttgactcagaaagagccatagaggaatgcatagtctttctcagcacaagttgcaacttgaagaaagatggcaaagatgcttggattttcgatattgatgatacccttttgtccactgtccctttctacaaaaaacaccattatgggtaataagttcatgcagtttttctatcttggttatcattaattcttatcattatttatgtataaattatgtatatatttacaggggagacaaactgaatatgacctcttttgaagaatggcaaagtgaaagtaaagcacctgttttggatcactccctaagactcttcaatgagttaaaatcaagaggtttgcagatctttttgatttcttcaagaagagaacatctcagatcagaaacaactaagaatcttttgagtgttgatattcatggatggaccaatttgatactaaggtcagtttagtctctcccaaaaaaagaaatgcctttaataactctttacatggttttgattagaaattaattgtctttatatttttgtatatataggtcacatgaagatgaactttcctctgtccaagattacaaaactaaagctagaaaagaattgatcaacaaagggtacagaatttggggtattgttggtgaccaatacagcagcattgagggaattccaaatgcaaagagaacatttaaacttcccaacccaatgtaccatgtttgttaaaacaaaacaaaccttatttcttaaccaaaaattgattgcctaataaggcttatgttttgctacttctagttctacataagatatttgtaccattcaacatttctctcttaataaatatttggcaaagcttttacattaaaatctaaaacaatacaatggaagatgatataaacatagttacataacaagcacactttaaacatgaactaaacttaaaaatggttttgacttcttaactttcctctcaaaattattccacttgcaactacacacacctctaaatatattatacataattttagaagcattagtacattttatcttcatcacccagattgagcttagcacaatactcaaacaaacttccatcatacattctcctcactgcttctttagagagaaaaccctcttcatctctagctagaacatacaacaatccccattccaacttacttgcagccctgcaatttaaaccacatcatataattcataatctaaaaacattagtgaaagtagggattatctcatatttaacctaaaaagtatggtttcacattattgtgtttatccttgttattacaaataatcccagctaatgtatgataaaacaatactatatataagatgaatgaactacttttaaattcggagacttgttttcaaaccaagttgtctaattaaaatttaattctctctcgatatgttcctcaaaaaacctgatttgttcgagttcttccgccaaccaaagaagagattttggccaaaattgctactaatgaaattgagcacaattttgcaaaaaaaaataagccacttgtttctcgagaagagatgggaaacatgctcaatatcatttgataccgtaaaattataattaaaaagaataaataaaaccataaaagtgaaaaattgaacagtataaaagttaaaaatggtgtaaaaatcccttctttaaagggtatcagatttgagatgataccagccaaatgggtcaaatgcaagtctgtttgcctctgtcatgttccaaagctcaccaaagctcaatttgtcagggactgtaagtgcatatttgctaaatgcattttctagattaattggcatgtacctgaaaaaaaaacccattaaaagaaaaatggtaagtaaatgatttctcattagattggtcaatattcatgcattaattttgtagagttgaattaattatgcaccttccttctgtgtcatatgttccagaatcactaccatgcttggctttgtgaatgttgtgaatatatattggaaggaaaggagatgggaaccatcccttcaaatcaacaaaaataataatttagaccataattagctctaacattcagcataataataaaaaaacacacaaatttttcaataggatttttattttaaaatgtaccaaatcgcgcccaaaatcgtccaatttcgttcacaattttactaaaaggtcacaactatttaatgtaccgaattgtgccccatattttggttttgataaaattaaaaagaaatgaaaaataaaaaatttttgagtttggaagcaccatttagtatataaattcttgttttgttaaacttttaattttacttaagtataagtagaagtataaaataaatataatctttaatttatttttaaaatttaatgaatagtactttcaaaatatttggatatcattccttttcaagaaaaaaaaagtatttggatatcatttaaaaaaaaaaatcttgtaaattagaaattatacatgtaaattattttaattttaaaaataatttctcaaaaaataaaaacttaaaaaattattttacttcttccaataaagacttacatgaaaaaagaaattattttacaaaaacataaacacaataacaaaaaaaaaaaattataaaaatacagttttacgaaattttaaacatttttactattttttgattttatttacaaaatatacggtatacaatctttttgtgttgtaattttgttgttgattttttgttatatgtatattattttttgttgttattttatttatttttcttgttgattttatgttgtttttgtgttattttttcaaaaaccgtaataaaaaaatattttttgaacgcaaaagtgtaaatattttttaaaaaaaaatggtacctcatgtaattattccattaaaaatagctttttaattttttatattttgaaaaaaaaaatcctaattagtttaataataataataataataagggaataataataaaaaaacttacaggcagagttggataactaagagcagcattgataataatggctatgataagagaagcaaaggcattgaaaccaatagcacgcagaccttaatcaaagaaaaataaaagagtgaaattaaggaattgagtaatgaatttttaatataataaagtattatttttttttttaccagagtaagtctcccaagggtaaataattccattatcatcttggtcaaaaaaagcaacatgttgctgaagaacactcaggttgtaatgtttatgttctggtgttccagttgggtgacttgtgtcaggtgctaccaatgctcttgccaaatctgttatatatatttatatataacaaaaatgtcatatatatttctatgaccctttaccataaactacataacaaataacaatccgagttgagaattgaacttacatggctttggaagagtggtttcaaggtcacttctaacctttctttcataagttacaggggcataacgagcttctgtggctaaagcatcattttccatgaagaaagtagccatggttttttgtccaatttgaaaacatttgtggttttagagtttggattataaaggagaagaaatgagtaatgagttaatgcgtggcaatgggaaagagtagtcgtggcaatagcaaggaatgcatgcctagctttttgttattatgtgttaaaagttaagatgttacatttggcattgagaagtaaatgtgtctttggtgtaaaactctttcttttcttctactacaagtttttttttttgataatagtttgttattataaattaaaactgtaaatcatttacagtaaatagaggaggttatagtccccaaccaagaataatttttatccaacactagaactaatacgtgtgtcaacatattggtactacgtttaatattagcaatggtaactctagagagaaagataaaagacttagaggttgtttgcactaccaaaaaaaggggcttatctggcacccttatctcggcgggctcgcgtgtgcgtatcgagatagacttgatttttttttttttaaaaaaaattctgagcatagcaataacggcgggtttatatagggcc

SEQ ID NO: 15587 - DNA, 8493 bp, Cannabis sativa
taatctaatatcgatatagattttgacaaatatttgtaaataatttctatttgtcaaaagtattatatttatgtgaatacaactactgaatcattaaaataattattattggtgcaattttatagtgggttttgaatacccaaaaaaatgtgaagaaaattgcattaaaacatcaatgtataagcataacaattaacatgacttatgttatttaaacacatcagacgtgtatttcttattgatcattgcctttagagaattgtaagaatataattaatttaattttaaaaagcgttcatatactatatattagtcatgttgttatacatatgtagtgttattacataaaatgtttatattattgcatatgacatattttaaagatcaaattttacatacatcttaaagattatacaaaaactatattcatatattctttgaaatattataaaagaaattagttaattattttgtatacttttatggatgaacaattaacaactttttaagaaatttataataatgctgtacttgttcaacacaattcctgaatgtgaatgcaataattttaaataatcatggatattatttaccactcaaatatttctaaaagaaattggaaacaactagaagatgaaatgccacgcacaatcaaagtgcatgaatttgatatgttagtttttgcactatgacgtggcagtgactagatgatacgtgtcttaaatttcctacttgggcaaaagaaagtaaacctagcagcccccaaaggttgatataaagatttgtgttgttagcatatagcaagatgtccaagtagagtaatcaaggtacatctgagcaacgtacaatcacttgattaactcgcacacactcaagagcatatgggagttggcaattttagagataagcatcgtcacttccaagacacgaagataatccctacattcgtgggattaggtcaaagaataaaggcaatatgccttggtttctaattatttgtattttaattatagaattaatgtactttcttattttatttattatagattaagggaaaccattcttcatgtaataagctcctataaatagtggcataaattcattattgagggggacgatatttagttcagaagaacactcaaaagagaaaagagcaagctaagagataattactcaaagatcatttgtaagagctttagagaggaagaatacctcatttttgttctcaagtaaatacaacaaaaattggagtaggttgctaccattatcacggggtcgaacatctagaaattttgtgttctttttacttactttttttgctttctattacttattttgtctattttctttatcttgattcattggtgttttgtagaagcggggtcaatattttggtactttcatttttagaaaaaacacaagcttttgtcttaaagttttgactggttaacaagattgttgtaacttgtcggggaattcaaactgatacagtttactcgatggtgacaaatccaattgtatagactcttggaaacacaagagatccactaaggacaaaccccgagcaggttaatacacaaccaccaaagggaggccatggagtcttcccctttggctacgctcacaccaagcgtacaggaaactaggaacacaagtacgacgaccgactaagccactcatggcactgagatcgcgtccacaaataacattcaaatgccagttggagttgatactgaatttctaaacttgcgagctgtgacttatgcaaggtcataccaacaaattgcaccatgatcaggaggacctccaagaagctatcaccttgcctttgacgaacaaagatgtcagttcatagaatggatggattggggatggaagtcatgagggctcaacaggcagccattgacaatcattgcaagcaggctactgtgtttattagaagggcctactaagttactggttagcaaccagtgattgattttagcatccccctaaatgaagcagaagagtattcagatgttcataccgcacaaacttataacagtaagtcgtccaatccaaggcaagaagtccaaacttgggccaaatagtagacggttagatcttgccagaccgccccctgggaggaggtactcatttgaacaactatactcagatagagatatcaggccaacctttcaaccaagtagttcaaacactgagagcacctagtgcattggacagtcaaaacattccaccaactgtctagccaaataattatgtccaagaccctgctcaaagagggcctaatgtgacacatgtcgatctacgacctggtgaagttgatccacctgtgcaagcacaaataaatgaacataagagcctagtacaaggtctaatcggcccaaaacatacagttcttgaactagaccaggcacgaggatcacccttgtcccctaaaatcaatgctcttaacctacccctaaaattcaaaattccactatagaagatgtatacaagaaaagaagatctaatatctcatttgaaatacattgagatgcaaatggattagcaggggtaagaagcaatgtgcgatgtagaatttttctaactagtagaggccactgaacaattttatttcaaattacccccacgaaagtttaattcattgaattccttttcgtctgaattccatgcaaaattttcttcctcccgttagcttccctcacacttcgaagacatggtagaagtgaaacaaatgccaggagaacctttaggtgcctacattagcaggttcatgattaaagtaacaaaagcttagggactgactgaggattgaagacttgcattcatactagggggcattgagcctatgggagaatagtggaaggagattaagagattaattgtgggatcgttggttcagtttctggatcgagcagatggatttattaagctcgaagaggcaatatggcttggggatatagtagggcacaagaaaaatcaacaacacaccactacgggtagtgcatctgcccagaattaactacatcacaacaatttgaattcaattgtaaagaggtctaacaataacaatagacatgggaatggaaagaaaagtaagttcaatggcaactccgagtaacatccaagggagaatctaagtttacttatttctcaatgctaacagatgatatagaaacaatctatgcaaccaccctatctatggtgtcatacaagaaaccctctcccatgaaaaaggacttgagaaaaagagatacaactaagttttatcatttcatgcggactacagccatgacacaaatgaatgtgagaatttgaagtgggagatagagttcttaattagaaaaaatagcctgcacatacaaaaatatgtcaagaacaaccaagaacaaaaggccgcttaagaagataataacaaaaacaaattgatgcctccaccagtgcacatgcatcttcaagtaattattaggggcccgcaccttgctggagagtcaggaaatgctagagaaaagtatgaccgagccttgaattacagaaaatgatacaatcctagtcgtggaggaaagaaaacctaaagtaccatatttaggggaaccaacaataacattcaccgaagcatatgctaagcaaatgttatttttttgcataacgatcctttagtcattgatgtacagaattccaacaaaatggtggcaaggactatggtggacaatggagcatcctcaaatattctattcgagacaacttatgaaaaaatggggttctaacttaaagaattaattcctcgcaccgaactcgcctacgggttctccagcgagagtgtagcaccacttggacaaatttgctcacatcttatagttggaaaagatctaaagagcataactataatggcagagttcttagtgatcgatgcaccctcaacttttaatgtcatgttaggccgaccagccctatatgacttaaaagttcccacatctgtattccactggtgacttaagttcccaactaaaagtggagtaggctgtccaaggggaaatcaaaggatttcaaggaaatgctacaaccttgctctatctaaggtcaaaaaagaaaatgcttccagccagagtttagggaaaaggtgggcattgcctaatgggaattggcccaagccaatgacaaagacatggatccccaacatgggaaaacacatacaaatgttggcccaatagaagtgtttgatgaagtggagatcaatccagccatctcggccaggaagctcaaaattggtaggtttattacttgaagtaaattaaccataataaaatttttaagagaaaaccttgaatttttttacagtcacatgaggatatggatggcattgactccactataatgtcttacgccctatatattgatccagacttccgtcctgtccaacaaaagacaatattgctaaaacaaatgtgcacatgcactaaaagaggaggtagaaaggctagacacaaataagttcattatttaagctttttactaggcttggattgcccaccccgtgctagtacccaagccaaacaaaaaatgacatgtatgttttgacttcactaacctcaataatgcgtgtcccaaggactatttttgattccccagaattgatcaagttatggatgcaatagccagacatgaaattctaagttttatggatgcgtatttggggtaacataaaatcaatatgcatcaacctaagaacttacaagcttccgaacagagatgggtctatactgctataaagtaatgccatttagtctaaaaaatgctggagctacgtaacacaggttagtaaaaaaaatgttaaaaaaccagttcagacaaaatatggaagtatatgtggatgacatgctcatcaaatctaggatggttgaggagcacatagaggacctcgatgaattctttaaaatgctcaaaaaatacaacatgaaactcaatgccttaaagtgtttcttcagtgtcagctcgggtaagtttcttggatttattattaatgctcaaggaatagaagccaacctagagaaaatacaaggcctcctggatatgaagttgccaacaaaaacaaaggaagtgcaaatcttaactcgttggatagccacactcagcagattcattttaaagtcaacagacaagtgtgttcccttttttaacatcctccgaggtaacaagaagtttgaagggagagaggaacgcaaaaattctttccaagtgctagaaaatcaactcgcaaagcatcccatactctttaaaccttttgacgatgaataattagggatacatctggcagtcattgaatacgctattagcggcgtgctgataagagaagagaacaatatctagccttcagtgtactatatcaacaaaggactggttgagggagaaggttggtatcctttaatttagaagctaacttgctacacgatcttagccaaaagaaagctaaggccctatttgcaagctcatcctctttgggtttatactcacaaacccttttaccaagtttttcaaaagcctaatgcttctggatggttactcaagtgggctatagaattgggtaagtacgaaataatctttcaaccccacaaagctataaaagtgcatgctttggtagacttcatggtagaaggcacatgtaaagaagcagacaattcgaaagatggtcccgggccaaacacagaacaggagtccctaccagaagagaataaagacaaacccatctggaaactacatgtggatggatcagccaccaactagctttctcgtgcatgagttactctcatcacacctgggggacaagccctgcaatgagaaatcaaatttgggttgaaagcctctaacaacaaagtagagtatgaagcactaataaattgactaaagcttgctcgagaggtacacgttgattacattgacgtctatagtgattcattgttggtggtaaattaagtcttgggggagtacacagctcacaataaaaaatgatggcttgtctcagcaagatccaggagctactcgcacaattcaagggttaaacattcaagaaaatttgaagggaagaaaatagaattgctgatgctagcacggtgacagataaggccaatatagttcctcttaaattcttataaaaacctattatcacttgtgtgtaggaaacataaatgatagatattgcacaaaactaaaagactcccataatagcttatctcaacacttgagaagttcaaagcaatagaaacgaggctcaattgatgatgagaaaagatgcacgatacatcatagtggaaggtgtaatgtacagaagcggcttctccatgccattattaagatgtgtgacgaaaagagtagctgcacgacttctgtcagaagtacatgaaggattttatagtagttacgttggagatgagaagttgacaagtttataaaagaaaatactaatgcaaggatatttttggcctattatggtggagattcaattgcccttgtaaataagtgggacaagtgctagagattttttaagattccttgagaatccccaaatgagttaatatagatgaaaagtccatggaatttttccatatggcgaaaagactttatgggacagtttcccaaagaaaaaggtggagtacaatatgcaatgctcgtggtaaattacttcatcaaatggacacaatgcgagcctttagcaacaataacatctaataaggtactagattttgtagtaaagaacgtgatatgcctgtacggacttctgtataagattctctaggacaatggtaagcagttccatagccagatgttcacaaacttctatacgacacatggaatcatcaagagtttcttcgtagtagcacaccctcaaataaataggtaactcaaagcagtcaataagacactcaaagacaccatgaaaaaacagctcaaagaagttaaagggaattcgtcaaaggaactataagaagtattgtggttgttcaaaacaacagaaaggacgacaactgggaagccaccattttccatggcttattgttatgaggcaatgctgcccatggagttttaacccccaccccaaagaagactaacttacgatcaagaaaccaatcacgccctcctagaagaatcacttgatgaaattgaagaaaaaagagattctgcaaacctaaagctagtgactattcagaaaaaagtagctcgacactttaacaagtaagatagggcaagaaagttctttgtgggagatatggttcttcaaagagtgtccttaaacataaaagacagtgcaactggtgtgcttggacctaactggggagggccatatcaagtaacagatgtcacggattctggagcatataaatgtggtcggtatgacaaaaacatggaacgagttctagtaccaaggtatttgattggggaatatttaaggaaatactgccaatcagtgtacaaggtctgatgagcctcacaaagtacacgatgctagaacacccacttttaactaggtggccttcttagtgggctcactcaaaggtttggaaaaacaagtggtactcaagttagatgaccactcctaaattacaatattttcaaaaatcattggtcatgagcaatgtctctaggatggattatatcgttcaattgttttatgttttatgttttaattagctaaatatcagttagatcatgtaaaagattttataattcaataaatgtacattactacggtaacaacatatctggaccaataaatgaataaagatattaattatcattctaattatgtctattttatttctttttatagcaagttatgtaaaaaccattgaaaatgtgtacaaacagtttttctaaacctagtagccaaacaaacaaaaattgaacttacgaaatacaagtgaccaagagtcataagtctgctcaatcacatgggggagaaacaatacccataaaaagaataggtaagtaacaagataaaaaaaacataatgagatgtgcaactatttaaacataagtgaaaacattcatttgaaataataaaaaagcatgataaatccaggattaaaagctacctggccagtctattgtcttgaaagaaaatgaaaaattatccaagtttaaaagcccattattcgactttattgtatcaagaaggcccataggccgaactaatataaaaaagaaaaagaaaattcatatggatggagttcctagttctttgtacgagtcatatgtgtcgtcaacggttggggtttcattgtctttgttgatcagaggattggtgttggctgcctcgacctcttccttggcttgttaggcttcacataaactaagatatgcctccttgttttcattgatgtaatcatagttttcctctgggttagccttccaaaattcatagaagatgtctacggcagccgtctccaagttttccacctctttcttaagtacctgctagtcaccacagtctgtctt

SEQ ID NO: 15588 - DNA, 8514 bp, Cannabis sativa
cctcgtgcttacttgactgaatatgaacctcctacagattctcataacaccactgttcttcctgactttggtgatgatctatcatggtttgctgacactggggcaacaaatcatatcaccaacaacctaatttatgcttaagatacctaattaataagtgacatttacaataaaagtatccaagctattgaaaaatttgtgtaccctgcctttatatttaattgagaaaggataaactacaaagatattagataaatatgtaaaatgctattagaaataattctaaattgagaatatatgggaagcattatagtttaatataggaattgagctactccacttagtaccaattgattttaagttggaacctaaatccctgtctaaaaaacattctctttcaatttgtaaaaaatgcaacaaaagtaccttatagcaaatgtatcagcatcagagctgactttatgctaatttgagccttaagcaaaaataaaaaatgagacccaataaaaaagaggataagttgaaaaatacttcttttattaatcaattaactaaatttagctttaatttatatttaattgaaacatacctctttttatatacagtacctaaaatattttgacataaaggagtcacatggagagtatcttgaagtgacagaggcaaaattggtacaatatttttaaaaaagaagtaaaaatgatagactttaaaaaagaggataaaaataaaagagacaatataaaaaatgtatagagtctaattttctcataaaaagtaagatggttggaatttgaataccgaacatcttagatattactctaattaaattaccactaaaccgtgtaacatgtatttggtattatgtattattttttattttattttattattaactatattttaattttttttttttcaaaatagatgccctaagtggtgggggcataaggtggctgcctccttcctctcgcttcagaaccgacctgatcaacatgagtcatttcttccaacaaaagcgagaacgagaccccctatatattgctaattgtattactttgtgtagctagctagcttcttcctaacaacatacccttgaaaataatttaagtttctaaggacaattaatcaagtaccaatagataattgatgggcttatcaatgtataatatgttaactcaacgtccataatgggtcccttgtacaacttcgcatggttggaaaaactttcatctcatcttaatggagcagttgttttcatgtatgcccatctttaatttattatggattaagtttattacattccttgtcgtttgcaataagttaataactgtgtatagtattatcttttttgataatcaactgaatagtattatctagtctaaaacggttatcctttaatttaaatcatcatatttgtaacgataaaaggtaggtgagagactcacagagtgacccatatatcccattactattgcattctttcttctttttttcaggcaaaataaaagaaattcccttcatgaatgaaaacatgcagaaatatttggaaaattcttggtaggaaaaactttacataagagtacaaaaagaaaaggaacataatagtaaaaagaagtggtagatagctagtttgaacttgtgcattttaaatgcttgtctacttccatgtgagaatattaatatgattatggatttgaccaaagtggtaaggagtttaatttagttaattatatatatatatatagctttatcgatacatatgattctcgaaagatcacagtttctacttggggagtttattagagtctgtcacctggttctattttgcctaataatgtacttaaaaagcaactttggtgatattgttttgtaatatccgtttgtactgttgggaaacaactttttctccgaaaattttagtaactcctccttgttagattcttggtttttctgtcaaaatcatgaaaacttgagtatatataatttctcaggctaaggctttcattactctaatattggtcatttttctctggactgtatctcattagctagtagaataatggaaatctcaagggaaaaatgggaaagatgggaacttttgtggatgggattggttctcaagtgggaactttatatcattagcagccaatcaacattcaactatctgatcctttcacaaaatccccaacccaacaccacacactgtgagcaccatatgttcctttattacccctttgaaatccactaattccatttataccctttatttgttatcccactgtcctctcacagccggagaaaaagagagaggggtcattttggataattcatcaaccgttattcgtaacgtgaggtgttgtttaatgatgctgaagaaagatggataatttagttactaaaagaatgaccaaaaagttttgagcttcatttttttttatcctttttttccctcagtactggctatattattgcataatgttttagtttctgtttctgaatgaaaacttttgaaaaaaaggtccaaaagaaacaaaagagtaccctggattagacatacaattagtgttgcctcatcactaccttttgggacagcagcatctgaactgaagctctctctctctctctctctcattatttcactctgtagtttagtatatatgatgcagaaatgatcatgacaaaggactcttctgtcactgccatggtagatcttgatcaggagcaacctgcacctattgatgtaaatatgacctccaaaaagaaggaacttctttccactgctctgaagagaaccagtgaatggtcttatttccattaatattcttttcttttatctatttagtttcccaactcttatttattcaattattatgtcatactactactcgtgctactatattggtgaccttttcttaccaagattgactttaaattttgcaggattttctctcaagagattcccagtgatgttactatcaaagttggagaagtttcattctcattacacaaggtattattcatctcaatttcaaacactaaattatgaatttgtatggtaaaagaatacaataactattcatatagaactaacatggctatactattgcacataaactattcatataagaattgagcagcaccaagtttttactcagttatcaattgtatgacaactataacttaattcattatctactgcatactttattggcagtttccattagtttcgaagagtggacatatacgaaaactggtatcggattctaatgatcctgatctttgtgtaatcgctcttgctgatgttcctggtggggcagaagcgtttgaacttgctgccaaattctgctatggaataaatttcgagataagcacagaaaatattgtcatgctgagatgtgtagcagagtatcttgggatgactgaggagtatgcagttggaaacttagttggaagaactgaagccttcttgagtgaagtggcactcaaaactcttgcaggagcagcctctattctacatatttcagaaaattttctaccaatagcagagaaagttaaattggtcagcaaatgcatagatgcaattgcctatatagcctgcaaagatagccaattctgtatgtccggaaggagcactgaaagtggaagtgagggtgtgatttcttccttagtttctggttcaaaaccagttgttgattggtgggctgaagatctgaccgttcttcgaatcgatatgttccaaagagttctagttgccatgatggcaagagggttcaagcaatacgctcttgggccaattcttatgctttatgctcaaaaatcactgagaggtttggtaagaactatgttgtttttcattgtttcaatcaatgttaagaactgaaagctaaaagtactcttttctggtgcaggaaatatttggtaagggaaggaagaaaatcgagccaagacaagaacatgagaagagagttgtgctagaaacaatagttagtcttctaccaaaggagaaaaatgctatgtcagttagttttctttcaatgctcctgcgagcagcgctctatctcgagacaacagttgcttgccgcctagatttggagaaaaggatgggaatgcagttggggcaggctgttttggatgatctcttaattccttcatattcattcactggtgacacattgtttgatgtggacagtgttcagaggatcatgacaaatttccttgattacgaaatgagtggtactcgttacgtgtttaatggagatgatgattatgtctcccctccacaaagtgagctcgaacgagttgggaagctaatggaaaactacctagctgaaatagcttctgatagaaacttacctgtttcaaaattcaacagtcttgctgaacttattccagagcaatcaagggtaaccgaagatgggatgtatagagccattgacatttatctaaaggtgaacacactcacccaactctttcttcagtttaacattcttaaaactccattaacacaatcagcattacatttatcatcaataacagttatgttcatttaaacaattatcacttatctcatgaaaatgttttgacgtgtgaattaatcaaagaatattagactcacatacattggtgaaacgagttgtgattttttttttccttttctgttaaactcacaaaacgataggctcatcctgctctaagtgacatggagaggaagaaggtatgcagcttgatggactgccagaagctgtctcgggaggcctgcgcccacgcggctcaaaatgataggctgccagtacaaactgtggtccaagtgctttactacgaacaacaaagattcagagaagtgatgaatggtagcctatcaggcaacgaatcacctgctattccttcagtgaagatgaacttatattccaatgacatgcacccgatttcagacgagctctccagcctgcgcagagaaaatgatgaactcaaattagaactagtgaaaatgaaaatgaagctaaaagaaattgaaagatcaaacacaggaaggtcaactgctgcgaatagtcctatcggaacaatcatgtcatcacctgctgataagcctcctcagccaagaaaatcattcatgaactcagtgtcaaagaaacttgggaggctttacccttttgtccgctcagatggaatgacaccttcatacaaaactcggacaaaaccagctaaagatcggcggcattcaatatcctgatgagccattgttttactttctgagctatgtcatacactgtaagaagttcagttttttctttgttgttttgtcttacaactcttgagaatgattactagctaagaatgtgtttttttttcttttcggttttcgtgattaattttacttctttcttttgtcctgttctgtatggaagattgttgtaaataataattatgtttttgtgtaagatgaagccatataatttaataatggggtggaagaatgtaaagtagagtggaatcattcaaagtattttgatttttgggactctgatgatgtttctaacatactagacaaaaaacaaatgctgacttcccttgttcttagtgccattctattaatcacacggattgacatcataatcaaggtgagtgaaacagaatccaatgcttggaatcactttttaattcggtaatttttattcatacctctctctcaacacatgtgtaaatgtaatgatagatccaactttgatgaaatcataacttttcgaatctatttttttttaaatccaaatagtttgtcctttgaataaacaggtagatggttttaaaaacaccttccatcttgatcagttaaaaaatgattaaattcaatttagaacctgtatgttctaagctgaataagtttactactactttttttttttggtgggggggcagaagaaggagcttgtgttgtggggtctgtatatgaattattgaatgctttaagataaagagcttttacgaaagtaagactcgcttgcgagacaggctaggagtgttgagcatgttaatgtcggggcatatcatcatggaatctaaaagatggctccttaaattatgagactctttcaaatgattttacataaataattaaattaaattatcctactttattataattgtttcttgatggactttgttcaaagctttttagaggtctttttctgctttaaattttattattgatatgatgttcttcttttgcttctctattgatgatgaaagtttatatctatatctatggataccaaaacacacacacacacatgatcacacttagaaacattatagatctgataagaaaaattaacacacaaatgaagaatatggctatatggttcaagagtcaatgtctcaactctcgaatcagctttaatatgataattttacatatagtcaaaatggaatctcagatcaaatctgcttttaagcttagtagcctgccactaactgatgaagcagcctgccacagacaccagactgaaaattggtcaaattttcagtactgtttcttatacacacacacacacaatatactagagcgaaattccaagaacaagactaaggtaaatacaataaattttataataaagaaacccatttggaaatacttctattcagaatctaatattttaaataatttttgtttctgtaaatataatttgctgtacaacattgaacagtcctccattggattttttattttttaaatgtaaattcatgagctgacaatagctagattagtgtccaatacagtgaatgtcccagttgtttagatttcattggattttattcttataattagtaattaaaaaaaatatatatgcaagaagaatatgtattagtaatcaaagagtcacgtttttagattagatggggactttgcataataatagcaagccaaggaaagacaagtgctaaattctttacatacaagactttccatcaccctattaggctattacaacattgaatttctgaaaaataaaactaattagaaaattccacccctaaaaaaaaatcaaatcagaaaattagccaaaaaaaaaaaaaaaacaggatggaaaatgaaaaaagaaaatctaaaaatatccaaatgaccaagaattacaaaatatattctcattcacaagtcatattcaagctcaaaacttgaaataaccaaggtggttggtgttttagtctctcccgtcgcaattcccctccgacgacgccatggtatccagacggcgtcgcatcagggacctgtcccctaccaccaccgctgtcgtttaactctactcttgtcgtttctctcgatctgttgttgtaatgatttcgagagttcatctggctggatccagttgaagaggaagagaaacttgggccggaatctgatgttttccggcttcgacttcgactataactggtgggcccaaggcccaagcccaaagtgagctcaatctcactctcgtctataatctccagattaacaacattattattgttgttattattattattgttgttactgtcagtattgttattattaatatcaccgtcgtctgagtcttctgcgatgttaattttattgaactggtcttcagttactgaaggctgctccaaatccagtatcataaattgtcgtctgttttgagattcaagctgattattgaaatgggtttctttcattctgctccgtccgatgtttttcatcaaaatcttctggatttggtataaacgatgaagttcatacacctaacaataattttgaataaaaaatactatataagttaatttcgaccccattaattagtatataatgtactgtatatatatatatataaaatacctgttctttaaaagtttcttcatgctttatcatagccatcttcatgaattccttgtcgtatggtttaaagaggggtttctccattgttgtgctttagatttcgaatctttatatatgtatatatggaggttgacctgtatatatatatataattatcttcttgaagaaaagctagtatgtgctcagaaatgcatatatatccggatctagctagtattaatgcccttttcacctctcacgcttctatacctgtcaaacgaggaaaagtagtaaacatttaaagcagactgaataataatatatatttataataatatcaatatcagcaccatcctcctcattcatggtatataataggtttatgagaatatttctttttaagaaaagaaagaagagtagtgaggttttcaaatacctaaatcaatatagagataacgaaaaacagtactgggtactacttttagcacaatttgtcggtttgttttgattgtcctccttcatgttaaagccattttgggccacaatataatagtttgatacaaaaaatatctccctggccccctatatacagttacaaaaaagtgggacaccatctccatcatcatagtagtataaatacctagctaactaaatatcatgtgcagcttcttaatttgttatat

SEQ ID NO: 15589 - DNA, 5057 bp, Cannabis sativa
tctcaattaaattatagagcacctgacataaaactaagtatgcgtgccttgcacgtaactttcttctagtaatattatatgtatcaatataaatttgactctgtataaaagtgtacacataaactatattaataattaacgtaaaaaatgaaaacattttaaatttgtaaacaagtgaataatttaaaggattttactgtcaaaatttgaacttaaaaaggttaagtcaaagtcgagtgatacttgagaagaactgaatttaggctaaaccgaggagaggagaggaacggagaagaggataacaaagtatagtgttgtacagttgagatttagagcgtttgtgtgggagtgagctatgagcttgtcactaatccaagcctattcttctgctgaagaagaagaagaagaagcacaaaatggcttaacccatcaaaaacaagacctccgttacaactcctcatccgacgacgacaacgacgacgaccacaatctcaacgatgttgacgaagatgatgaatctgccgcaatcaaccgttctattcgcgacagatccctttttgatctccctcaacccagtgtctccgggctcccttctgctttcgacgccttttctgaggtagattttgtttgccctagttagttacttgtttgtggagaaacagggaaagaaagaaagaaagaatatgggtctggttttttaatggagggtttttgttctttttgtgttttaatggaggttgcagggccgcctcagtttctaaacaactctgttgaagagtttggtgtagccaaggaagtggatcatcagcagtatgtgagacatggtagacgcaggaatcgtagagacaagaaagatttgcctgctggtaagtaatacttccttccttcttttgggttatggattttgtgagtttttatgttttatttttgaaaaaaggtacatacttgaaaatttgaaagttgaaggaatcagagaccttgatactagcaacattatatgctatgcttggaaattttgtgacataggatgggtaatgggttgtgttagtgtgtcatgagacattggatatgctgtaaatctatgaattccaaggaaatttctttggatgtgtgcagaatgttggtgattgtgtttatgttttcttctctctacatacataaacatatgatgcgggcatcgattcatagtccactcacttgaatctgaaacaaaactagtcgttgttgttgttggagtcttacaattctgaaagccttttcttttaatctagactacaaacaaagaacttgattgctaaaaagcttaggaaaaaaaaacagaaaaggaaaagaggagagcaagatgttggcacctaaagaatttaaattaaaacaaccagtcatatgaattaagtactgttggttatttattcgctcactagttttcgaagatgtgaaaggatacccataaaaacttaacttgaccatcttattttagaatcgaacaaccgccactgctatcgttggtgtagaagtgaatgattagatatgacactaggatgtgcaattttgaaagactttgcaaggttaggaagttgtgttacaagattttttttgactctcactgttatattggatcagtttttgttctggaacctgatttcttgtttttttttttctcttctgaacttgcttgcacattgcagcatatgtagtaaatttggttttacttttatttcttgttcctttcttcttttccccgagaaattagggctaggagtaactgcattgaactttgttttcttctgtggttattctttttaatttgttttgtcagcttcagtgttgagcagtgactataagatcctttgattgattagtgcctttcttaagtttttatttactaatgaaaactattcgaacatctttactcggatttataggtgtggtagtggaagctaaacctcaacttgtgggaatccatgagcgagtaagaagtgatattgagggtaagcaacctccaccaacagtaccgggcacaacagagggaggcaagcgtgtggcaactgcagccaatccaaatgcagaggatgctgcagaactgctaaggtaacattatgattttattttttgagttgtgtcccactcccccacctaattataaccatgctctctactaaagttcgacattttggaataggttatgaagttacttgttaggtactcaggttactttgattatacaaggctgtaatgactggttgatttatttgagtttctacaagccccgactgtagacatcataaattttgaatccttggttttttcctttcaattatttcctagtattttgcatcatggttgtgtggcatcctcatgggacaaaaaatcatgtgcatgtgctcgtaatcatagctgtttcattgatctctgtgatggactaaaattgagatgttttacaggatgtgtttacaatgtggtattccaaaaacctactctagcgctcgtggaatggtttgcccagtatgcggtgatcgccctccagctgaaccgggcacagagaccaagaagaaggttaatatggtcaaagataaagagaagaataagaggatgaagggtcaatcatctcacgctacttggaaaagcgaaaccgaaatgcatcttcggcagcagttcgattagcatcaactattaggtttattaactgggattgatgtaatttgttttagtaacattaggactgtacaattcacactcatcgttaattgttcacaggagttactgcagtttgattatcacgtccaaagtaaatcagggctattgtggttgagattccacatgaggtctacattgatggatggccatgtttcatctgaccgtggcaaagctcatgttttgattttgtgttactatttattaccttaaagaaagttcactaccattagtgcctttgaattacaaacaccaaatttttacatgaagaaaaattaaaattaatggttgttggagttttcccaactcaactaaaatatgaagtggtggtatctcaatagctcatttccaatttagaattattaccgataaaatgcaatgttcttaattttaagtttgcgatcttgataagctaaaaacctaaaaattctacctaaacagctttcatctcagaagggtcttatcttttatctatgactatctaggcaaaggggatgaactagagtggaacaatttagtgagaaaactggaaaaatgattgccccattatcgaatgctggctaatgcccaattaagtcaagtacaacttaaagaatctgcgacaacaccgctttgaaacgattgaaatacttgagaaaagaaaagaagccatacatgtatatacataatgaacgagtatctcaatgtgttaattcaagctattgcaaaatcagtgtacactaaatgcatactatgaaatggagtcaaactgcatgctgcctgcacctccggtttctacactaccaagtcataacataagaggagaaatctaaataagttcggagtccgaatgtggacagaaagaataagagaactcaatccggttgaggaacaagatagacagatgccatcagattgtaaatgatcaacagttagcaattagcattatttacaagagagctaggcaacacaatctgataggattttcaaacttgaaacctttgacagttttaggttctattgccacccctgaaatagtacacgaacacgaatatcaatggagagccagttagaagccagcaagatatttaacttgaagtccctggtaaagaatttgttttgggcaaaagagcaaaaataaatgcttctgcaataaacactggccaccagtttcaagtattagacctgtatgcgaatatgcgagaattgatggcaaactcattctgcaatcaacttcattcaatgaattggatgattgagaaggtctgccaattggtgatgccatacaatgtttattgaacctgcagtagaagagagaaaatggatagcaaactaactctgcaactaaatcataaagcatggatgattgggaaattttacctttaccaccattaaagtctaattaaaactaaagaggtttgttgggtgagacttgaagtaaatatagacagtaattgtaagacctaatgagtccatttggcttaaacaagaaattgagttacaatgatctgtagtttatatatagataaagagcccaggagaatagatacaaacaaagtttagaaggtcaatatatccacaatcctaaattatcttggagccaagttagaatacacgtcaatatcaataaatgatgagaaggctaaaattgccagtaacaaatgagagtaattccaacatcagaaggaatagcatactctggactctgatggatagatcacagaacaaacaaacaacttttcataccactccggatacacaacgaaaaatactactaggaaaataaaacaggcaagatcaaacacatgggattgacctttcactaacattgggcctcagaaaacattatttatgggacattaaaagtacttcttaactaaatagttgtactgatgctaaccatggtttatctgtcatcatttatcagtgtctctttttcaccgtgagctgttgtttcttcctggaaaacctgcttctcagccatcattggaggactagaaacaggctcctgaatctgttaattaatatcagagaataagcaaaaaacatatgcagaagtcgtacattaaaatcaaaattctactacagaaataaaaaccttaccaaaacatgaggcctaagagatctttcattagaagggactctagctctagatgcatctgaaggtcggtgaaaaagcaagtgtgctattgaccggtctattggattcgtatcagtttcaatgtccataaatccagtggtgcacctggtagacaccattacaattagcaaaagatttcaagaatataatgttatatgtatatatatataaatatatacatatatatatagagctaaaccattcactaaaacaaataatactatacaactgataaaaacaggaagaa

SEQ ID NO: 15590 - DNA, 18361 bp, Cannabis sativa
  modified_base (18074)..(18089): a, c, t, g, unknown or other
tattattatttaaaaaaaaaaaagtgtatgacatttcaaaaacaatgaaaagtattataaaattaaaagtattacagtaattaaactaaaattataattaacaaaaaaaaaattgaattttattatgatttatttttataaataacacgtaaattaaatattttttaataaaaaataattttttattgaataacatccaaaaaaaactaattatacaactaaaaatatatataattaaaataaaaattaagaatataactaagtataagtacattgcacataatattaaactaatacatatgtgtatatatatttataattttaacatgttgattatttttaattaatttctaaaagtaaatgaatagagttaaaagacataaatatataaattaatatttatattttgatatattattaaaatgatgtgtttattataaattttaatacgaattttttaaaaaatatcaacatgtttaaattttgtttatgttaaaatatgttgattattattactattaatgtttataatattattattaatttaatatgtttattatgataatattttcaatataatgtgtttaatatttattgatatcgcttttagccaatgccattaaatcaattaaagtgataagaataactatattaataatttaagaacataaacgacatacgaaatttatagaggttcggccccttaatttggtaatagcctactctcctttttattgtattgcttatgaaagaatattaagatcacaaggtctcaccaagtaagtttttcaatatctctctaaaaggttacaagtatgttgcagagtgttttctctttgtaaagtgcataaaaagttggccccctcaatagtaaattagcctcactatttatatgggagaaggaatacatttagtctcaaaataataagagaaagatcggtgcagatttgaatatgaatcccacgattttcttatttagttcagtcaaatctcatgaaaatagaaattttatattggtcttaattttgtggaaacggttaagggaagtatactgaaatattttcaacgaattcctcaggttggacattcgcgttacgcagcttgcttgcatcgctcgacgcgaggtaagattttaagcgcgcttgggtgataatcactttgagcatttatacttcaatttaattcggcattgtcttgccttgtcggtacatcctggtgcaacactctgtccagtgtcaaactttcatgccacgtgtcatcttgccaagtgtcacattatccgtgcaaatttcgggataatattttctccccaagtccacgtgagaacttctggtcgtacgggtacttcctgaacttacacgttgcatggctaggtgacacgcatttgtacccacgtgcctgcatgatgggacgttattcctacccaaggtgtgcaaatctctgtctgtcctttcaaatttctacattaactgctttcccttggaaactgcactttggagattgtgcactgacagttacacagatccccgtataatggactcttcactttttgggaggggaggggaaatcaacattttaaatttaatgaccattatacccctcagtgacctcataaataagatcaaaaaaatactcatttgtaattttttagccatttgaagattttcggagcaaggagaaagagttgttcttgagtaatctacattgttcatctatgatcggatcgtttttgccaagaagttttagccaactaaaaaagcactgagtaagtaacttttccttgcacttttacaattccttgtttgttgctctatgaaccatactagaatgcatgcttgcttttatttactataaaaatttagattctcaaatttagttgattgaaactaatccaaatgttgactatcagggtcgattcgattcgtgctaagtctttacgtgtgttttttcttcatcctattctcttgcatctcttttttgaggttttagagttttttttattattattttgggttttcaaaaccctagaataatatttcaatgaaatggatatcgttggaaagataactaaaaattgataactttgtgtgaaattgtcttttttttattatttttatttatgtttgtaatttaaaataaacaaataataataatgataaaattattcatctttttaatttatatgtagacaatattatatgaaaataacaataagtaaatattataaaattccaaaatttattaatgtggatctcagtctcatacttgccattggaggatcttgactgagatagtaaacttaaagagttcacagtaaaatgaaattacaaaatcatcaaattaattattgctaatattatctactagtattatgaatacatgtaacttagattcgagttactagtgtagtaagacactttaatggaggtttctatacatacaagagaatgtagaattgaaccagtaattttgttaatactcatttaaatacttgatcatagtattaatggaacacaccaactgttccaattctctctctctctctctctatcttttttacacgctaacttttgttttagctttttatatataaatatatatatatatataataagtgtatattttatataattttttttctaacactttttcattctctcacaaaattttatttattattatttttttaaaaaaaatacaaacacttattatatttctttttcttttatttacatttttttattattcgcactcaaactatttcatattattttttttaattaatcacattttataaaaaaatcttaattaatttcttttaacctttaagtcttttactttcacattttttctcataatttttttaacagtctttctttatcctaaaaaaaaattgaaagcactcttcttatatctttctctcttttacatgattgataaaaaaaaagtgttttttttttatgttttgtagtttattcgaagttaatttatgaatgatttgtatattttaacaaggttggtgtcttgatatttttctattgatttataactgtctttttgttattttatagttgttttataatttttttaatgttgttatttatttgtttaatagttgcctttttgttatttttatgtgttttttttacaattgttgtttaatttatgtacatttttatggtatatatttttagtttattcaacacaattttttattgtatatatgtgtgtatttttttgttatttttatgttatttttaagtggttttcaaaatattttttgttcaatagatattttttgttgtttacttattcatgtgtatttttttatgatggataattttagtttcttcctaacaatttttctttggttgtatgtgtattttttgtagtttagatgtaatatttcagaaattataattatatttaactggacatattttatgattatatggatagtggagtaagattataatcttacttaagctaattatgagttgattagtgtaaaatttagtaaatgaataaaataaagcgtaattcattaattacgaaggttttatcggattatgggggtattataaataccattttcaaaataaaatattttcgggttcggtagctgtgaaaactcgacagagtggtcagaaatgtcacgacaatataagatgagttgtattggtttataccgaactagttaaaatatgttagatgtcggttaagtcgggaagcaaaacaaataaccaaagtacccctaggttttttattttagacttaagtgtttaaggaggggtaatttaatcttttcactaggttaaggttttatcttatatggatctattttctaagctgaagtagaatttataaaaagtttataattatttaatttaattgttaatataggaaataagagatagaatccaaattaagaaaaaaaatcatacaaaaaccttctagcactctcttacccttcgaaccctaggagcagttggtgaatcaagagaagtttcatcacgattcaagggattctagttggataaactagttttatgggcagtacaagtctaaatgtaagttctttactctttgattttctaaggtttgggtctgtgtgattgctggagtttagacatgtttttaggtttaaattgatgatggtttaagcttggattgaatggattttagggctgttaggtttgagttgggtaaattgagtttaagaactcaattttcattcaactatggtgttttggctgttttgatgaattgctaagtattgattgattgtacacattgtttttatgttgttgaattattctgagaagtttgaacatgtttgatggagttttggatcggttttggtgaagaaaaccagaattttcttacatgccaaaactggtcaaccggttctacaggtcactggtgaaccggtcgaccggttggctagcaggagaaaatcccaattttcttcgagtctggttttttgcttggggtgttttctaaaacctagtttagggtattttagagatgtctaagctatttttaagccagtaggggttatggttgtccgattatgaaattagggtttaatttggagttcgattaagttgttgatcaagttttgttgtcatgacataggacccgagattatcgagttttgttccactcaagtcggtgcgcacacctgattgttgaattgaggtaagaaagttaattgcaccgctaagcatgttaagtgaggaacaattatcatcgtttgtgactcgattatgatcgagataaagatacggtcattactgttattgagaatgggtaattacttgcctgaaactgtagataggtttcttacttatcggttgctttatcgggcaacaatagggacatatgtagctcgtgtgtgacgagtggtaaggatgctttatgaggcatcaagaacagtttgtcttattagacaaatagttattcatgtaatgcgtgattatgtactgtgtaaccatttattgtgaatgatggaattgtatgctatgcactcttatgatatctcgtgttatataatgtttgttctttatttgctttcttgcagagtcattgtgactcatggatgcttcgtggtgcaggtaaagggaaggagaaagtggaccaactataagttagaggtctcttggcgatgtacatatcaactgcgatgtctcggcttctagtggacagggtctacccttttgattatgtttgtaaatataaccctattttgtaatactggtcttgagacattttgtaaaagttcataaacaagggatccccaaacctagcagtattttgattatgaaatcaaattttagtttaatctaaaagttttaattacgccacacttttcttaaactaataggttaatgataaaattatttataaaagcacacacatggcgtccttgtgggacaggactttatattagatatatatatttaatttattttttgacacatattattaaaatacaatgattagatttttttgatttattttttaattaacacaatgtgctatggtaaatattaacatattaattatatattacccattatattatatacctcatcttaaaatcatatggtttattatttttattattaatgtaattattttatttaatttttaaaaataaattatcattttaactgtcactaacttaaaaaaaaatttaagtacgaaattataacaacaatttctatgaaaaaaaaataatgtagtagtaaaaaaaaaagataaattaatttatcaaaactaaataaaaaaatcgtaatacaaaaacatattgaagaattaatattattttgcatattacaattaggttattgttttgttatttttcgttactttgtagttattatttaattattttagagttgttttcatgttattttagagttattttttttattttattaaaatataatatttttttaattttaaaactttaacacaatatttttttttaaatttattagagtataaaatgtgaaaaaaaaaaaaaaaacttattttgtgacagtaaaaatataaaaatgactccaaaaaaaaatatattcttataacaatccaatttatttttagattagtgttaatttttttacatatatcttgttgtgacagtctgacaaactgctaagcgttagaaaacaaactgcattgaatttacgaaactgtcccttctgcttccacgccgaaaaaatgattaaagagaaatagtatgattatcggacaaactggccgaaagcaaggataaattggtaattgcgttaacatattgaaatcccctcttcgagaaagggaattttttctgtttacaccttcgccaacgggtattggagactcttattgtgactgagtaactataaatacggattctcaaccgtagaagacattggtcattggactctctctctataaaggtcgcaccagctaacttttgctttgcttactttctctctctagttcttcttcttcttcttcttctacttttcaacgccattgatgaccggagcgggagcttcatcaacgaagaggagaatgaggaatcgtttagggcttttcctttctatttttgtatttcaggcatgctttttctgttttccctcaccatcaccattattccatttctttctctctgtagctagttattactggcttcattttttaaaaaaagagttctctaaattcagtttcagagaggataaaactgaagatatttttttctgaaagaaaatatatcgaaatcttatttgtttaataaagaatctttattctggatctttcttctaagtaaattgtactgaattgttgaatatttatataaacaggtcttatatattgaaagttcagcaaacgccgagaggtcagaaatgcggttacttttgacacctaatgctgttacagggtaactccttcctttaatttcatttcctttctgctctctgacttgatttatcgctcactattttgtttcttcgctttattagttgattatattcagtattaaagaaaatatgactgaaaaaagctttttgtttcagtatattcccttctttgatgaaaattaatttagtattgtggaaaaaattatcttaatctgattattattattattttaattattttttaacgttgccgtttagagagaggcattcagaagggtattgtgctatgtatgacatttgtggaaaacgtagtgatggcaaagtattaaattgtcctcgtggttccccatctgtcaaggtatttatttatacatatattttgtagaaatatatatctatatatttgtatatgcataaatatatatttttttactattaattaaaatggttaaaagttttacttatcaatatttttaatattacagccagatgatttgctctcgtccaagatccaaagcttatgtcctaccattactggtaatgtttgttgtacagaatctcagtttgacaccttacggactcaagttcagcaggtaagattcattctctcatctattcaaaattaatactaatattgtattgttacttaataatgagttctttcttttgtgtattttattttgttgtgtgatttgtatatatgatcatatgtatgcataatgtatcgtacaggcgattccttttcttgttggttgtccagcatgcttgagaaactttctgaatttgttctgtgagctcacctgctctccaaatcaaagtctatttatcaatgttacttctatatccaaggtctgcagtttcttcctgtctttaatacattttattattgcttttataatgtttttgaaccagcttcatgcatgcaaacctgcagtcttttgtttaatttcttttattattattggcaaatccttctgaaatcccaaagaacattttcgataacattaataagagttttagtgaacatactttttaagttctactacgaatattaaaattagtttttttttcccattttcaggctagtaacaatttgaccgtggatgggattgatttttatataactgatgcttttggtgaagggttgtatgaatcctgcaaagatgtgaagtttggtaccatgaattctcgtgctctagagtttataggcgctggagctcaaaattttataggtaaactctgacccttttgaagattacttgctagaactgcatccccgcaaataagtttatcttttttcgctctcttctagtgccatattcagtctctttatcttctatgatgtttcaaaattaaaatttgtattgaaaggggtaaagccagttgctaaagtaccttcataagtatttttgtaacttacctgtgctgccaaagttaatattgtatatggtctcaaattgggatgactttttggaaggcatcttttgatggacgattcttttagtttgtgacagctttaagctattctcctttggtctttgcagtattgagtttgagtcctttttttttttaatacttaacctatgatattttcagagtggttcgcttttatcggtagacgagcacctgctaatgtaccaggttcaccgtatgccatagcatttcagtcaaatatttctgagtcatctggaatgaaacctatgaatgtatctacttattcgtgtggtgatatatcactgggatgttcatgtggtgattgtcctgcatctccagtctgttctaattcagctcctcctccttcccataaagaaggctcctgttcagtgcaacttggatctgtcaaagtgaatatatctcctctaccttcatatttgaaaaactcttgtagttacgttagtttgcacaccactgatacagtttttttaatttttttcctatgatgcaggccaagtgtattgacattgctgtagctatcttatatataattctagtttctgcatttctgggatggcgcttgttttatttgaatggacaaaagaaccctgcctctagaactaaaccactgtggaatactatggaaggtggtgaactccattctgtaaaccgacagaaggaagagaatccatcgattcaggtgcacatactgatatttcttctccattttttgtgtactttgtttagatagagtttcgcttacttattacttgtttgtcctgtttctctctgtatagtataatctaaccaatggaatttttttaattagatgcttgaagatgcttctcaaagtagaaatggagtgcaactttctctcgttcaaggttacatgtccaattttttcaggtcactgtctctgtcatcattcaatcataatgatttctatatgcccagcttttgaatgaattcacaagaatgattttggatgacttctaacaccatatttccaggttgtacggaacatgggttgcaaaaaatccaatcatagttttgtgctcatctttggcaatagttcttgttctctgtttgggtctagttcgtttcaaggtggagacacgtcctgaaaaggtttgttgtagtaccagtagctttattttctatgcactttttcaatatcaaataatattcatgtagcacttgatagatagagacttaacttaaatgacattattggagtttgagaatcacttatgtagtaacacatttcgatagttgcttatgcttatattgacaaggcttctgaggtctcctgcttaatcttattcctcatgtatatgggctattatattttaacttgacaaatttgtgcatgtacttgttgtactaaaccttatataatattggttaatgtattttttcatgccttttcaacattgctgtattttctgtttcagctgtgggtagggccagggagtaaagcagctgaggagaagcagttttttgataaccatctagctcctttttaccgaatcgaacaggttctagaaagcaatctttttatgtgtttcattaagttggttgcttaatattatacactgccacatcctcaagaagcaagaaattgtaattttccatgatcttaacactttatgttctttctcagcttatattagcaactattcctgatgctgatggcaagtcgccaagtattgtgactgaggcaaacatcaacttactttttgaaattcagaagaaggtatgtgtttatccacctagtatgatatcttacgtaatctatttttcatggtttttagctggcaaattttatagattagttgtatgccaggtagatggactccgtgctaatttttctggatcaccagtatctcttgctgatatttgcatgaagccactggaccaagattgtgctactcaaagtgtgctacaggtagaatttttgcttggcttatttgaaatttgattttgaattctaggttagataaaagtcagaaatgctatatttatttctaaaaagaaaaaatcatttttatgctgttctttttctctctcataattaataaatttccccttataattcttggtgacagtatttcaaaatggatcctgacaattatgacaattttggtggagttgagcacctcaaatactgctttgaggtactttctactttctaccatctccatgtacatgacgtgtattgagatatgatggacattttttgttttaacttttggatacatcaaaatgtttttctttcttccaaataagttgcaaaattctggaataatcattgatacagaagtttaattctatttaaagcatttcggatttgttgaaggctttactagtttcccagcaagagtatgctgatgctccttgactggcatatctaattttatttgtttaatgtttttcagcactactcctctgctgataaatgtatgagtgcatttaaagcaccactcgatcctagcactgcattaggaggtttttcaggaagcaactattccgaggtaatttttttcctgcttgtttactttttaagattttttaagcttttaagtggtaagacatccccaagtacttggaaaagaagaacactggcacattgagttatgaaatcatctagttttttatataattttttcttgctttaagtcgtgaatgatcattttcatttttaatttatgacaggcttcagcatttatggtaacataccctgtaaacaatgctgtggataaaagagggaatttatctgaaaaggcagtagcatgggaaaaggcttatatccagatggcaaaggtttgttattttccttcagtcattccatttgttgaattattttcacaatgttgaatttcatacaaaatatgtagcattctttatcgatccatatattatttataaattctacaattgcaaattagcttagtctggtcttctattataaattgctctacacctgaaatggcctatatttgtggcaccagtcatttgtcttttataagaaggtggcaccttttcagaattttcatttcacttattatctatcttgtctatgataggatgaattgctgcaaatggtgcaatctaaaaatttaacgctgtccttttcatcggaaagttcaattgaagaggaactgaaaagagagagcaccacagatgccatcactattgtggtgagtgttttttctgcattttatgctaaatttattgtcttgtaacatgatgttgttttattggaatgtacttttcaagtaatttctattccttgatgctgccttttattgctatagataagctaccttgtgatgttcgcttatatttctcttactttgggtgacactcctcgactatcttctttttacatttcctccaaggtatgctagtcacattcataaaaccatagttcaactttgatctttccttttagtaaacaactcattctattggttaattttacggtaaattgttgctataaaattgcgagattatggcaggtgttgcttggtctctctggagttgtgcttgtcatgctttctgttcttggatcagttggatttttcagtgctattggagtaaaatctactctcatcattatggaagttatcccatttcttgttctagctgtaagttgttttcatggtatcaaattagattcttgtgaatcttttaatagttttctgatgtactgtgtgtatatgtgtttcttttgtttttttcttgcttctggattcatatcctacttgattcacaaagtaaatatcattttttcaaaaataaatccatagggcaagtacctctatgtcatgagaagttgtataatttactttatttgtgtctttgtttatggagcttgtgaactaaatatgattgtttttgagctttcagtgattttaaacatttttaccttatcacctgttcagaaatacccattttctttgtaatctattctattctagcctgtaatattttgaacttgatctccgtaacaggttggagtcgataatatgtgtatattggtacatgcggttaaacgtcaacctttggagttgcctttagaagagagaataagcaatgcacttgtggaagttgggccatccataacactggctagcgtagcagaggttttagcatttgctgttggaagtttcattcctatgccagcatgccgtgtgttctccatgtttgcaggtccgaactgtcacttttaaacaaataaaagtgacattatttgtcttcatgacgaaactgacattatttggttgttctttttgcagcattagcagttcttctggattttcttttgcaagttactgcatttgttgctttgatagctttcgactttttgcgaactgaggataagagagttgattgcttcccatgtatgaaagtggcatcatatgccaatgctgacaaaggtatcataaaatgcttcctcctcttcttcttccttctaacactttaggacagtatatccttttttagcttttcctttctgttgtcttctcagatttatatgatatctgattcaaaaatgccttctggaatttaggtattggtcagagaaaatcgggtttgctggctcgttatatgaaggtgcttactctaataagtactataaagttggttgaatttccaatatatttatgctgtatctttattgctttctttacccaatgttaagattcgttttatttgacgatcaacaaaccgattagcacatgttgttgctaggctttctaggtctttactgatcgtagcatttgtgtgactaacgctccagctattttgctggatattttatatttcgaattctgaatttaatgaagtttatttcataaaaaaaattgacttttaaatgtttcttctattcacttatggatcacacattattacatatggtaaaatgtacaagataataatttacgtgccttttataacagttccacaattactgtcgtttgttaatttcattttcaatcttgctgtgctgcatttgctttttcaggagatccatgcacctattctgagtctttggggagtcaagatagttgtcatttccatttttgttgggtttacactggctagcatagtgagttattctgtattttgctcatatcttcttgcttttatggatgctattttttgtgtttgttctgcttctcaacttgttcttttccttaactacaggcattatgcacaaggattgaacctggtttggaacaaacagttgttcttccccaagattcttaccttcaggtctagctcagggccattatgtcaattagcagcttattgttcaatgtcataatgccttattctattacttgcagggttatttcaataatgtttcagaatatctcagaattggacctcctctgtattttgttgtgaagaattataactacaggtaatcaatttttgtcttgacctttttggcgtttacaatgcttcagatagctttatctcaccaattcattaaattgtgaatcaagttatttttaaaaaatgagaaaatatttaccctgttagtagttgacaaagctctaccaaaatacagctcattagtacttttactatggacacagtcataattttaagcatccgaaattcatgcaatataatcaaacaatgatgacagcctttgtagaaagtatcaatatacatctagtaccaagaaaccataacttcagcatcgttcttttttctttctggaatttaatttggtaggctttggatgaactttggcatggatagacttcctacagataaccacatagactgttattaactatggttattagaatatatgtaaagatcatgactattacgaaatggagggatgtcgctatctctccgtagtggtattttcatgctgaaaggttcttttcttttgcttttctttttcagtgcagaatcaagacatacaaatcagctatgctctattagtaaatgtgattcagactcccttttgaatgaggtacaaccttttcttggtgtctttttgtcattgcttacgtatatccttcatctcagtgtatttttatttagcaaacatcaatatagtatttggtgagcatcaatagtttttgggtaattggttgaaatatactctttataatgtcactttattcaattctatttttgatatatcccgagtacgtggctgatgttaaagattcaaaactcattaaaatttatgcgaaatgctttccaaaaatgacaaatgactttaatttggttaagcattctttatcttttcttcttagttgatattatgtcaggtaaatgatttttgttttgcttgtgtagattgcaaaagcatcatcaactccagaagcaagttacattgctaagccagctgcttcatggcttgatgattttcttgtgtggatatccccagaagcatttggatgctgtcggaagtttaccaacagtacttactgtccccccgatgatcaggtcattaacaaagctttaccttttttctagtctcgcgatcttcctttcattttatgttaatccctttcatactgattcaaattatttgattcagcctccttgctgttcttccaatggaggactttgtagcctgggaggggtatgcaaagattgtacaacggtaagatttatatttaatcctgccaatcacttttagatacatgtgtttcttctcacaactgatttttgccaatccagtgcttccgccattcggatctgcagaacgatcgtccatctaccacacaattcaaggagaaacttccatggttcctagatgctctaccatctgctgcctgtgctaaaggtggccatggggcttacactaccagtgtggaactgaaaggttagtaggattattgggtacttcattatttttggacgcagcaaaatattattgaattatttaattcaaattcagaatatttataattgaattattccttctggtcaatcagattatgatactggtataattcaagcatcatcattccgtacatatcatacacctttgaacaagcaggtgtgctcttaattaggattttatatactgttcctttctgtcacgatatcaaaggaagactgattgtatacaatgattttatttgaagagtgactacgtaaattcattgagggctgcacgagacttcagctcaagagtttccgattctctaaaggtattctgacaatcttcttggccttgctggctctaatatacataatttgactgaaaaagttttttttttttcttttccagtacaagagtgttaccaccaccccttcccacaagtgacgattatcgttcttgtaatttatattgtgaaactgattgtttcttaatttgtgcagatagagatatttccatattcggtgttttatatgtttttcgagcaataccttgatatttggaaaaccgcattaatcaacctttcaatagctattggttagtactttaagaaactcaattagcatagtgtcatgtataggccactgtttagctttagcttgttatttttagattagtttccagggattgattcacttctgctgctttttggagacatatggcagattatataaaagataattgttaattgatttatttctgtaattgctactattgttatgtaggtggataggcataacaagaatgcatgtttacattttattaattgttaattaattttttgtttttatacccatgattcaacaggtgcggtatttatcgtttgcttagtaattacatgcaggtcagtatgtttattactttagctttttagtacgtacggtaaccctgtttcccttttaattaataaatttattttcctgactggatttctggttccatttggttaatagtttctggagttcagcaatcatcttattggtgttagtaatgattgttgtggatctcatggtatattaattctctcccaaatcattttttctttttaagtagcctgaaatcagctttttatatctcctgacgatgcaatgatctgcagggtgtaatggcgattcttgggatccaattaaatgcaatctctgttgtgaatcttgtaatgtcagttgggattgcggttgagttttgtgttcacatgacccatgcattctcggtcagtatcattcatatttactaacgccacttttataaagataaagaaggatttgattaatttgtccatcgtttcggtcggtaattctttataatatcataatatatataacaggtaagcaatggagataataatcaacgtattaaggaggctcttggtacaatgggagcctctgttctcaggtacattttcaacctaagcctaaaactgcacttgaatactttacactctaggtttacaccaataccatcatgctaaagatatatgtgtaaatcctttacaacccaaaactccaaccaatcaaagtaaacacaattatttataatagtttgtactcatcaacgaactcaatccactatgaagaagtcagaatttcaatattagaaacaaagaacctcacaccacacttgtactctcagcaatataaaaaacaagttctctcacaagtacagtagctatgtaatgcgcacaattcgcactgtcttgctctctctgtgtaactcgaaatggtctaaagacaaaatgaacgttaatgtctcctgagaggacttcagttgacggtatataatgagagtattttttgtgttttgatatgtgatacagtggaataacattaacaaagcttgttggggtcattgttctttgcttttcaaggaccgaagtttttgtggtacttaaatctctcttgctcttatttatccacattacacttcacaaggattaattgaccatgtctgtctatgaatatattttatgtatgtataaattgcaggtatattactttcaaatgtatcttgctttggttcttcttggcttcttacatggccttgtatttctaccggtaagctcataaaaagggagttattattaatcatagcatttatctaattaccaaaatccgtttttctatagaactaattatcttatatttatgtgtgtttatacaggtaattctaagcatatgtggtccaccttcaagatgtatgataattgagccacaagaagttcgacactctacagcctcatcacaacaacaataagatgaaagatcttttaatttctccttttttttttgtaggttaaatgaaattttcttttatttgaatagcgtgtaaatgttttactcatgataaaaagtaaatcaaatagaagagtgggggaaaacgttaattttattattatattttcctggttgtctataactctacacttggctaatagcccaaacttttattacccctatattttttacgtttaaaaagaaggaaaagaaaaagataactattttggatcatgtttatgcgagtcaaatcttctcttgaaggattgtgattcaattactgattgagccgatcttaggccaaggacctattcatcttggaggctaaatatacatattttatgggatattggcagttaaattatttgaactttaaatttgttaacacttaatcataaaatttgattttttgaaggtaaaattacctaaatttccattctgttttattctgcacctctctatctaaaaatcacagtgtacacatgacaaatttttattggtccacttaatattaattttaaaaaatannnnnnnnnnnnnnnnaaattaaaaaaattaaaaaatatttttttttctttttcttcttgtttcttcttcttctttctttcttaaactttctgtaaccccaatctctcagccctccctcctaggccctctctttctctctctctctctctctcccgtttcaccaaccaatacctcgccggagttgaagcacccaagccctcgctagagcaattttccctctctttctctctttcgatcttctccttcctagaccctctctttctctttctcgtctcttctctctctct

SEQ ID NO: 15591 - DNA, 10369 bp, Cannabis sativa
  modified_base (102)..(127): a, c, t, g, unknown or other
aaaaaataattgttagaaacttaccataaaaggttattagattattaccttattaattttgtttagttcccatcaattggtattacccattaagaagtgttnnnnnnnnnnnnnnnnnnnnnnnnnnatatatatatattatgttatatttgtttgacataatatttttgttatattagatgtgattatataataaaaaaatatatatatttttaaatattataatttaagtttatatttattatacatatttctcttattttctatctcacattattaaatgtgtctatataacataatttttttaatattacaatttaaatttaaatatattacacatatttaaaaattatttttctattattattttcttaccaaaaaaatatatttatataattaattagaaaaatatataatatttcataaacaataaaatgtattataaaattaaaagtattacattatttaaactaacattataattaacaacaaattttgaattgtatgatgttttgtttttataaataacactaaatatttttaataaaaaataattttatttattaaaaaaataataaaaaaatctaattatacatctaaaaatatacataattaaaataaaaaacaaagaatataattaagtatacatacattgcacgtaatattaacctaatcttacattaaatgtgcatatttaacagaatttgttggtttaacaatttttcttttatttttcctataaaattaacggttaaaagttaaactaacactattaaatcaataaattaattattttttttttttttaaaaaaaaatagttataaatatttaattttaatttaaaagtattaacaaaattagataatttttatataaaaatcttaatttaaaggttaattaggatttttttaccccttaaacttttatgcctgttaaaaattctccctaaactattaaaattgttagatttaaggacttttgtccaagttcattcaattttactaattcagtgattgtttatgtacaaactcatgctcccaaggtattgatatttacgaaatcatgcctctcaaactttgacatgtactaaattatgctccctcatcttccattcatgttaggcatttcttactaaaattgaataaaaattcttaaatccaacaatttcaataattcagggaaaatttttaacaaccttaaaagttcaaggcgcgtgatttaatacatgtcaaatcgggggacaaaaattctaattagcttaatttaaatttaaatttaaattagacgttaattaaattaattaatatcatattttataacaaatttataagttatattatttaaaatatctaaacttatttacttattttattatttaataaaattagttagatatatttttttataaataaatataaaattagataaattttacatatttttaaaaaatataattaaattgtattagatttaattttattattattatttaaattaataattaataacaactctaatacagtatatatattgcattattaaaaaatagtgtatatatatataggtgttagtaataaggaattgttttgttgtatataatcaaattcgtgcatatgaggattccattagaccttcaaaaagctcttaagttgaattttgatgaaagtgagagatagggtttaccctatctacttgttgttattgttgttgttggtattgtggggtaagttgagagagtcttttcatgagagagaaagagagagaaaagagagaagtatacttaattaaaacacgagtgagaaattaaaataagtatagtatatatactactactatgctagtactactgtggattgaagtaacagctagtgagtgagaattgagaaatggtgggtgttattattattattagatatgtatatgtatatattctcttgcttttgcagcaaaagaaaaggctagggatgggttatatatattcatgagtggacaattttattcatttactcattttcttttcttttctttctttgtgtgttgtgtttgtattggaatttgatttggcaggatttgagaggtgttaattaatttggatctagctaatatatacatatatatatatatataaatagttacacatcatttcctttcattcttttcttgatcccctctcaaagttttcaactcctattgacatggatggaagttttgatatgttgttccctcaccactcattgctctttagactcttttttttttttttcctttcaattttacttatttgttatatcatgaagaaaaaagatttagtaaacttctcaagggtggtttagatacattattttttatttattttagcttccttaaaaaagttttttagtccaatttttttgtatagaacataaatttttaatttttttttaaaaagttcatataacttcttaccaccagtataagaaaaaaaaatttataaatgcaacaaaatatttcaactttattttttgatactgtaaactatttagaattttctgaaaatttatggataattttaaataactataatatcttatgttatttataaataaataaataatataatattaagattaagttgtgataaattatattattgagaaaatttattaagtgtataagttacattttatgaaatgaagtgtatttgtaacttaaaaagagttacaagcttaattacacgtgcaagttgtaacttaagaaagttcaaatctgaatatagatttgtaactcatgaatcaaagttttaaaatataattaaggatataattacatttaagagtcatgaagatgtgtaaaatgagtttccagttagaaatggaaatattcaacattaattttacacaagaacgttggatttggagacatctctttgaggagaatcaattctccaaattggatttggaaatgagttttaggcaacatgtcgcctattgcatgcatatagttcatttcatcgtgtaacgatgtatctcgagggttcaaatgtattacttcgggcgatatgtcatctggtgccaggccacatatcgcttggagccctttcctaagataaacgttacaaaacgttatgcattcaataggagatgtttgctacttcttagcctgatccctaaagttcctctacacgagtggtaactgtcattagcgagtgagatttgaatttcaaacttggttattcctaaatactatatataggaccctttggttcatccatttcacaagacactcttctatctttcaaacacttaagctagagagtttgaggcttcataattctcagaaaatatctccactaaaaattctaagtgttctataaagggaaaaataatatgcatgtttgtctgctttgctgttttttttatatatacttttttgaatgacggccacggttgccgcctgtgtaacacctcctttagtggatgtctgatgatgtatttctctctttattattattatttgaggggggcaaagtcagagaatttttggctctcgttccccatgtgcccctttggcagtttaaaatttccctcgcacgtcttctattcttttatcttgatcttcccacaatgcttcgatattttgcacctgatgtctgtcattgcgaatcgtttgattcctttcaacattcatccagagggggcatctttccagcagttcgggaacccccattcccctttttgacctaaggtttgatgtgggggctcactggtggatttcttatctttcaaatgattgaagttcttcaagatcttcacgaccacaatttcttcgagttcgaccaggatattctcgagcttcaccaagcaaatctcatgtcgactcatgtcgcaactggctcaaagtcttccaagaaggggccaaagaagttggccaccttggaggaagttatgaagggtatggtcgcttacaagaaattttcttaccattccaatggttgggaggccgatgagctatattcgaaactaacttgcacccaccaattggagaagatagtgaccgtaaatgggattaagccatctagttctggagtttaccatcgtctaccgagggacgaggagatgccaaaccataattatcatggttttggagcctgtagccaaacccacctcatgtccggggctatggtacccctctaagattatttcattaattttttaatttttgtatgactttcaccataccagctgatacctcaagcctaccacctgttgtcaggcctttttattttttatgccgcgaggggttgggccgctcccagccccactaaaattttgtatttttacgaactactttctgtcctaaaaaagggtgacaaatttaaagacagtttttataagttgcaagctcacttggccaacaaaaccccaatacccttccattgtgaaaaaaatgttaaagaatactgtcataggtttttcttttcctccgagtttaaggctttcgagcgcctagacctgttgacggagtgggacaagatccctccaatgcatcgtaccgatcccacccagcttttcttaaaccacgcacaagtatttaccggctacaagaagaaagacttgaacgtgggggacttggtgacaaccgttaactgcgggagggccaagttgattttaaagagtcaatctatgaacaaatttaacctgtccaaagtcctttgtcccaatgcccaaaatcttgggaatgagaagacgcttagggccgatattatttcatttactggttaggccaaaattcccgtttctggttctaaactctgggggccccggtgcaagtacctctagagcttgtaagtctcctttgaatattcacttcgttccttctgtgacctgtccatgattattctaacttaagttcagtggaatttgacatgagattatataaattctggatgccccattcccgttgtggcgataatgcaaagagcttttatttctccaatttaagtcatttcctgggttggtcctggatgggctttggtcctccgatgccgattctcttggaccactcctcctacatgacctcgagttggtttctcccttcagataactttttaggggatgacgacaccaactctttaatttatgaatttgctaggatagaattagatcgacatggtagcattagcctcgctgtattatacttgcttttgtaattttttagtgctattctaactttctatttacttcggacagtaaaatccatagaggacttgcttgccattctgggccgcacataaagccctgagccggagatgccatagcttctttgagcaaatgtgactccgaggggaccaaccaaggaagtccctgggaactaagaggtggttctcattgaagaagaagaggaggaagtggttcctgcacttgaccagaaatagaagggtgttttctctgtgcctgagccttctaagaagcttaagcgagttgccacccctactcccagcactgaatctgggatcccagccgagggcgatgactttcctgcttcctcaggcattcatttaacccctgcccatcttgacgaggagagggtccagcttcagattgccaaacacaattatgtggtggatgaactgtctaagggcgatgctgaggctgaggccctgaagaagtggctaagggaggctcacgatgggcctttctaaggcgagtatactggggagatatgggacttgaaccttgatcccatgattgacaggtttaagcacttcctaagcccgaacttgacgttgttcgcctttgaattggtgatccactttactgctgacctgacccaacttccgacgaagagatacgcagcctgtgcttcctccaaccccatttatcaaatccaggatatgagtgttgccctaactgcagtaagtattttattccaaggcccttcttctttttaatcttacttttttaagacctaaccttatttgttgccagattgctgcgaaggccagtcgactttccaagacattaatcgatcaagggattaccatcttggagttgggtggcatggatggtatcatgagaaggctatcacggagtgggaccaagaggcactaaaggctaaagacgatattatcgcctcaagcaggaaggacctccgggacgctcaagaggaaatctaggaactgtccgtgaagctcaagtctctttaagagttacatcagactgacttggaaaccatcgccaacatctctgttgaacttcaagagttgagcaagttctgggagcagacccgaaaggaagctgccaaggctgcgaaggaggctttattagctccggtgacctgcaagcactgtgagaagcgcttcgaggacagagtttttatgtgctggaaattgaacaaatttgaacctcgcctccacttcctgcccgatccaaaggccactatgatctgattttgggagaataacaagaagttgaagcatgtcttggccgagcgaatgggtccccgtcttccaccttgagtcgtttgattagaccctaccttttttcttatttctcttacttctctccccctcaagacaatattttaatttttagtttttattatctttattttctatcaggggagacatctttatggccctaccccgggcttattagtcttattatgttttagacaacttatattttctatatgctttttttttgctttgcctgtctttgcgtgtgtgtatgcctcagtaccccctaagtgacttaaaaaagacattttgggtcacttagcttaaatttatgtgggataatgcatatactttgtttgtcgcaggctaacttacagagtaaagatgaatttaatactgagctcctaactattggtagtatttttggagatggtcaacactccatgctcaaggcactatggatccgtccattcactttagtttataggtctcagagtctgtttcatctttgactttatacgggccttcccaatttggtctaagtacccacactcctagttcttgggaggctggaaagacccttcttaggaccaagtcaccaatggaaaatttcctgtttttgactttggaattgaaatatttttccactttcttttggtacgttgccatgcgcatttgcgaatcctcccaaagctcgtccactaagtccagtgcttcttgtaacaaggcttgatttgttcctggatcgtatgttgttctcttatgggaggggatgaaagtctctactgggaccatggcttcgcacccatatacctttgagaatggggagtgcccggttgtagttattgcagtggtcttgtaggcccataatacgtgtggcaacccttcaggccaattgtttttgtaggccaagagttttttctttagggtgaccttaagtatcttcttgacggctttcgcctgtccatttgtctgtggcctcgcgaccgtagagaaactctttatgactccgtgttttttgaagaagtctgtgaattcgtcacaatcgaattgtttttcattgtccgagactatcttgtgaggcaacccatatcgacacataatgttctttacgacaaagtccaaggctttcttggcaattatagtcttcataggttcatgctctgtccatttcgtgtagtaatccaccaccactatcgcatatttaacgccattttttcctgtggtgagagacccaataaggtctattccccacaccgtgaagggccatgggctagtcattaaggtgattttgttaggcggggctcttgggatgtttgtaaatctttggcatggatcgtatttgaggatgtagtctatacagtctttcttcacggtgggccaacaatacccttgccttaataatttcttggaaaggctcgactctctggtaggatctccacagaatccttcatggacttcttgcacaatccgtctagcttcagaatccgacacacaccttaaatatgacatattgagccccctttgatagaggatatcgttgatcatcaagtatcggtgagcctggtgctgtacttttctagacatagccctttcttgaggcagctctcccgttgttatgtacttgatgatggggtccatcaaacttgacccttgctcattggtggccacttcctcttttggcctaatgttaggctccgtggggtattcaactggcactacccctagcttttctacctcgctgtttgatgctaacttatccagacaatctgcatgggcatttctttcttgtgggatccgctcaatcttatactccttgaattcttgtaacaattctctgacaacttatacgtaggtgaccatcttttccccctgggtttggtattctcctaacatcggattgacaattagttgtgagtcactgtatacatctaccctgttggctcctacaactttagccaattttaatcctactattagggcttcatactcaacctcgttattagaagccagaaacataaacctcagagcgacatggagtcttaatccgtcaggtgatatcattcctattccagcccctgatccattctcatttgagtttaacatatactttgcacgtaggcatatccgaagctggcacattggcgttagcctcagtttcattgcattctacaataaaatatgcgactgcttggcctttaatcaagatgtagggaatgtattgtatgtaaaattgacttgactccatggcccacttaaggagtctccttgaggcttcaggtttatacaagacttgctaaagcaggtggtttgtaaatactttgatggagtgcgcttgaaagtatggcctcagctttcttgatgcaatgaagagaaagaaggctagttttctgatcacatggtaccgaatttctatccctatcatgcatttactgatgtgatagaccaggtgctgaatctttccttgttcccggaccaatgttgcgttgaccacattctcagagacggctatatataaatataagtcttctccgtgaatgggctttgacaacattggtggtagggccatgtgctcttttagcttcttaaatgcctccttagtcttcagtccattcaaacttttggcattttctcaagatgttgaagagcgggatacacttgtcagttgaacgggagatgaagcaactcagggtggctaccatcctggtcaagctttgtacatcttgtgtcttcttggggagggcatactcaacaaggcctgtatctttttcgagtttgcctttattctttgctggctcactatgaaccctagaaatttccctgatttaacgccaaaagtacacttcttaggattgagtttcatcccgtacttcctaactacttcaaaacactccataaggtcgtcaacatggcccatgcttgttttggatttaaccagcatgtcgtccatgtatacctccatataacgccccaagaggcctctgaacattaagttgaccatgtgttgatacgtggccctaacatttttcaatccgaaagacatgactagataacagtatacccccttgtcgattttgaagctggtacattcttggtttgcgacatccatcttgatttgattgtatcctgaatacacgtccattaaagacaatagtttgaactggaggtggcatctaccatctagtcgatcctgggcaatgggaagcaatcctttggacaggccttgttaaggtcggtgaagtccatgcatattcgccacatcccatttggtttgggcaccaaaaccgggttggctaaccagtccgcgtaatacacgtcgtggataaagatgtttgacagcatcttatccacttatttctccagggcatcaacctttattggatatagcggacgcctttatcgttgcattgggggcatgtccaggttaacattcaggacgtgagtaattacgtggggacttatcccagtcatgtccccatgacaccatgcaaacacgtctgctgatgcctttatggtctcaataatcttgctctgttcttccgggtcgaggctctttcctaggcagataactttagatggatcttgatagcatactcttaccttttcaatatccttcactagctctaatgctgcttcagaaccaatgcgagggtccaactcgtattgccccgccgattatgtcggtttagtcccttggattgccaagatggataggtgcactacaacgttataacactatctcgcctctccttggttaccccgaaccatccatattcctgcttcttgggtaggaaacttcaggcacaagtgttggattgacatgattgcttggtctagtgtggcccgaacatgtacatacatcgcttagctctcacactcatggttgatcagagatagatttacccttttctggacagtagagcacccgtgagc

SEQ ID NO: 15592 - DNA, 7801 bp, Cannabis sativa
tttgatctcgaaagcttttctaattggtaatatgacttgcaggtagccctcgtgttgagggtgatgaagaagaagatgatattgatgatattgacaatgaatttgagtatggaaactatgatgccttcccacatcaagtcactgaaggagtgcccccttctcgctatggttcacaatatcattcttctgcaatcccggaacgtgaatcctctccccctggttctgaaatccctctcttgacctatggcgaggaggtaagttgatatctaatttatttttgtagtattgccaatacaagtgagttgcattgctattagctccttacattgtgcctcttatatcctttcaggattccgagatttcttctgatcggcatgctctaattgtaccaccatttatgggtcatggaaacagagtccatccaatgccttattctgattcatccacaccttgtaagtcaaattctgtttggtacatattgacttcaacaatatttcaaaataggttttttgttttaagcatcagtattagattattaataagtgcaatattgcagtgcaacccagaccgatggttccaaagaaagatattgcagtatatggatatggaagtgtagcctggaaagatcggatggaagattggaaaaagaagcagaatgataagcttcaagtagtaaagcatcacggaggcaatggtggtggagactttggagatgagctagatgatccagagttaccaatgtgagtgcttccataaaactttgcttgcaacctatctcattgtatactttattcttttgtttatttaaccaatttttcattaatgtaattaggatggatgaaggcagacagccactgtcaaggaagaagccaatctcttctagcaagataagcccgtacagattgctcatagttctccgtcttgcaatccttggcctattttttcattatagacttctacatcctgttaatgatgcatatggcctatggttgacatcagttatttgtgaaatatggtttggtgtttcatggattcttgatcaatttcccaaatggtatcctatacatcgagaaacataccttgatcgtttatcactaaggtaaatattatcttagccttgtctagtgctgttgatggatgtacttacaattttaatctctttctggattaaatttatcattttccatgaagttcaaggattttttttttttaaaatgtctgaccatttacttctgatacttgcagatatgaaaaagaaggaaagccatctgagttggctaatatagatgtatttgttagtacggtggaccctctgaaagaacctcccctcatcactgcaaacacagttttatccattcttgctgttgattatccagttgataaggttgcatgctatgtctctgatgatggtgctgctatgcttacttttgaagcactctctgagacatcagaatttgctagaaaatgggttccattctgtaagaaatatagtattgaacctagggccccagaatggtatttctctcagaaaatggactatctgaaagataaagttcaaccagcatttgttagggaaagacgtgcaatgaaggtttgtggctttatttgatttccatgtaactgaattgatttgacttcattaacattttatatatcaaacttattatctgtctctcaacaattttccagccacagttttttggattagttgtaaaatgctgttgaattctccataaattgacagtatttttttttcttttctgtattggtttggcagagagattatgaagaatttaaagtcagaataaatgcattagtatccactgcacaaaaggttcctgaggatgggtggacaatgcaggatgggtctccatggcctgggaacaatgtgcgcgatcatcctggcatgattcaggtggggaaacttttcgtctattggatatttatcactttgtccttgtttattatagttttccaaggtacattcatcaatcaaataggcgggttcttataaatttgttagtatttttaagctgaagaaagagaagacagaattttatttttctgcaatgttttcctagtttgtgcctactaaatatcagttttgctgttttgttgcaaattaaatggcctatcattatgtcacatcagctggccctgttccatttcatactattgttatttttaagcattaatttaagaaagtgttcgtgtacaggtcttccttggtaataatggtgtccgtgatcttgaaggaaatgagttacctcgtttagtttatgtttctcgtgagaagagacctggctttgatcaccacaaaaaggctggtgccatgaatgctttggtaagctgaatttatatatttatgtatacagagaccatcaccttttttttttcctaaatattctgtcttatgctaacttgaatttattttgtagatgagagtttcagcagttatttcaaatgctccttacctactcaatgttgattgtgatcactacatcaacaacagcaaggcacttagagaagcaatgtgcttcatgatggaccctacatcaggaaagaaagtctgctatgtccaattccctcaaagatttgatgggattgatcgtcatgatagatactcaaatcggaatgtcgtgttctttgatgtatgtgggttactttagtgtaattcgtaatttgacttttttttacccatctttagtgttgtttaaacccttttttacccatctttagtgttgtttaaacccttttttaattctctaaacagatcaacatgaaaggattagatggtatacaaggaccaatatacgttggaactgggtgtgttttcagaaggcaagcactttatgggtacgatgcacctaccaaaaagaagcggccaagcaggacctgcaattgttggccaagatggtgttgcctgtgttttggttctagaaagaaaaagaacactaaaacaaagaaagagaaaaagaaaccaaaacatagggaagcatccaagcagattcatgcacttgaaaatattgaagagggaatcacaggtaaagattagcaagtttccgtaatgaagtatatatgtgtgcgtgtattatttttaattgaacacttgatctgataatacactgcattgttattgcagaattgaatcctgaaaaggcatccaatatgtcgcaagtgacattagagaagaagtttgggcagtctccagtgtttattgcatctgcaattctagagaatggtggagttcctcagaatgttagccctgcatctcttctaaaagaagcccttcaagtcatcagctgtggctacgaggataaaacagaatggggaaaagaagtaagtgaaattgtaatgtgtattatgaagttattttcactctcaagtcaccttattgacatctatcttaacttctaaattaaaacaggttggatggatatatggttcggttacagaggatattctgactggattcaaaatgcattgccatggctggcgatctgtatactgcatgcccaaaaggcccgcattcaagggttcagctcctattaacctctcagatcgtttgcaccaagttcttcgttgggcacttggatctgttgaaatcttcttgagtaaacattgtccaatttggtatggctatgggggtgggttaaaatggttggaacgcttctcttatataaactccgttgtatatccttggacctcccttcccttgcttgtctattgttctttgcctgccatctgtctactcactgggaaatttattgtccccgaggtaactcccccattatacttcctttcttcctcacttggtcaagatatttatttgtacattagcttgtgataaggttttgctagtatatacaaatatatgttactaaagtataaatcaagttctttcttgaaaactcaagtgtttgtgcatttgtgctgcatcttatcaattcaccctcgaagctggtgatggacaatatatgctacaatgtgttctaatatgtgctctttatacaaatgtgcagatcagcaactacgcaagtattcttttcatggctctcttcatatctatagcagcaactggtatccttgagatgcaatggggtggagtcaggattgatgattggtggagaaatgagcagttctgggttatcggaggtgtctcatcacatctcttcgctctttttcagggtctgctcaaagttttggctggtgtcaacacaaacttcacggtcacctcaaaggctgctgacgacggagagttctcagagctgtacattttcaagtggacatcactcttgatccctcccataaccctgttgataataaatctagttggtgttgtggttgggatttctgatgccatcaataatggttatgattcatggggtccactctttggtaggctattttttgctctctgggtcatcatccacttgtaccccttcctcaaaggtatgcttgggaaacaagacagaatacccacaattattgtggtctggtccattcttctggcctcaatcttaactctcatgtgggtgagaataaatccatttgtttcaaaagatggtcctgtcttagaaatctgtggtctaaactgtgattaggatacaacattaaaataaaaattaaagtttaggtttgttccggtctctgttcttcattcttgtgttgcagaagcgaatcgttcctcgatcaactttgagatgtttcactccattccagatgggagggactaagaaatttttgtggggtttaattatatataatataatatagtatgggggtgtagataaagcgggcttgggggagatgatatacattgctatttgttttatcaattcttttatttttgtttctgtggggtctttctagggttttgctttgttttgttgttagattctgtaatttaggacaaacattggattatttattattcccttttgtcttaagagaaagtaaagaaaaaaaaaaaacaggggctacactacatacgggtgtctcaagaaatcaaaaaaattggttcttgttcatcaatgtactggtatctacatacccacttattccaacttttttttgccatacatgtgttacttctaatttaagaaaattcaactgtggaatttcgttgtttcctttgctatctcgttgagatgaagattctaacctgaatatatttttgctcaagagaaatttttttattgcacacaaccaaaccttagaaacacactactaaaaagtagaaaacagaattacatcaaacgcatttttctctttgttactaggcatctagactttatcaacataattttggcctttgaagcccttttgatttggctatcaacaaactctactagcacttgctctcaaacacgcaagttcctactcaaccaaacccagttgacaaccgccgtgcctacagctgagatgataatacagaagtgcatcagctggtaatccagtccgagaaaccatgaactcactgcgctactctagtagagaactcacaatcaaggaataaatgattacgactccctttggttctcacaaaccggctcagcctcccataacataaatttgtgctttgggaaggaaagtctacaccaaaatattattacatgaaataaacaaaattctaaattttatatggaattaatacatgtagtagtaccacgagaacaataatacatattaataaacttaagagctattcattttcaaatgtattatatgagactacgagagcattcatattacaaataaaactgaaagaatgattagttacataaactctttacccatttaattatattaacaatatttagattttaatcaaacaaaacttaagtgcaaaaactaaagaaaatgacttcatttttatgtggtttggcccaaaatttctcttggattagtccacgggacttggtctagaggtgaagcaatccactagcaatgtctttacacaccattcttacacagaaaacttaaaactcccttttaatttctcatggatttgttgtggattggtaacttttttaatatttattaaaatataaaatattttcacatatccaacaacaaattcaataaaacaaattattatttttttatatctccaactataaattaaaataaacaaataaaacatgaaagagaaaagaattatatgtaaaaagttttgaatagtttaatttaaattatatttttcttatatataaatatatacatgttgacacagtttttcgtcaactgatctaacaagatcgtaataaacaagaggactacgataaaataatttgactaaatataattgcaataaatgaaaaaggacaccagtaatttatagtagttcacctcccatgttgtgatgataatggggctatgtctattgtaattttattaattagattcgatacactaaagttatgttctcaagagtgtatggataatagtacaaaatgagatctctaagcaaaatctgtatcgaaacttatgaacacaaggctcatgggagaccgaatattcataaacctgataagggtggtggattcttgggaacaataaactaatggaaacaaaaaatagagaatggtctctctttgttggtaaatgtgtgaggtaatggtgcttgtcaaaaatacaataatggggacttggtgttgtgaagaacgcgaatgaaaagatgcaaaagggaaattattgttagggcttcttgctgatctaactcagtgtttcatcagtttgattcacccaagcattgtcgaagttgcctattctctaattctaccagtggtacgtatctggtaggatcataggcatgctcactctttctttctgggatttgatcaccaacagtattgaaattaccatcgttcttccctaaatgtggtgttcaaatgtgttggttctctgagatcccataggttcttcgccaggacgatgggtagtttcctttaggcgattgcctttgtggggagtgttatcaaccatttagtataggattgaatttatatttaaaaggagggatttttttgagtttttatcacaaaggctctcaatgaaagtaccaaactgttaacgcagatttttgttaaccaaataaatagtcttttttgcaataaatacactacataatttaattataataataataaacaccagatattttacgtggttttgtagttaaatctatatacttcacgagtgtatcttattaaagatatttttttggaaaatcatagtacaaatctcaatctttttaataataggatttactctccatttttgtcatccattttcccatggattctgctcctatttataggaatataggtagacagttatttttattgagattgattcatttataactgctgatgaaacgtggacattccctacgtttcatttatttacacatgggataatatctaataactacccaactactctttgtctttatcctttaggcagttatgctcacgaggaaggttgcatctctccaaatatgagttatccttcttatccgtcttgaaagaaaaaaacactaattgaagaagtaattcatctcgctgtacccctttatttgtatttgtaatgaccgcattagtaatttagattagaaaaaataattagcactaatttctgatattttttataattatttatgaatttaattatttgtgggctccatttgtagaaatggatattaggctaaaatttaacattaagggcattttagtcttttgccaagggaatgttttggtggctgccctagagtgtgacacatggccttttatttttcagc

SEQ ID NO: 15593 - DNA, 5381 bp, Cannabis sativa
  modified_base (27)..(47): a, c, t, g, unknown or other
ctaaaaaagttcaggaggcatgatttnnnnnnnnnnnnnnnnnnnnnggaaaaattactaattaaccattaaattacatgagattcgatcttaaattatattcaacacatgaaaaaaaaaatattaagtatatttttctaataataaatatattaataacttataattatatattgtgtttagccaaaatatattctttctctctttcctcatcgtttttcttctttttgcttcctttttgtaactcatgagttcattattgagaaggattgttgtcaactacaccaatatttcaggtataacctccatatatattatcttgggttgggtcccatttagtattgatttttatttggaaataagagttgattaaattagaaagaaaaaaaaaactaatatacctataatataaaacactactaaaaaaagagagatttgcgacaaaagtgatctatttcgaaaaggaataatattaaagaatactctaaggtatcaagtactataagaggtggtatatttttatgttattctaaattttgtagagaatgatgtggcatctaacatgatgatacgtgaaaaacacttacaaatttagactagtgatagtacttttatggcccggccaaagaactctcaaattaaaactgtcatggttacatcttcaatagggatcatccgagcagaacttgtacataattgtccacaaggatcttgattattcaaaaatgttgagtcttctgagcagagtagttcgacataagaaaatcttcaaatatgctttctatgaataatccagcattcaggtctcgatcacatgatccctgatttttggggattgacttgcaccgacaagaaataataagaaacatttctagtttttctttttagttttatttgttttaggaaaacctaattatttttatttttctttatgaagtggagtcattctattgaacagggatccaaaaggtcactttctagaaagctcttacgttgtaaaagaattataagatttttcctgagaactcttaagaaactcacttggccaactctttgtgatctttttaattcctttaagcaatataaataggctattactattaccacacagtcaaacttttataattctttgtgttcttattgcttaattttatttaattataaattattattatcatcgcttaaattgactcaatgacgttggctaaaagtgaggtcaacattatggtactttcagagagcaaaaacaacattgtttatcgctttgatcctctccaaagattgatgaaactaccaaaatgtcctaaaccactaaaataaccaatctgatggctacagattctaatgtgcaaaactcatgttaataggagggatccaatggtggaaaatcccgattggagcacttgtctacctccacgagttccacaatcagtgggacatggggtaacaacgactctgcctagattcactccggacacgcatgaaactgaaaccactagtactcataaatggagagattgtgctgtgtactggagatcaatttgttggagaacctcttggggtgatcgacgatggtattgagttgcaaaacttgtgagatgccttagggaaaatgcaagaacataccaacactcttcaccatgatcacgaagatacccgagaagttgtgaattttgcattcgaacaacaaaaataccaattccaagaatggtcgaataaacagatcgaaatcaggagaacccaacaggtagcgattaataatcgttccaagcaggcgaccgtattgattcgacaagcttattagttaaccgaacaacaatcagtgggagatactccactcatacgtgatccgaacagaggaaaagaaacctatatcccaaatagaccgcaatatggtataggtgaatgtctaaccaatccaagataatggaccatccaattcgaagtcacaggatcaaactgtgggccacacggtagacgagcaagtttttccaactctttatcttttgggggaatgatcaatataatttccatccttagaaccaatcaattgctgataatagctcaacaagaaggccaccaagtgaattagtcttcaacaagttaatatttgtacacgatttaaggaacgatctgaaacacagtagaggacatgatggacacttcatcccccctaatattcgattattaatgtgtataactatgtgccctgtgaaattctagaaggtccaggtgacacaagtcatttaacagacaggttaagttgatttagtggtgcaagcccagttatatttttatttattcctatttgctatttgtgttgcgtgtagcagccacagccaaccaatcatcatcgacagacgacaaacaacacacctcatcaccatggtcaccaacccagaaaaccccaagtattagttaaggcaaatttagactttaagatataaacgcagtggcgcaaccagtggaacctcttttaaccatgtatggttgtgtccctaatttgtcatagaccatgattgatcatatatattgagaagggtgctttataaaaaaaatgaggtattattagagtctaacacctctataagtgtattaatagtgtaattaattatcggatctttaaaaaataatatttaaaaaatatcgttatctaatcataaaataccaatgttgggtacagtagtatccaatgatgctcttatcttatcaataaaaaaagtggtaatgatgtcacctttgagcaatgtgttaattatagtttgccaattgtaatgaactctgagtattaaaagagaaaatgaaaaatggttggatttaagggacagaattgggaggttgaacttgaaacagtccacactccacatggagaagtaaatgcaaggaaagttggaagctcgacaaaaatcgaagacacgccgcatgaacgccacgtgtccaaattcacctgcaattttacctttttgaaaacactttcacctaactctctctttcaaaacactaaagagtgcgtttttttacctttttctggaacagaatctcaactgtattgatttaaccccacagtaataaattatatttatataaaaacaactcactcaccccattttcggataaatttatagccaaatgtatttatatatatatatattatgcaaattacacatttgtcataataatgtctcttacaaataaaggcaaaaaaaaaaaaattaataaagaccaaaactattattaagcttgatcatatatcaattctgtgagccataccaaaactactatatattatattataataatagcctgcattggtttctaaacaattcaagcaaaaccgagactcaactccaatcgtagctcgccacgtggattcggttctggcttggctaacgaaggctcaacagtttcaacagaaaacatgctttcaacgtcttctcctacagcgctggtgggcccaccattacgcggccaccagtactcgtgactcgggttcaaataccgggtcaaatcacccaaattcgacccgttattaagcaagcttttctgcccggaagaagcggttttcttaaacctgtttcgtttcgggtcagaatcagaaacgacgtcgtctttgatgacgtggcgtatgtccacgacggatgacttcagcttagtaaactggttattagagtgatcgagcgcgtgttcctcagtttcgacctggatcggggctccagctaaaacggcttcgactgcggcttggcatttagcccagtcgccactccaaaaaagtcccactgagccgtttattgggttcacgattctcccacacgcttcgtacaacagcgatttaaacacagcttttatttaaaacaaaaaaaaaagtaattaattaaatgaaataataataataataatgataattaagttaatttaattgaattattaccggggcggagatattgaggaccagcattaatgagattaagaagacccgtacggccgtagaatttggcgaggaaaagagtagcttgggcttgagaatcgggagatttgatccactgaaggcaaggcctaatggcacaatcatcgctgcacccttttcgtaaaaccctgcaaccattacagctcgttctcatgatgatgatgatgatgatgaatgattcagaattttagataatgatttctctctctctttctctgtctctgttcttattagagagagaaaatgaaaaaggggaaaagaaagagtattattataacatacggcggctgtacggagatttagaaaggagtgtgatttcaggggcttgtatttataaagccaatgcttccgaggttaaaattgtaattttataaccactgtgtttgtataaataatgcctttatgctacaactccaatacagatttttccttttttaaaaaaaaaaaaaaatccttcagatataaatgcagattgactgaatttttttgtgggaattttatttccatctatatttaaaagaagtaaacttgaaataatttcaaaaaatccctatatatttttttttaaaaaaatcacattattttgtattaattttactacttattttaattaaatatgtataatttatatttaataggtatatttttaaagaaaagaagaaaaaaaaaattaaatatatattttatacaaaataaaaaataatcaaaatgggtggttttatttttgagatgaaaataaaacttgattccaaaaatttataaatgtaatttatttaaataatttttattttacgtaataaatatttaattatattaatttttttctttcaattcatattttttaaaaatatacttatagaattaaattgtattttaaatattataataaaaaattaaaataaaatattacatgaaattttattagaaaaattctttaaaaaattataaaaataaaattaaaaataaatattaaaattaatataaaataatatatgaaaaaaaaaataaaaatattaggctgtagataagaatctccataaaacattcatttgttatatttttcaaatctaattaggcttcatgcaagtctaaactacaaaaaagccactgaaacaaaatgtaaattaggggcaatattgtaaatagcatatttgtacgtgtcagcaatgaatacaggttatttggcaagtgtggaagccatgcaaaggtaactaaaaaccgaaaaacgacgaagaagacacgtcaacatcgtaaaataaattacttaataataataataataataacaataaatggggggcacgtgacaagcacgagctcctcctccgtaccgttcaccgtcccgtttgccagaaaattttgtaccggaaactattcccgctctttgggagaaactccttccttgcatgcattaaaa

SEQ ID NO: 15594 - DNA, 2335 bp, Cannabis sativa
  modified_base (1407)..(1412): a, c, t, g, unknown or other
  modified_base (2094)..(2094): a, c, t, g, unknown or other
tataacttcaacaacatataaagaaattaaaaaagaggaatagagaaagaaactgttggtggataaattctggatcttcactttgaatcaaaattctcacttgaaagttggaagtacgtatgtaaattaagatctaaggcttaagaaaataaaattaatatacaaacttaatgcatcaaaccaactaaacaattttcttaattatatatcattattgaaaatataatgttttcaacagacatttatttaagttagatacccgtaaacactaatgttcaaccatatcgtttgttagtttgctttcaactattcccaagcgttaataagctttaatttttatttttagattatatataagcctaattaatgagagtgagagagagtgatggtccaacaccaatgttgatgactggctttcctattgattataattcaagacaatattaattaataataaacagattaatctattatcaactgtctgactacggatcagcagtaaaaacaagaatatgattatgaattgcatggaagtgaaattgtggtagtagttacaactagttggtacaacccttctttctttttttttttttttttttaagaaaggcgtacttatattaaaataaaatttgttagacttcgcgatcattacaaaatataatatcaagcaaagagaaaattggcacagaatcaaacctctgatacgaaaatgcccagttggcacaaactctcaggctctcatctaatatgccgatggtccattaaatagaagatgaggtagtatgaatatgaagctagtatatatgtggcatactgataggatgggtgtggcaccacgtcattattttgtttggtaaggtgcaccgcctcattttatatatatggctagattttaactttgtaattaatattggtaaaaccaatccatattttttttggttgaaatgaggtaaaaccaatccattatgaaagaagaaacgccacacaaaattatttataaagaaaaggaaaaaatataaattaacagcgtaataaagacagttgtgattcgtgagatgaatttagaaactataataaaattgagggatatttataagttattagttttatacacttaaatactacatgtttattttcgacggattaaataccttaagttatattttcgttacttccgtcactacttttctgttaaatcctatcaaacataaagtattttcagcataaatacttgtacacttatatactatatatttattcttctagtagattaaatatttaaagttgcatttacattacttttatcattacaagtttcttaaattctattataaggaattttttcaatattatacctaaaattgattttatttacaaaaataccttcaacaaatttatttgcacaannnnnnacgtgtcacgtcatctaattttattagttactacaataaatattataatatttcatacttaaaaattttctagtatctaaataaatttactttaaataagtaacatcaacacatcctatacagtagaaaagatatcatttataaaaatttagtttcttataagttattttagaaattagttgatatttgaaaattcaattttctagaactaaaagattattttttattttaattattttttctgaccacggtaaaaaaacaaatgcttcctatatgttaaaatgatcccctaaaaaattagattgaggtgatataatttttgagctcaaataattaccgatgtaataaaaaaaaattaaacttttttaaaaaaacgaagaggagaaatagctatttttttaatattaaacctactactttattttttaggtggaatgaaagtgaccaataaaaatagaattttttatatttttattaattaaataaatattatttaattattttttcaactttaaaattatttaataactttttttattgaataatacttaacattttatccatttaacaaattttaaaattatttaacaattttttattaagaatatattagtggatcactaatatgttgacaggtgtcaacttagtctattttactagaatttaacgaattgataataanaaaagtagcgtaaacgtaactttaagtatttaatatgctaaaagaaaaaatatatggtatataaatatataaaatctaaaaatcaagtatttatactataaatatttttatgtttgaatataatttaacaaaaaaataataacggtaataacaaaaatataacttaaagtatttaatccgtaaaaaaaatataatatttaaattgggcattttacaattttgtatacattattttaattaa

SEQ ID NO: 15595 - DNA, 7727 bp, Cannabis sativa
catgctaacttttaatccaaaaaagttcacaagtaccaaacacaactccccctggaaaaagggtccagagttgataaaaaaaaattgaatgcttaataaaaaacacattaattaaaaaatattttgacaactaaattgccaaaaaaaagacctaacaaattttattttgacaaaagattagtttgagggtctttttttaccattttagaaaatacaaggtctatcttgtcatttaacaaaaacatatggtacaattgataacttttgcaaaatacagaatgtaaaatggtagtttccccattaattagcctattattattagggattttgttctaatattttatttattgacatttaggctaaaaccctagtaggagacatgacggaaggggtttagctctgtcactgtgagaattttggtgaagttttccgtcgttgagaaatggcagagacccaagagaagaagaagcaaagcaaagtgccgatactaccatggatgcgaagcccagtcgatgtcactctcttcgagcaatccccactcgctctgctcccttgcctcgaccctaggtacccctttacccatttctcttattctcatttcaactcgattaacccacgaaccactagttttcatggttgatttcaagaagttatggaatacccagataacaagttcttctttttcagtgttgttttgttaaaaaagagttctttttttcttttttgtttttgtttttggtttagattaatggaggctttgcaagacatgggattctcctcactctttccagttcaagtggcagtttggcaagagacaattggacctggtgcctttgaacgtgacttgtgtgttaattcaccaactgggagtggaaagactttagcttatgctttgccaatagtgcaagccctttcgacccgtgctgtcaagtgtttgagagctttggtagtgttgcctactcgtgatttggccttgcaggtttggtcttcctattttgcttttaatttgttttagcatttggttagtgttagcatggttattgtaactcggtttaattgaatccaaagcattattagaattgaacaatctttattgtcacatgctttaagttgtgctggattgttagggaagaagatataaaacttaatttactcttttatcattcaatgtaacaagctaactgcattcaattttaaatgcggttttgaaaccgagccaatttttgaaatgcttgttgttctcggtttggttcaggtcaaggaggttttttctgctattgcgcctgcagtgggcttatctgttggtttggcagtcggtcagtcttccattgcagatgagatatctgaactaatcaagagacctaagctcgaggctggcatttgttatgatccagaagatttttcacctgtgctgcaaagttcagtggacatattggtggccaccccaggaaggttgatggaccatattaattcgactaaggggtttacgcttgagcatctttgctaccttgtaaggattaagttacaaatttctttaatgcatgtgtatgctttatagtgtagtgtaccctgagtttctttcctcctgatggcttttgagccttgaaggtctgttatgcatgacaattaagacttatattaatttttgtcatctgtttctgatgtagtcagtttcttctaagcaatacattcttttctttagagtattaaatttctaaggattgaaggctttttcgtcgattaacagcattttttattcggaaagtattgattgagcactctgataaaaattgtgagaaaaaaaatgacatatgcaaatagtttatatagcaccaagtttctattcttactattgtaagttttgtggtgggtggttatgattttttttttcaggttgttgatgaaacagatcgattactcagggaggcatatcaatcttggctgcctacggtgctcaagatgactagatacgatgaaggtttctttcctcgtgctcccacttttctccctttatcacttggttcattaaaaaccattagaagatcgtgagttctatgtccaattgtgtctgctttatacgtttgttattttttttaatgttaattttagtggaactgttttatgtttgtgtagcttgagacaagaatgatttgaaattagttataacaaatgtaagtatggtcgttagcttgaactttaagctttcatatgtgacctcaatgatgttgtttccaatttatagatgtaaaaccaatctgcattttgattaatgtcgatttatttggaatttatacatgtcgagactaatatatacaaccgtacaattggtcttgaggcattttggagaatcgctctatttcaaacttctaattgtcttgtcagttctaaatattaaaattatgaaccaattgttagccttcttttgattattggccgatctgtttcaggggtgtcgagaggggatttaagggtaaaccttacccgaggcttgtgaagatgattctttctgctactctaacccaagatccaagcaaactagctcagcttgatctacatcatccgttgttcttaacaacagggaaaacacgttatcaatttcctgaaaaattagaatcattcaaattggtacgcaatggttatgcatttctgtccataattcttgtttgtctagatgtttcccgagaactactaaaagcaagatcatgtgctgcattttctttgaatgattatcatataattctaaatgttttattcttcacagatttgtgaaacaaaagacaagcctttgtatttggttgctcttctgcaaaagttagaaggagagaagtgcattgtttttacatcttctgtggagtcaactcatcgtctatgcaccttattaaattttttcgatgatctgccatttaagattaaggagtattcaggtcttcaacgccagtctgtaagaaggtaatacacaattttacttgatttgtatcatctatggtgatttttatattacattttgctgttgtacatagcaaagataacagagcaaaatacgaggtatgtgttatgtcagtgggattatgtatgaagttggtgtttagactagccatatttggaaactctcactttctttctgtccctgaatgtacataaagatttgtatttggatgttaaactgtattcatgttctgttagtggttaaactaagatttctgagcaattaatttgcctcgattttaatagatatatctcaagcaaaagatttattgtaactaaaggccttgggaaccattgaagggttctaaatgcagtctcccacacaatggaatgacatgcaactaatgggattttagtatttgttgagtcattgacaagattttgtgatgcagtaaagcattgaaaggatttcgggaaggagagattcaagtacttgtttcatctgatgcaatgactcgtgggatggacgttgaaggggtgaaaaatgtgattaattatgatatgcctgcatacataaaaacttacattcatcgggcaggtcggactgctagagccggacaggctggacgttgcttcactttattgcgtaaagaagaggtacgtggcctaattagtgtctttttaaattggaatatattttacacttctatgaagaactaattagttgttaatggattttttgttttgattttaataatttttgtggctttttaattagacaacttgttataatgatttactttgaattttcctaatgccatgttgtaactggcaagtggctggcccagctttaactggctgctgcttattttgcccatcaaaactacatatttaagccttgaaaagagatgatttttatgcaaactgatcagggaccattttagccttgaaaagggttggttaaaagtaactgactaggacaatttagtctcgaaaagggacgattttcatgctaactgataaggactattttagccttgcaaaagggatgatttttatgctgattgattaggcttgaggtctgtccgtccaatgagacgaattaaattttagccacatattttcggcttcggtggctcatttgctctcattggttgattgaagtgttcaattcagtttctaagttacaccatgtttcttgttgaccatgcacatatcaaacaatcaaaaaaatttaaccatatcagttaatcagataaatttaagaagtaaattaaattaaccatgtctggactccaaattttaggctaaaattatgtaaatttaatcttggtatgaataatgtttgttgcgggaatatgtaattttcttggattgatattttttttcccacgatcttaggtcaagcatttcaagaaactgttacagaaagcagacgataattcttgccctgtttacgagatgccttcgagttctgttgaatcaatgcattcaatttatacttctggtaatttcttatcttatatgtgtttgtttacatacctagataataatggtgttcaattacaataacacttagaaaatattattcttttcttacttcgagtacgagccagacaagaactagctcaagttacttctgcatttcctatagatttacaatacatcttttaccagaagttgaactatttattgtttttgcaatctgcagctctcgaaaaattgaaagagacagttgagacagaagcatcacagaagcgcaaagttgggttcaagtcttcgagagcagcggtgaaaacaaacgaaacacactcttccaaggaataacttattaacaatcaaagttttgctcgacagatctatgcgggttatgatatgagagttttggccctttgaatttaaatggatgagtgttgaagtctgaaaaaaatagaagatgtcttccactcatcatggtttcggtatgatttatacatattttatgtgcacttttatgtttccttagccttctaactaatctcaatctaaaccataaatgatcaatcttgatatacttttggtatgtctaatagtcaaattatttgtttctgtaaagtataagcaaaacactaatatgagaaaagtgaattgagagaaaaaccagcacaattccatattccattctctattgctaagtacagaatcctatgctgcaacctatgttccaacttccaacttggtgtgtctcaccgagttggaacgatggcgcagaacttagacaagacacaaaagaaaagggagatagagaatttacatgtggagcaactctactatactaatattccaatagttgttcaagacaactatggaaccaatacaacactaagcccttgtattgtcatgccataataaattgtgttatgttgtatgatattgttctttaccaacaaaaaaaagagtaatcaaccccatacaacaaaattcatcacaacatgccaacccaaccaaaagaagaagataagtacatgaaaactccacaagttttatttttctcatggaagatttattcagtgctcgaagattgagaacatcgggacatccttgagaaagtactttgaactcatgctgccgctgctgctgctgctgctacaactacgagctctagaactagcgcttgtagcggtggaagtagaagtcgaaggagaagcagaagaggatgaaaaggcaacctttgagtcattgccgcaaacatctctctcttcttccttaatggtgtcaagaactttggtagttctgtgcctcatgactgtcacgaattgtggtggtgcaacctcggtgatgaaccttgctatgcgagcattcgccattgttgagagctcgaaaatagacaaataaaataaaaagttggaaacaaaggaatgtgagagaagagaggatgtggttatgaagatttggttgtggatgagaaagaatgaaccaaaggaggagaatttatagagctagaatttctttcattgcattgactgaagaatagtacatgagtctcaatcaaagatttaaagctagtgccccctaatttgctttagacattaaatggttaacaatttaagtttgtaaaacattaatggataatgtcaaggaaagaagggttatgtgtcaagatttggatggaaaaatgggttatcattagtgatatggtttttgtttggttcactatagcctacaaattttcacttttctaagctcattgtatgtggggaccaccaaaaaggtaagcctcagctggaatgccacgtatcacttggatgtggggtttgataggactagctcattaaatctctatatattaattacatacacataatatgcatttatgtacatgttaatttgagatattagtaatttctttaatagaggttgtgactagtaagagttcctcttgaaaaaatcctttggaaaatatagtttctattacctatatttaaaattcactcaagatttttttcaattatggctcaagattttcttaagttaattttttaattttaatttaaaaatgatttttgtgtttgatattaaacttagggaaagattgtggtagatctttctttcttttttactttcgaaaaatgatatattaatagttatatgataatttatattgtagttataaattgtatatttgaaccataattccaatatctttaaatatttatttgttttttttttaagaaaaaaattataagagaatttttataactaaaatggacaccatttatatatacacactaagtattagtgtatatttgtttagagatgtattagagtttctattacttaattattaatttaaataataattgtttaccgaaatttttaaaaataaattaagagctttaaaaataaaagaaataaataaagtagacaatttttttacgtggttcaagcactaatgatctttagttcacgagtcagtatattgatcttagaaggcttgtataatgtatattacaatggtatttacagtagaaaactctaactttgttctcttggtttctcttgaagaagaagaaagcttaaaaagattttgacagagattcagctatcctcttttcaatccctccctttgtgtgaaagtaaaagggtatttataggcagaagtacgggcatgggcatacccatgacccatttagggtttctacaaaaaagcccactattggggtaaaatacactaaatatctgactattgggcccccaagattattctttctcgtgtggcgaatcgtccgtacagtgaagaccattgttggtgcatgagacgtgtcgggtaaaggcttgcccttggtggacaaaatgctcaaaggagccagtggacaaagtagagtattcagagggtggtgcgtgcactaccatggcctgatacataggacaagatctttgtgtcagacaagaataactgtcataagccatccagctatcacctcgcatgtggctttcggttttcttcgtgcacttagttaccgtattaggctcttcgcatgactctctagcatctgcctgcacctatagataaattgatcttcttcgggtcccagagcaatgatgaggcttcctgattctggatggtcatttgctttgcaacaaacctttgtgcttttctctggtcagacttttctcgagctatcatagcctctccacgatcttctgcaattaagaagacttaatcggtgatcgtttagattgttgccttctattttttgtcacgtatccttcatccagtaacagagataacaataataataaaattaaatctattacaattc

SEQ ID NO: 15596 - DNA, 4401 bp, Cannabis sativa
ttttttttttttttttgtggaagcttaattattttaaaagtatttacacatacttcaaacaaaattctaatcactttgttaagaaaatttgtttaattttataaagatttaattatcataaaaagtgtttatgtgagttttttttttattattttattatatacttataaaaaaaatatttaatttttgaagtgtaacttttttttttcaatggggttgtagccctatataaccacattctaagcatccaagttaatattgtctaatttttgtttagcttttttatttttattttgaataattgtttagcttaactttgagttttcctcattatatgaaatgaattatcaatatagtcttgccatagtttgttattttaccccaattttgaaaacatgattaatttttaaaataattgggataaagttttatctctgtttttcgataaaaccgaaataaaatgcctttaaaaattagaataaaagactccgcttcaccctcttgtggtgaaatttattttaaagaaacaattttctaatataattttctccttgtctatcaatatattataggcaataaaaagttttctaaatttttttatattatgtaatgggtctcttataattataacgttagataagttataatcctgttttacgtgatttaaacaaagttttttcttgtgcattttatcttcaacttttcatgttatatattatggatgtatatattaataccaatataaatatatatgagtgaaaattaaattatatataatatttgagaaagtagtaatagaacttgaaaccaatttatttattttatacaaattttttaaaattcaatattgttactttcctacagcacgctttgatgtattttttttttttggatttaatgaaaacctttttaagttttcataaccaatgaaaataaacgttacaaacaaagtttggtgtcattaaaaaataaaatccaaacatatctcttttggatgttattttacttgaaaaaaattcaactaggatcttatgttgtcctatagtcaactagcactaccatactaatcttcaatatattattatacataaaattctatggtgcaccaactttttatccgtgtaattaattatgatattttataaaattttgaaaaatttagacaaaatttaacatgttaaaaacaaaatttaaatagtatgttgctcgggtgattcttttattttatacgcgtataaaatggactgtttgaacactattttttatactgtaaattattttaaatttctcaaaattttacaggatgtctttaataattataatgtagacaaccttaaaaaaatagactaattcttttttctagatgtcaaaactgtaagagatgtatcagtgcaccttttattaggaatggattttttagagttagtctcacagtactaatgtgtgagaataaattaccatatataagatgaatgaactactcctctcattatcaattagttttgagataggacctcatgcacatttaatcacatcttatatcttgtagatccgttgtgagcccaaagtgtcgtcaatccaaaaagataagccataaaagatccatttgtgatctattgtgagtgttgctggtccaaagagacgagccaaacttaaaaacttccatctcccctttaaccttcatttgagatctttcgtccaatgtgtgccagtttttagtgttgaggtctttaacctatttcaatatccacaaattttctaatgtggacacccacaaaatttttcaatatttgaccttgtgattctttcaaatgttacatttgaccttgtggtctcttaaaagttattcgttatacccatattttctaagcccaaacgttaggagggtgtattagagttagcctcacattactcatgtataaaaataaattaccatatataaaataaatagattacttctcctataaccaattaattttaagatgtctttttcaccctatattattttacaaaagagtcattcatagaatatgaaagttttttttttttaaaaaaaaaggtttttactgttttaagtagcacctttaaaatcaaatcacagagagttaatatgtaatatgtgtatgttataccttctgaattgttagtattttcatttacttcagaattgaacattttaactgtaaaaatacaataagcattaccatttttgtgaccaaaacggttctcatttatcaatatacaattacaaagctagctgttttttctctccagccaaaaccccactgataaatatgaattaaaatgaaaacacaacaagaaaaaacatgtctaagaattggttttggcacttattatagtgaccaaagaaaaaacaaatttcaataacatatactagtctaattttttggtacagggctactattctacaagagaaaaaaaaccattatggcctatgaattaagggacagaaagcagaagcaagtattatacattgatgatacaagttcttcatcagatgattctgatcatggtggcgaatcagataccgattatgtgaaaaggcgccctcagcgcaatctcatcagctcaaccaacaatgatgttgtcagagaaatagttcttgtggccaaaattgctggttattctccaatgaaaagaaaacctggccgaccacctaaggctaaggcgtcggctagtaatagtgtttgtgctctttcgcaaattcaaggccctttggtgacaaagaaaaggagtcagaagcgtcgagctgctgttgcatcttcttcttcttcttattcggggttggaaaaagggtatgtggtggaagatgggatggagaaaaacacaatcttggcaatgttgattgatatgaaggaaatcaaagataatgaagaagtgcattatttggacatggatcttaagaaaatcaatagtgggaaagttactagagctgggatacattgtggttgttgtgaaaaaatggttacagttgggaaatttgaagaacattcctataggattagtagtaattgtaataagagtggtattcttggaaagccatatcaaaatattgtgttggaaaggagtggtcattcattgttgcaataccaagtttctgtttggtatacaagattggaaagaggagatatggatgtggttaataatgttgtgcctaaaaataatgatggtgacaaaaatgatgatgcttgtatggtttgtgctgatggaggtgacttaatttgctgtgagaaatgcccttcaacttttcatccttcttgtttggaaatggaggtcaagatttttaattttgatttttttttttcaaattataatgaagaaatatgtgaagggttttttttatttattttttaaaattttttgggattgcagggagttccttttggagaatggtcatgtccctattgtgtatgcaaatattgtggtataccaacaggagaggatcttggtattgacttctctaaatgcatgttgtgtgataagacttgtaagtcttaatttttttagaaagaaaaaaaaaataaagattttattattttcttttttaaagttaataatttattttgttttgtagatcattgggcatgttatgagcaaaaagagctgaatctcaacaacaatacaagcccacaattttgtggagatggatgttacaatgtaattaacataaataaccatactattaaatattttgtttgataatttttggtcacttgatttgaatctgtgttttctctattgttgttatatgttggaaaaggtttatgagaaacttcagagaatagtgggagtgaagaatgaaatggaggaagggttgtcgtggacactcatacgacatgctgatttgatgtcgtttgatataaaagatattgaatttttctatgaatttatggagtgcaatgctaaaatagccattgcttggagcctcttggatcaatcttttgagaatataattgatcgttacactggtattaatttactcagaagtgtcgtctacaatgccaggtatgtatattaacactgtgttaacatatatacactatatatacatgtgaattttgtaaaagaacttaagaaaaatatatggtacaccctctctataaagaaatggtttggtatagttttaatatctcaaaagatcttattagttcattttttataacatagcctattatatttatttaagactaaatgtctatttttaaaaatttcgaatagtataaaatattaaaattaagatttgaatatataattttttttaacacggtaaaatgttttaaaaatttataatttttttgaaacaaagattgcaactttcattaaagcaaatcagcttccaaaccagaagggacagaccccctactggaaatacgatcagga

SEQ ID NO: 15597 - DNA, 8781 bp, Cannabis sativa
ttaaaaaatttataaataaaagtaggagcgatttatttactaatttattaataatttaaagacgttggcttcgaatttatattctctccatttttctcatagttaggtagattgtgaaaccacctaatatttcttcattccaaaaagaaattaataacaataataataaaaacacttaaaacttcgtcttaacacggctcaaagtcaatggtagaggccttattatcgacgctctatcatgaaaacactctcatttttcttagccgccaaacagtacccgaagaccaaggagctcaaaaaaaaaaaaaaagaatataccaaaaaatatgtttagaaatatatatatatatatatatatatattcatatgtttagacacgtgtcagttgttgcctgggccaggtggagagacaactccgtttaacacggtgctgaacaaccgcgccgaccatccacactcgtctcctcattacaacaaaacgacactaactaaccaacctctctccataaatgctcttgtcgtattcctttgtttcattaaaacgacaccgtctaacaaaacccatttaaagtggtcgtatcgcatatttattgagcaagaaaggggtattatgggaaattaacctggttacattacggttcagctctgaacggaaccttctttctctgttcccttctatctctgcaccagttttttttgttctactttgccttgtggaatgtaataaatttattatttatatttttgggtaattttgactttgattaaaaaagaacatactttttctctcaaatttgaagtgtatgatctttctatttgatcgctgaggccgtgatttaaaaaaaagtctgctttttagagttgagattctgagtggtgtaaaaaatttgctggccattgactatcttgggtatgtttcatttctctatccctttcttcttcaatggcgttatttcatatgcaattgtacgtgatttcgcttctgttttgttctttaatgtaattactgatgtgggtttgctttggttttgtatgatgagttgaagtttctcaattttcgatacgattcctgggttcgtttatgcattttctctggagataaaaataatacacgtttctgctttctttcctttttgctatgttcggatgtaaatcaagacgcgaactcttcgtcgttttttttctttctggattttgtttaaagcttatcgctaggcaaagctgatgaatttgtagtttatgcctgtcctggctgaatgcactagaatgttgcttttcttgaaaatgtgttccctcacactgtataataatttatttttatgagcaagtttgaaggaattattaattttgttttttttttgctgaataaacacctcaaaggtagcaagtttatttaattttttgctgtttttaattttattttttgaaggaattagattgattttattttattcttatcttttgaagctttatttctgagatgattcattagtttaacaattggacccactaaacttgttcatgtttgtcgtccagatttcatttcactttatttggtgattacatgtttacaagcaagtccttgcacattgttaggtagtcagtcttttctttttttatcctctcacacaaataatgttcattgacatcctaatttggtaagcactgtttgcatttctatacaaaaatgtcgattttgaatttgatttgcattcattttcaatatgtgctatcaatattatgcatccttattcctacaaaagtgctatacctttgttaacacttatggatttttcattttggtgctagaatcttcatgaaatgtatcagcatttgaattcatcgtcaatgtattgtgtgattgctttaaggacttgcttaatttttgttattacaggttttatttccttgaattgttttctagagacttgatacaatgcgtacaccatcattacttgcgcaatgcttgcctggcttggctcccaatgacaaaggaagtcagagcttgacatccttttcggagagagatttgtatctcccttcaccagccgttgagattctcccatcaaaggtattgcttctgtcgacaattactagtcaaatcttagtgtgatacagttaagagatttctattagctgtatttgagctataatgccattttcttttgtttctttttttggaaatgtacagatggctcacccatacaagtacgctggggagaatgtagacctgcagggccttaatgtgttcaaggtaatttcaagcgacattgatatatttttgtggttggattcagactataatctgtgacagatgaaattcaatacttatcaatgatatatgctgacatgttggtcccccagactataatcttgagaagaaaattctactatatggaaaaatttgtttatggtggttgttttgatcaatcacataatgtcaacgtatttttctgtctcgagcttgctggccatattatttgcactttctacgatagttagcttccttcatgtaatacaaaatgatctagttggagtgtactagatgtgtgcaagtggtctgggtttaagtagctaacttaatatatatatatataaacacacttatataaagtagaaacagaataaattaagacacacttgatctcattcatttctatttgtgtagtggacatgattacttctttgcattgcaaccttaacgtggattttgatgttacgaatatttgttattttggaatgaaccatctcaattgacagacaactgcttctcttcttacgttgaattctgatagtcttgttcataaaattctgctccatttgtgcagggaagagttagtgttgctgatatcattggattcaacagttccgaaatgatatcctcaaaacctgatggtaagtatatgatttacggtattcatgctgaaatttggtgtaatgcttagctatgtaagcagtgatgtttgcatgtgtaggtttctttttgattattttataaggaatatcaaaataatttgttgcaaaaattcattatctggtttgcagggtacctaaaatcctgggacagctctattgatcttgtaaatgtgcttaagcatgagattcgagatggacaactgagttttagagggaaaagagtacttgaggtaaatatacaactcattttttgttttaccttcctattaactattctgtgattttttttctcttgtgaatgtccatacctcaaatgaacagcttagactttaattaatgcagtttaaggagagttgtttgatgacttacttgagcctttattatagattcattttagtatttgaaattgattgatcagtccaattatgtgttgagctaagcatggattaatttctgttagaggaaattttgtcgtagtaaatgcttcatttcatttggtactatccgacctccttcctgggcttaaagagaaataaccagacttttttcctgagcttaaagagaaatacatttgctggaagatgatggttttctctagaagaaacaacatgaaaaagttgtttgatctgtgctaggaatgttgcacttgcattttagcttcactaagtcatggtcttattccaagatgaaactatgacaatagatgaaggctaaagtgtgccacattttcaaactaagctttcttctctttcagcagtgtaactttggaaactgtctttctttcttttttctcttattctttcttatgctgaaatatttctgtttcatgagctgttactatatttcccgtagctgttcatccagaaaaaaaaaaatctttctatattaatgtcttatagtaagatgttctatttgtcaaaacttcttatatttgattttagctagaagggtaagcgggtgaatacgactgtgagtattctaggtttcaaatctttatagctatatattttttcgtaatttatatattaatttatttgcttgatcatttctgcagctaggttgcagctatggactgccaggaatttttacttgcctgaaggtatgtattatgtttgtttgtgtttttgacaatttatccggttttggaggctactttgtttactagctccttttaatgccctttctttagccaattctttcagccactcccctgcttactttctgtattagatcagttgaacttttaaaacattttttaatataagcttggtctccatcaaagttgttaaaagaagcaccagaaagggcttatatgttttttttttcgtacgccctaatattaaaattgattaggattatagaagttgagctgtccaactcttaatagtcctagagggtttgttaaggaaacaattaggggtgagtcagtgtaaatagaggggcttattaattgcaagggataggaattaatttgtactgtttagagtaaaatttagtcagggagatatccaagtgtctcgaaaagcttggaaaatttgtaattctttctttgatatcaataaaatacccctatcattattgtataatttctactcccttttttgcttataatttttaattatcactaatcagttactttcaagtataattatatgattatatgtactggattctggctatagctgtattgattgctggaatttctagacaaagttggttgatgatatcacgtacagtagctagtgaattttcattttgttgcctcaaattgctttcgactctgagtttaccggtttttgacatctttgtaaatactaaataatgttgaacaacattctgtttatcaaagacctatgtaaaaaatcgaactttttaaaagttagtcatgttttttcatgatcaagctaagaaattaatactaattattttgaataggaaaaatggaaatgatgaatttaagggaagagtatgagcaatttatgaatgatgaaaagtaaaagacaatttgtaatcatctgcatgtgttatttacatcacatgtatttgattctgtgttcatacagagaagctttctcaaaactttttcttcaattagtatgttggttccagaaatatatgcttatgttctagtgttttgttcggtatttattttaatgttagatcagcataaagaatctagccaaatttgttggaatggaggataaatgttgttcgagccttgagatttgctgaagagtaaaatatatttttctgttttagaaggtacatgatttctttctgattgatcacttttacagggagcttcaacagttcattttcaagacctcagtgcagaaactataagatgcactacaataccaaatgttcttgccaaccttgagcaagctcgagacaagcaaagccgacaaccagagagcccccttactccatcgagacaaactctagctccttcggtgcacttttatgcaggtgactgggaagaactccctactgttctgtctgttgtaaggagtgaggggtttgaagcaccaactggaatgagtctgagcttttctgaggaggatttcatggatggatgcagtagccaagatggaagcatcattggacaagaatcttcctctagacgatcgaggaagctctcaggaagccgtgcatgggaaagggctaatgagagagatcaaggggaaggtggatatgatattattttgatgacagatatcccgtactcttcaactgctttgaagaagctttatgtggtcattaaaaaggtgagccttcatcatgaataattttctctgcggcctttattcaacccgtaccgaaattgctcttatgtcttttggatgacaatacattacaaaaaaaattataaataacaccgatatggctgcttgctgatgatgattctcctcttgctttttttatttttttctgctctaattgttattatactgaaccgaggttgaacgacattctaattatcatttgttttggatcagtgtttgaggcctccctatggagttgcatacctggccacaaagaagaactatgtcggtttcaacagtggagcaagacatttgagaagtctggtagatgaagaaggcatttttggagcccacttagtgaaggagatgactgagagagatgtctggaaattttttctcaagtaagagagacaacaagctcagtacatacaaaaagttcttgcccaaaaatacttggtaattccggttttcaacattattttgtgtttgtattatatggatcacacttttttttcccttttggtttttcttgtatcgttagtaatatggggatcgtaaagattagtcataagcatatgattttgtttttataccttaatgtaatttagcatttttctttttttttaaaaaaaaaaaaaaacaaaaacaaaatatcgttcttatacatttaattatttttgatgtactgtaaatcaatacagtgtaattgcaaatttgaaattaatactgcagatactgaaagttttacaatttgatgaattttaattaatcactgtcactttgctgaatgtggaattattcttacatgggttcatgattatgtttaggggaactgtcatttggctagctatcaatccatcattttctacctttacattaagtacacaaatattaaaatcaaattttgtaatatggcaatgctatagttttttttttttttttctatgacaagttacaaatcaaatatacagagcaagaaagatgattcctcaatatctgttaagcaaatactgcccatcagtccgtgtgatattcatgctcttgtacatatcgagatgcatggaacttatcataccctgagctaatttaacaagtaaataactttttcttctcgtacaaccttggtattgttatagaaaagtaatgcaactatcaaaacaagctaattctcatatatattagaaaaggaaaaagtgaaaatcacctaccttgccaatacatacaaagacttagtcacccatcatatggattcgatgcaaggttgtttggcatagatttgaaagggaaaaaaaaggaaagaataatatgaggtgaactaagggtccaatatatgactaatctggtagcagattagtttcaacatttaagatagtgaacctaaagcataaagaaaacattttctatggcttcttgaatttgccatgttgtatttcagctatccttctcagttagcacacactaagataactacacaatggaaatcgaaaatgggagatttcacaaaattggcaggctacaaggaattaactactgtctattttgatcttcagtcaaccttctccgcaccatcttcccacaatataagagtgtcaagaatgtgacaaagtaaagtagaggaatagcgataatgcaacctcccgatgcgaaattaacaagtgtctaaaacatcacaaaccaaaaaaaaaaaaaaacatgagttagatcagtatacacagcaaatggtggattctttatcaagcattctgacaatttatcatgtaaaaaaaagagataaaaacagatgtaatcgaatttcagtcgaatgaattagaatttcatgaaacatttacatctcataaacaactgaaaccgccgaagaatgaaaagaaaaatgttcagaagttactggtaaaaaatggaggggctttacctcccacaggtggcagtttaaagtagtttttaagtttctctgccgcgtttctttaaattagagttaacaaatgacttgtaactatttaaaactacagattacttgagcagcaaattacagcaacatcaaatgaaaaattgtgctcaaatcagtgtttccacgatcacgtttaaagagattccgataaaacaatagtaattttagtttctcaaaagcactaaatggcacgtaaaattttagcaatttcaaacaaatgaagttaccaccatttcaatggtggaaaattcttggcattctatatttaaaatcctagacattccttagttaggcaactgatgttagcaggggatacggctatatatataaatataaatataattttaccaactggtttcaatttgcttttttgcaacaattatttcatatgaagtgtaaggcttttacccccatagctgcaacaagatgaactgcaggaacaaaaaactggtccactttgttcttttcagcatatccattaaatgctatgaccattgagaaagtgtgaatggtaacaaatgcaagagcaatgattgctgcaacacagaacaaggattttgtcaaaagatacgtcaagagcaccctaaataaaaaaatttaaaagtaacaacagcaaaatattaacatttacatcaagtaaacagtatactagagaaataaatgcataagaagactatgctaaattgactcaccagaaacaaggaaaaatggtatcttggagcagttatcaacaaaatatgttgctggtccaaatgctggtgtcaagaggctaagacagaaaaatacagcatgtgctaatccatggcccataccaccagctgcaaacaattgttacaaaatttatgagcaaaaacctgcatattatgaactagaagatgatatatgtttcaaagaaacagatgcaagtaacttttgaatgatagatcgactcttccttccataaactggttggcacacttagcagaaaatataatcttcaaatacagtatttaaaatgtttaactgatttaaaaaataaatcaagttttacatgagataaattatattcaatggctatgatttgaatatatatctgaaggagatgtcattagcaataactgtttcagcttttattccttgctaagatgtcaagaaacaaagcaccacacgcgacag

SEQ ID NO: 15598 - DNA, 15322 bp, Cannabis sativa
  modified_base (10717)..(10718): a, c, t, g, unknown or other
atcaatatgaaaaaaaaaatagattaaattttttttctgaatgtcgaaacaagtaaaaggtgtatcaatacatctattttaagggagtgcattgtagaatcagcctataacatttaataatttttattagtattattatgatatttagtacgatataaattaaaaaaaaattattttattttagtttctaaattatgaagattttttttagaactttctaaatgtgaaaagaggaatgttaatcataatattttagttaatctctatgtccgaaattatatattggaatattttttttaattttatttcataggtatttgttatagttatagttatagtatcattcctgtaaatggtaaatttttttgattagtttagaatactaaaaatagagtttttaatattctaatttaccacgcgtgtttaaaaaaaaattaaatctatttttgacacggtaaattatttaaaatcttttaaaaatttacaagaatgatgttataagcataacgaacaccatcatgaatttttttttaaaaaaaaaatataatcacgtgtattttctagtatgaagattaactgaaaaattataatagaaagttaacggtatcacttctcaaacaaatgaagagattaaagaatttgaaaaaatgaaggaaaaaatgtgacttctaatttacaaaaaaaaaaaaaaaaaagtagtaaatagtgaatagagttttaaaagagccaaaagatgatgtttaaaaggtacccaaaagaaaaaaaattgaagttgtttgccaaaaatgtcactttacagaaaaaaagataagaaaagggtcacactaagaataatatgaattttgtgaatttcattaaatcactgactccatgcatatgaaaattaaaaatcttttttgagaaaaaaaaaccaacccaaattaataaagatgtgatttttaaggaataggaggatgaaacaatgagttaggaaaaggaaagtttgaaacttgtaacttgtagagtccaaagccacgtggcaccatggcagagctgctcatagaaaactgatcccaccactaccaacgctcctctcttcctctccttaattcgaaatctcagcacaaagcgcgaaatttgaagcaaaaaaagtaaaagaaaataaaaaacaaatctttaactattattattattattatattacttgtttgaattctttgttaatctccaagtcttcttctttctctgctctgagagagagagagagagagagagagattcagatatgaagaagggtagtagtagtagtaatggtggtaataggagaaatgcccaacaagtgcttttcgatctgaaacacagagtggtagttgcattgaacaaggttggtgatagagatacttaccaacttggtgtagatgagcttgaaaagactgctcattcactaaccccagatgggatttttccatttctgtcttgtattcttgatactgattcagaacacaagatttctgttcgtaaagaatgtgttagactcatggggagtttgcttagataccatcctccacaacttatttcaccccatcttcctaaaatggttaatacccttttgaagaggcttaaggatcctgattctgttgttagagatgcttgtgttcagactgttgctcttatggcttctaagtttagtgatattgatagtgatggtgatggtgatgtggatgggagactctttgttactcttgttagacctctttttgaagctcttggtgaacagaatagacaggtgcaatgtgggagtgctttgtgtttggctgctgttattgacaacactcataatccacctgtttcgcttttgcataggatgttgcttagaaccactaagttgcttaagaatcctcattttatggctaaaccttccattattgagttgaataggagcattatactggtgagttgttcttctattgttgtgattgtgatttaaaattatgaggtagctgaggcataaggccaataggccgatttatgttgtttttaatgctccatttgcagtatttgtgtttgttttttaatcttgattcaatggtttggtttggttgttgttgttgttgtgttttgcttatgaatattgctattgttgtcattgtgatctgaattaacttaactttcacattttatagtgatttgaaattatgggaaattttgggctctctagtgggaccaggccaataggcctgatttatattgtttgtaatgcttccattttcactgtttgagtgtaaatttgtgtttttctaacaaatatctttgattcaatgatttgggttggtttgatttgatctccacctaatggagtctataataacaaaactgaatgacaattacagttttactaacatacattaggtacttatgctgttaaaaacgtcattgagtttatgccaaatacaactcaaaattttgaatacttatgccgcaaatgtcccttaaaattatcgaaaattttggactctctggtgatagctgagggatgaggccaatagacctgatttgtattgtctgtaatgctcccatttgcactgttagactgaaaatttgtgttttttttcttaacaaaaagtttgattcaatggtttggtttggttttgttttgatttgatctgaatatgtatctatgtggttaggctggaggtgccccaacacagaacatattagtaagtgcaatgggcagcattcaagaatctctgaaaagcaatgattggtcaacaagaaaagctgcttctttagcactagcagagatagcttcaagtggagcttctttcttaggatcccttaagccttcatgtgtaagatctttggagtcatgtcgtttcgataaggtcaagcctgttagggacactgtcttacatgcccttcagtgttggaaaactcttccaggttctcatactcctcaaccttctgaaactggttcttctattaaaggtcaatacttttcttcattacacagtgttttttatgtttttattgtattaaactcttttgctcttataatggggtgtctgcttttatttttttacagaaaattattgtggtgatgagtacagtgatctaacaagtggtggagaattgggttggaaagatgttgctcctaagaaagtaaatagttcaggttcaagctctaccaaggcaaggattcctttgtctattagaaagaaatgtaatcaaacttatgttcaaaattcactcaaatccaacagtaataacaatgatgatgatgatgatgatgattggcgtatcgaaattgctgtcccgaagacaacaacacaccagcagcataatctttctttggctgatcttaacaatgaagaatctgagggtagctcggttacgaaaaattatgagagattgagtactgatgtgacaagcttgcaggatattggatatgaatatgttcatatggatgacaaacaggaagaatgctcctcttcaatctccaatgttctttctcatgattttgaaaccaaaattgtcaaagtttgtcatgaaggtggtggtttgcctaaggccaaggcaacagaaagagatcagaaatttgcacctgaaaacaattgttgtgatgaggaacagatgtatcctattcctaccaagattcgggaccgtgctagtcttgattcaactgtgactgagtctgctccaagttcacattgctgtttgcaaatggcgaatgagatgaattgtatacgaaatcaacttgtgcagattgaagacaaacaatcaagtttaatggatcttttacaggtaaaaatttaataaagttcaagtctttttgtgttcattgattcaacattatggttcattaagcttaaagattcttactttagtagtgtcatgccatccataacatctgcactggcctataatttgtaccttggaagaacatattaggatcccatgtattgaccaagtacggaattggttagcagtatgtaactatttcgacactctcctttcttaggctaactttttagagtgagttctacccaagtagttgtatcaaatggtattagagtgggaccgacattatggaaggggcgacctgtggattagactcagagtaggccatcatggatgtcggctccaaaggtgggtatgttgttagtatctcacactgaccaagtatgagattggttagtagtatataattgcttggacacccttctctcttaggttggaatttggaagtgaattccaaactcaagtgggttgtatcagaagaacactatgttgtttttttctctcatacactaatggtttttaaaaataactattttttctttatttgcaggtgttttcaactgggataatggatactttgtccatgttacaatcaagagtggttggtttggaagatgtagttgataggttagctcaaaatattgtacaacgagaaagggaagaactttccaatttaacaacctcaaagctgataaaacaaagccatgtcttgcattctccaagactctctacctcatgcactcctaggccatcagtagatagtcaaagcagacagccttcattgctgtcagcgaaaagcaacgaaaactggggcgaaaatgtatttgaaagtaaccttagaaacacttcaactaaacgaggaacagaaatgcgggctaatagtactaaggtaaatttcagtaggaatcctactggtatggacacccaaagatgtcttaggcaagggacagggagaatgggatatggtcaagtgagaagtgatcctattttcggtccaacttctagtattacatctagaagaactggtttggagaataaaaatagcctctggaaacgtgtgaaaggccttctgtgtgaaggagaccttgaatctgcatacgaggaagctctttcttctcgcgacgagcaaattgtaatggagctttttgacataactggtcctgtgctggaatgtttatcctcgaaaatggtcagtgatgtgctcagtactttgggatcatttcttcaagaacagaagtttacaactacattggttccttggttacagcaggcaagtctgatctaaattaacaatgagtttcaaccttgaattaacttttggaaatggttgaaagtctaacactttgttttgtaggttgttgacttgagtactgttcatggaccgaattatcttatgtcgacggtaaaagcaaggcaaaagctgttatctgcggttcaggaggctttaagaatggaattctctaatcctttggagaaaagatccatgaatcaggtagcagctaagctacaccatgtatggggtaagtttcttggttttggtttgaagcaaaattgtatattgaatggtatgaagtatttatgatcttctcttattctgtaggaaaatgctcttgatagattaatcaaactcaaggttatgatgatgaacttgcttcttcttccgccggagatgttatattatggggaccgaatcgattggatgagtgaaaatagtgaagcaagatgctgtgcaaatctgtatttttcacactttattatgaggggttctgagacacctctttttgtaattttgtggattattattaatgttattttgtccaaacaaagatgggggaacattaaaagctttttaatttcattaattatgcctttgttttaaggcttgttctacaagagcaactagcttaaaaagaatctcaaattctcattttagagaatctacaaaaagaaaaagaaaaagtagcaaacatacaacaacaaatggatagagcagctgaggagggatcttatacaattcaactttctatccatagctcatcaacgtcttgtggaagccgatttctcatcaccaggaccacaatccaccaaaggggattggttatgacgctcaaaaaagtcgctcggtggctcactcttgctccttccatttcctggcttgctcttaggatacgcttctgttgtctttacaccgttacttctatacacacttttcttctcttcgaaagatgaaggagcagcaaccttgggagcttcataaagagttataccgtttcctccattttgaagcaattcttcttcttggttttcctcatttgtctgaaaggcctctaaaatttctaccacttggctcattagaggcctgcctttcgggttttggctaaggcataggtatgccagatgggctaccttcattgcagttttagctgaatactgtccttctatcctagggtctaaaatccgaagaagcttcttgttgtggtttaaaagtggacgcgcccactcaacaaggttgtgttctcggctaggtctgctcttgtccattgctcttcttccaattagcatctcgagtagcactactccaaatccataaatatcgctacgcgctgttaaatgtcctgcaaatgatcaacacaactactcagttttcgagacacaaaaacaccaaaatcactaaacccttcaacatgtagttatcaatgcatatatcataacatgtgttcaagtcttcaaaggagaaaaaatgtgaaagcttcaaatttgattgattcaactcacctgtcataacatactcaggagcagcatatccataagtacccatcacacgagtcgaaacatgggtttgatctcccataggaccttcctttgcaagaccaaaatctgaaagtttcgcattaaaatcctgcacaattttttccaaccaaactctcactttcaacacatgattcaagcttgttttaattatagtactcaactagtcccaaccccatatcccaaaatccaaaaagaatcatgagaaaagtaacaaaccccatccaacaagatgtttgaggtcttgaaatcgcggtatatgataggtctttcagccccatgaagaaaagcaagtcctttagcagcatctaaagcaatcttcattctccttgaccaagttagagtgcatcccactcctatgaccccaaaaagacaaacaagacacaattaaaaacaaagcatggcccatatcttactcctccaagtacatacatatatatatatatatttatataatatacttgtaaaggaattgtgtggatgctgaattctcaagtaagttctctaaaccaaattgcataaaacaccaaaaacttactacggaaaagatgtttttctaagcttccacttgccatgtattcatacaccaataatctatgttcatcttcacaacaataaccaataagctttacaagattatcatgtctcaactgaccaagatagttaacttcagcctacaaaagcaaaacaaacaatgaaaatcaaaacaacacaaaagataaatgaaatgaaagagaatggtgaaatagtgatatagttaataatatatatatatatgtatatgtaccagccattctctgtcaccttggtagccttctctattaagttctttaatagcaacttgagtagttatgtaaccagaacgaacagaatcatcaacaagtcctttataaacaacaccaaaaccaccctcaccaagaatcaaatcagggcgaaatctcttagtggcaagtctcatctcctcataactaaatatgtcaacattgctgtaaccaggattttggcgtagatctttgacatcccttggagccaagggagtgctactactactattacttctatctgcttcacaagggtttctcacagatgatgctgcaagtcccacttcaaaaattttacaaagaaaaaaaagataagttagttagttagttcataattctcttaagcattaatgattcaaaaggtcagttatggaatcaaaggtgggggctttaatgtcaaaaaaaaatcagttatgggatcaaatgtgttgcatttaatgcaaattaattaaaaaagcaaactttttggtgttatctatctttaaatagttggaaatgaagtgattaaggaaaataatataaagggcagttattttcgatcaaacccagaaaaaagaagagaaaaagtttgaaatttgattgaaaatttgaagaatcaaagtttggttttttaatttttatgagataaaatgtgaattacctggaatcctcttaatggactggtgaggatcatcttcaatactgaaacaaatccccatgagatttttgaaactcaaaagatgtcacatttcatagtctccgatcgagaatatgtttcttcattcgctggatttcgatctgggtcactggccaaccacaaagattggagagagaaacagacaagagttgaaaatggggtcagtcaatgggtcatacaccaaacaaatcatttgggctttgattttcttttaggcccatcttgtctatgtttagaatattatttttattttagtgattttttgttagaatttcaacaattatgacattttcttttaaccatattattattaaactgaaatgattcatgatattgtttataatcagtttcagtgaaaataagaagaaaaggttttcataatcaactaacctaacaataataagtattgttatattttttaagatattataaattgttattagtagcaattagttaaaataacagtgtacaacttaattaggatattttttcatttagaaatactactaggattagaattagaataacgagtcaaccaatcggtggcttgattcttccatcgtttgacaaaataaaataaaatgaaaaatattgcaacattactgttaaccttaaaaatatttatattgagttgcttccaccgcttaaaaaacacaacataatagttgtatcagatttattcaaccccttaatttgaacactcaactattatacaaggtacataactccaccactagctaatcgtagtagtaaaaacttaatcgcagtagcaaaaacctaattattaaaactgttaatatcgttattctgttatgttagttaggagatttagtcggtggttgtgtactctgtacacagtatatataattgtatctttccttgccattgtatcattcaatattcacaatcaataaagattctctgttttctatattgtaatatggtatcagatgcaacacaataaagctccaagaagttccttgaagcttttaagaactcaacaatggtgagaactagagccactacgtcagctaccaccactgttcccgtggtcgatgccaccatagcccagccaccatcgcacactttcgccaatacacaaacacatattgattcgtctcaggcttctgccgatcctcctcctcgatctaatcctatcgaggttcctctcgttcctccatcagatcgaccggcatatgaagatgtcagatctccatactatctcagtaatgccaatcatctaggctcagccctcacgacccctgtcctcacagatcgaaacttctagccatggaaacgcgacttcaagctctccattggcgccaggaacaaaacaccatttcttgaaggtactcttcctcaaccccctcctaatgataatctctacagttcttaggttagatgtaatcagatggtgatgatgtggatcctccactctgtgtcacctgaaattaaaagtggtatcatgtatcttgatactgcctcttagatgtggactgtcttaaacaatagattcaaccaaggaaatagtccaaaactctttgaattaaatgaaactctcacctatcttacctaaggtgatgattcagtgagtgcctattttactaaactaacaacgatatgggatgaaatcaatcaaattcgcccttaaatttcatgtacttgtgcagctacaacacaaaaccatgcccatctcaatcatgaccaagttcttcaattcttgaaaggactcaatgaatcttttcatgttgtccgtgatcagattctacttattgaccactgtccttctctcaacaaggtcttctccatggtcattcaccaagagaggcaaagaacattgggtaatagaaatattccaccactgcagctgctgctactctccctccccccagctgttgatccaaatcccatggccaattaggcattcaataataaaaggcctcgaccccactgcacacattgccaaaaagcaggccattataaggacaaatgttattttttgcatagttttcctcctagctatggaaaaccaagaaccagtgacacacctaatacaaataatcgaaaactagacatatcacagacctcatgccaagccatgcctaatcccagggagggccgacgggtgtggctgaaaaaaaaaaaaaaagataactttcaacggctaaagatttaggaacgagaaatcttagtagacgatataaaatatttggagtttttaattattaatacaattatattaatgtgatttgctcttatttagtttgtgtgaaattgagtatttgatgataagtttattttttatcgaggttgatttgtatttttgaaattggaaatttcattatgatttatattattaataaacaactttgataaatatatgctagaaaaaaaaaaagctcaaaaataactcaccaaatggttagaagtattgctatattaatttgctaaaaacattgcaaaatttgtttggtatggttttttttttttttttagagattgtttggtatggtttggttggttggaaacataacaattgatgattacattaacaaatgttaatcgacacaacactatttaataataataataacaataataatacttaaaatacaatcgtatttttataattttnntttgttatttttgtatatttgtgaaataattgaaattgggctttgtagtgggtcagaaatttgaaagcccataaaagtcgaactgggccggcctggtccaatccatttccaccgattacaaatagagatgagaagggttactagggtttcacccttcacttttaaagaggtctctcaaaaccctagtttctcccattactcactcagaagcgcctctgctacattctcttcggcggtacgattctctcatttctctttaacctctgctttcatttccattgctaaaatccattgatttacttcgttggttctaaattttgttgtgttttggattttttttttgacattgatactgttagaacctcaatttgggtttcgatctcaaatactgttattgttatcttctatgcgtgattaggtgaaattaaagtttagatcttacttgtgagtagaaaaaaaatggactttgggttattaccagtttggttaatttgattaaaagtttcattttctatgatttgattttttagatgtgaatttttgattgttatgaagctttagctttattaagtttagtgggtttgtctgtagagatgggtgaagtcaaggctttggttccagagtccgtcttgaaaaagcaaaagagagaagaagagtgggctttggctaaaacacaagaacttcagactttgaaggtgaagaatgctgagaacagaaagctcatttacaacagagccaaacagtacgctcatgaatattcagagcaggtagttagtttaccctattctatggtagattagggttatttattattgattatttattttaattattaattgtttgctattttataatggttttttaggagaaggagttgattcaacttaagcgtgaagccaagttgaagggaggtttctatgttgaaccagaggccaagctcttgttcatcattcgtatccgtgggtatgtattgtggcttattgatattgatacataagttttttctgttctgggtattgattctgtggaatgattttggtttttccagtattaatgccatgcacccaaagacaaggactatcttgcagctcttgcgattgagacaggtaaagcattatttgtgttgtgaactatatagatgccattgaaaatttgtctttgttatagatgtttgtttgtgttagcttgtttcttttagaagtggagaaatatggcttttcacttcatattttgggcataagttggaagtttgccatactgtttttgttatgtttaatttacagtttgtcatgtaaatttgtaggtataatccactgttcatcttacaataatatgatacattttccattttaagtgcatttctgtaaactaattttgttttggttttccatttgctttgaatgccattaaaattttcagtatgatgattgattttctgtctttcttgaacagattttcaacggtgtgttccttaaagttaacaaagccaccatgaacatgcttcacagggttgaaccatatgttacatatgggtatgtatgagtgcactgtttcttagtttttgttgttattatgcattcttctgcttcaagtggtctgattagttacttttgctttattttagttaccctaatttttacttttgctttattttagataccccaatttgaagagtgttaaggaattgatctacaagagaggacatggcaagctcaacaagcaaagagttgcattgaccgacaactctgttgttgaacaggtttgtggatattctcgagttctgtctctatttgtcttatttttgagttcttggcaattattctaactcccttgttattacaacaggctcttggaaagtacggaatcatctgcaccgaagatcttatccacgagatcaccactgttggacctcactttaaggaagccaacaacttcttatggcccttcaagctgaaggcaccattgggtggcatgaagaagaagaggaatcactacgtcgagggaggagatgccggaaaccgtgagaacttcatcaacgagctgatccgaagaatgaattaggtttggcagtattttattgctcaaacagatttatgagtcttttggtttattatgttagaacaaatctaaactcaaattttgttttatcgtttaagttggacgaatttgtcacttttttatttttggtatttaaaggtttgaatgtcagaatattttgtaggcttgcgagtgttaaatgcatttgttataaattttattattggatgatcgatctatatcccaattttacttgaccatataattatatttaggcaaatttagtggttgcaagtaacttctctattcatatgctttgattttcttattactaatatatttcttttgctaaaaatctgagttgttttttttttttttttaaaaaaaatgtttatttcctaggtttttatttttactcctaaataaagctagattcaaatgcaacaagtcaaatcctttttaagtaattgggaaatttaaagttttgataaaaaaatccaaataatagccttatccttattttggtcaatctagttttgaagtaagtttaattatttaaagaagcaagaatttggtgagaataaaagattgaatttaaagttatttttacaagaattagagatgattcaatttactattaaacatattcttcaaacactttgaaatataatttagcataatatattgtacaaatacgtatttaaccaaaaatagcattgtcctttattcataagaattacacagccaaactacctcacatgttgttagtattgagcaaagagggttagaagtacaaccaaacctctaaattttaacaattatgatatcttcaaggaaatgttttctaggtggggtctaagtgttatattgttattagtgttattaattattggatcttctattgaaaaggtacaaataatgctaatagagttacacacaatacaaaataattaaagttggagaccgggagggaaattaggccactaaacttgagagaaatctaaagacaaagtaatataatttagagaatgagtcataacattatgtttaatgtcatgtacaattgtaccaaattcaatagacctcttatcattattagagataacttgcaccaataggaggcaattaagcctcatataaccaagcctgagacaaagaagtaggccctgcaacaaagtagccgcctccgccacatgaggagcaacccaactgtcattagggaagtcgccgagcaaaggaacttcctagcgcatgcatcaccacctccccaaggctaatcttcgagtcttgatctttaatgctagcatccgcaaataaattgatatcacccaacacctaatatattttaatttaataattatgttgaactactttttttctttattattattaaataaataaaataattataaatatgaaaaaaacaggtgaggaagaattaaaaaaaattgaagtctataaagaaaaaatatcaaactaacaatgggaggacaagagtcagacactttggaaataaaaaaatgaagatagaaaaaaattactgttattgttgttcttcccttttttcagttttcaagggtaagtattcatagattgctctcattcttccctctcttttactttgtattttattcttctctattttactactcatttatgggaatgccctgactctacctaatataaacttatggaatgctctcgttctattaaatttatagatgtcctcatccgaggaatgtactcattccataaaatataaatttatgaatgccctcactccataaataaaaaaaaatgtcctcatttatggaatgctttcatttagagatggtaattcgtgtttgtgggtcgtgttcatgttgtgtcgaggcttaagtattacaagaaaatatcaaacccaaactcgattcatttattaatcgtgtcaaaaagtaaaacctaaatccaccgggttgatctgacctgacccgtttatataaagaatcatgttgaattttggtaacaagagaacaattgatcaaacatcagttattacatagaatggtttttcatgtgagtatttggctagacaccactctagtccatggtcaaactagctacaagggcaatgttttctctttattaacacgagttctcaaatctatacaacaatggcgtcttgcttcgagatatctctctcaacagtggacataagttctctcaaaggctctctctctagataatctctctatttaccgttgtgagggaatagaatgaatgaaatgagaagtaattagagccttatatacatagtgaatataactaattcagctccctaggttttgtttcccaactgtcataacaaaaattctattatttattctgttatgagatttaataatacctaattgtaataaataaaattattgtttttttggctatatcaagaaatcgactatttcagaattttaaatggattgttttaataaaatattcataacacctaagttcttatacacgagtacaccactctggctgcttcttggattgatgactgagcctacataccaacacgagtgtttcca

SEQ ID NO: 15599 - DNA, 2666 bp, Cannabis sativa
ggggaatttttaacggctaaaaagttcaaggaacatgatttaatacatgtcaaagttcggaaaaaaaattactaattagcctacataaaatgtagaattgtgttgacgtagttgtgtttgttttgttgtgcgtaattacgacgtacatactatctatctctctctttcgttatttatatatataattcccacttgatgttttaagcacattagctcctcgtggttgagtcagtacatagtaaagtgtgtcaaaaaaattaggacttaattatatataaacattaatttaaaaggcttcaatatttatgattagccagtatgcttaacactcattaacaccacatgcaagcaagcatctatgttttatcctaagcatatatattttaatctttcttgtctccgggagtggatctatgtgctgcatatgttactatgtttttttatcatcctaaatattaaaccatttaagtatatgaataaaattagtattatataatataggaaaattttataatacattcccttaaaaggaaaacactgatacatctctatctattttagtatccaaaataattttttagtcaattttttttctcatggtcatgtaaaatatacttatttaagacatcctgtaaaattttaagaaattcgaaaaagtttaacgtacacgccgaaaattgcattcaaacagtgtgttgcacgcgtgactattaatttattttatacgcgtgtaaaatagactgtttgaagattattttctatattgtaaattattccgaattcattaaaattttgtaggatatcttaaatagctataacgtacatgaatatgtaaaaattagactaaaaatttcttttgaatgccgaaataagtaacgggtgcatcagtacatctctgttaagggggcgagtgcattgttgaatcaccctataatataaaactccccacttggataagaaaattataaacggcactactccactccaccaactactatttcatggctcaactgctataaataacaatgacttatttgcacaatccaatccattaacaagactactaaaccatctaaaatggcttcctcaatcactttcacactcctcttcttctttctcttttccgcccttacttctcatctctccacagccaaaacaacaccattccccaaagctcttgtcctacgcgttacaaaagacaccactactcgccaatacataactcaaataacccaaagaacacctccagttcaagccaaagttgtcctagatgttgggggcgagttcctatgggttgactgtgaaaagggctataaatcctcaaccaaaaagcctgtcccctgtggctcaccccaatgcgctctaagcttatcaggggcttgtactattagtgataatgatccatcagacgtaggcatttgtagtgtgatgcccaataaccctatctcatcagtcggaacaagcggtgatttattccaagacatattatatgtccaatccacaaacggattcaatagcggtaaacaagtttcagtacctaatctactcttctcttgtgctcccaactctctcttggaaggcctctcaaaaggggctgtcggaattgctggcctgggccggaacaaagttgcgcttccttctttgctcgcctcggctttcagcttcccaagaaagtttggtgtttgcttgtcccctaattctaaggtgtcgttttctttggaaaggagccttatgtgttgcttcctggtattgacgtatctgaccctaagtccttaacttacacaccacttatccaaaaccctagaagccttgtaacaagttttgaaggaaatccatcagccgaatatttcatcggagtcaagtccattaaggttgccggaaatcccttaaagttcaacgctacgctactaaccttcgacaacgaaggcggtcatggcggaactaagataagcactgttgatccattcacaacattggaaacttcaatatacaaagccttagttaatgcatttgtgaaagctcttggccctaaggttcctagggttaaggctgttgcacctttcggagcgtgttttgatgcaaaacacataggcagcacccgagttgggcctgctgtgcctcagatagatttggtattgagtaatgataaattgtggtcaatatttggagacaattccatggtaagtgttggtaatgatgtgttgtgccttggattcgttgatggtggtccacttaactttgttgattggggtattaagtccaccccaactgctgttgtgattggagggcatcaaattgagaacaattttcttttgtttgatttgggtgggtgggtgcttcaaggcttgcttggtttcagctcctctcttttgtttaggcaaacaacttgttctaatttcaactttaattctagtgcatactagaacagctaattatgtagattatcgatcgatcgacctcattaatatgagtttcatttttttatgcatggtgatagtgtgcttcgatcggctgctgtaacttcctgtgtctggttaattaaaagtatttaaataattagtgtcttttggtttctatctactctttcttgatctcttgtttatctttccatatatacacaatgtatataagtttttcatttttttacttttaaaagattttttttt

SEQ ID NO: 15600 - DNA, 5171 bp, Cannabis sativa
atttacagattataattagcacttaacacacatttattattatatttttaataaaaaatacaaaataatgattatatatgataacatgtgtacatagtacttaataaagacaatctttaatatgatacacaacttgtggtatgtcacatctccatttgttaaatatacataataaaagattttggggtcattcacaatgtgattacaactaacatatatagtatatatatataatataaaataagatataatcttgatttaattatacaaaaacacagcttgggtaacctaagttagccataatttgaaaatttacaatatattatgattacaatacaatttttgaccattcatctagattgtaaccataatgataaaataatcattagaatacaatcttgatgaatagtcacaaaacaagactaaaccaaaaaaaacaaacaacttgggttggtggaaatggaagattggcttattgggttaattaaaaactcacataaaaattaagaaaaaaaaaaaaaaagaagaagattagcaaaagattgaatttttcttcattcttttctttctttttttgtgtatgaaaataagaattgtgattatggatttggggtgaaagcaaagttgatgaaccggtctctgtggtgatttgttgtggccatagcaaaaggctcaaactctatatctacaaaaacaacatctctctctctctctctcggtttcgaattcgaaggtggaaagaaccacatttcttctttctacttgttcttttttttttgttccttcttatctttctatatattgtgttgaatcgcaaagaaacccgaaaaaaaaatttaaaataaactaaaaaatgcattcttttttatacacgatcgatcaaaatccctcgacactggtcctcctgacagttgacgacgatgatttcctactttcctgtcgatccagctcctctaacgagatggttgaggaacaagcgcgcggtggaagcgaagagggcaagatcaacctccttgtgggcgaaatagatggcctggctcgagaaggtggcgacggggagaaacttaatctgggagccggtgtaatgattccatttagacttggtgatttcgacattagttttccagcaaatgttaccggctcttgtaagggaaaccgataagagtacttgaggtcttgtattagcttgagatgatccactacagttctcatggttggtctttcggatggatctttctgaagacatctttgtgcaatgtctgctactgttcttgctgctttggaggggaaccggctttttagctgaggatccataatcaacgaaagacgatggtcgtcagctaagaaaggccgactccacttcactaagtttctttcctcctttggatgacggctatcatgattcctccgccctgtgagtaactccaaaaggacaattccaaaacaccaaacgttgcttttcggggtgagcattcctttctctaatgtctcaacagaaagatttgctacagcctgtatatgaaaacataagatgaaaatcaatcaatctttccaatttcgaaagcgatatgcattcattcaatctaatcagtaaagagagtataagaaaacttacaactgaattagtagaaatctcggtctcgggaatatgaccaacacaaccatatccagacagctttgcactaaaatctttgtcaatttgtatgctcccagttgaaaattcattgtacattgcctgtagattcaacatgtatgattcatgttaagcaaagattgaaacttttttgcatagcttgaaatcatcgagcggggtccataaagggttattatctcaataaagtaaagggaaatgctttaactttttttaacagtcaaccctaagaaatgcatcatgaacaaacaacactcgattttcattcgtttcgtgagaaaaaatgcaacataaagttaaagttttttgattacctggaaaggcccttcttcgtgcaagaaagtaagaccttgtgcagcacataaagcaattttcattcttgtattccaatcaattggtggcccatctggtctaccatagagtaggcggtccaagcttccatggaaaagcctctcatagactagcattctttgatctgaaccctcacgtgcatgaaaaccgagcaatttgcagaggtttggatgttgcaaagatgaaagagtattcacctcgtttatgaactcctttaaaccctgaaaaaacacagagcaattgactacattgtaagataccattaaaacgccatagcgaaaaaaccattgtaatctcatttcagggaatttgccaaactaacagcattgaatttacactgtgcgaccaaacatgattattttgctaataaaagttttcataatgactattttcacaacactcactaactgtgcctttctttaaaatcaagcaatgtgtttagctacattttcactaaccatgatatcaaagattgtacaatgaaatgtgagttacctgaggtgaaggatgaagccgagtaaccgtagcttcaaatcgtttcgagctagaagcatcatcaccaaatgaagccttgtaaatgactgaagaaagaccttcagacatacatctatccgaagagaaattatgacaagcagataatatttcatcatactgaaaattcctaagtgttcccgttgctgcagttggaggcaatggcaacggtccactagcattcatcgatttgaaactcgagcttccaaagcttctcattgcagcaggggcagcagcagcagcctgtggcgatgggagcgggagaggttgaggactcggggagcgttgttgttgttgttctttagtggatccaatcctgtacttcaattcttcagcttcttcatactccattgcagctaaagcatcttgttcagctgcatcaagtgttgatggagcagacaatgctcgagctcgagtattggtgattctactaacagggtgaattggctttactcttgtcctaaaactagggggagcagactgtagagttcgggtttggacttttggttcaggtaatatagttggggcttgttctttaagattgtttggtttaatgtaaacaggctgttcatatctctttttcttactctttagaactgtgaaacaacccatgttttgattatgaaatctaataatatcaatctgcaaacaaatcaaaaacaacatagtatatgtattagttgatgaacttgtacaaatgatcactttaggaaaacaagaactgagaattgtgataattcaacatagtaaagaatcaaaatttctgcaaaacccaattggctaaaacaacaagaatcaaagtgaaataacattatatatttaatatcaaattaagaggtttaaattaaggaatattcatactaataacccaactagactagcaaccaaaccttagaacataatattatttattaaaaaatttaatcaattagcctaataaattgacttatatcactacaaaatggaaaaaataaaaattggataggtatggcaaccatataataaaaattatatatttatatgtaatcatttaattttttttttaatttaaaaatattcccatgagaacaaaattcttactttgcacctaaattataataaagtgaaagaccccaaatcacttaatgcctaaataaaattccaactatggaatttaagcatattaatgctgaaattttacaatataaaattaaaacaaaagaatcttaatataaacctcaaataataaatgcccccaagaccttaaaaaaaaaaccccagatccacaaaaatgaaaatttcacaaaattaaaaaaagcccaaaatccacaatccaaaattaacaaattccaatacatgaaatcaacaaaaagttatcatttttcaaacaaaaaaaaaacagtagccgatcatccacaaaattaaaaagttacaaaatacatacaaaatcccaaaccccaaaaataaaaatctcaactttaaagaagaagatgatgatgattattatacaaactagagttggggaaaattaccagctcatgcaagttgggaaaagttgggaaaagggtgaagaaatggtgggatttggaatctgtggcttcgatttggtggaagaaaaacaccttcagcaagtcaaagaaagcagatgcaaaagctgagaagagaagaagtgagaaagaaagagaaaggagagatctttgagagagaaaagaatatatgagatgagagagagaaagtagagagagaaagagaaaatgggaatggagcccaatgagcagtggtcaaacctaaccaaaaaaaaattatatatttatatctaaaaaaacaaaccctaaaaaattagaaattaaaaaattaattttttttatttaattgttaattaaattaaaattaaaaattaaaaattattcattcattcatccaaaattttatcttcttaaacaatacaaactgattttttctttcttttttacaattttacccttttaagtttggattgttatattttttagtctatatttatataattatttaaatgactttgaattgaatttctcaaactaggttgtttttttggttgaagattatgtaataaaaaaaaataattgttttgaattttatttataagatattgacacatgggataggagtagagttttgaaatcctagatttaattaggtggcattgaattgagaccaagatttgaaatcatgggatataacattgtttttcaataatatattttgagatttttttttgaaaaaaatacaaaaaaaaataaataaattatttgagtgtttattattgaaattgtgttggggatattgatttattcatataaatagaagatactttcatttattattaattgagttttgagatgaatctcgcaatatggtatcaaaatctaaattaaattagaagtgattaaaataaagtaaaataataaaagaagaatattaatttgtcggaatgaatcttatagtaataaaattatattcgatttagaaaatgattcatttatcgtaatgaattattatatggtatcagaatcttgtttgatttagaaataataaaaatataatgtttaatgtcaaaatttagatccatttataaaaacatagattattctttttactcaattaattttgagtaagt

SEQ ID NO: 15601 - DNA, 6418 bp, Cannabis sativa
  modified_base (5650)..(5651): a, c, t, g, unknown or other
ctctctctctctctctcgctctatataaatatgtatatatatatttatatatataattgattgtacatgctaatatgctataggaggacatagatagcaaaggtcgagaatataagttagaagacatgattttcttaaaagaagaagaggtcttttcgactgccaatatttctaatgttcctgcaagtgaagaagataatacatctaagcaacctgattcctctacaaaacaagttgatgatagcaatgaggcagtggaaggaaaaaatgctaagagaaaattgcctgatgaggaagctgctaagaaggtctgctgatcttgtgctgctctattgtctttatatatttgaatttgatacttttttggttggtttctgtgggttgggagggatagccatgttttctttttctttgtccaaacatttaaaccatatgatctgttttgttgaactcattggtttcttatgtatcgtattttatatatacttttacaggaacccaataagcctcctgatagctggtttgaattaaaagtaaatactcatgtgtatgtgactgggttgcccgaggacgtgacagttgatgaagtaagctttcatcattgctatttctagcctgaccattttactttgggtaatatgctaatatggtagtttttttgcaggtggtagaagtattctccaagtgcgggataataaaggaggtatttcgtttggtttaactaaaacaatctatgtttcactttttaattttgtggttacctgcatttgaaaatcacgggaagtttgatcttttcattaccttcaaatttctagaagttttgttgttatgtggagatgatgtttggactttgtttctttgcataacaagtatatatatcaaagttcttattatgcctcccaaacacacacacacttggacaccaaactatgctattcttctgaacgtttagaattccctatctcattgagcacatttataaaaaaaaattaggatacagaaaccaaaaagccccgtataaagctttatgttgacaaagagactggaagaaagaagggagatgcacttgttacatatctgaaggtaataactttcatatgctttattgtgtgtgatatttgaatatcagtctcttcttttggctcattattttgtgtgtacttcaggaaccttcagttgctctggctttgcaaattctggatggagcaccttttcgtcctggtgggattccaatgacagtcaccccagccaaatttgagcagaaaggtaccagcttcgaccctcctcactattatcaatgtgtattttcatttcgctcatgcttattgctgttgcattgtttcacacctttcctttccttacattttattttatcttcttttcttctattaactactgttaatactacgcagtaactcatactaggctaaaatgactgtttgatatacattactgtacaccaaacattatgttctagaaaggaactttgctgcttgagatgtcattaaatgactagttttgttgtcttcataaggtttacagtgacccactattgtaatctcattaactcttaaatgcagggaatacatttatttccaagaaagttgacaacaagaagaaaaagaaacttaagaaggtggaagataagatgctaggatggggtaagcttttaaatgctgcattaatagttcttttattaatatacctttatatgatattgctgaaaaaatttctagtgttgcctaatagttccagatcctagtgtgctattaatttgatttgccttttgaacttacctgaattttagtgaattttctcagtttgcgctcattatatatacttggaagcagtctttctgtgaactatgctatggtttttacttgtttcatcaacatagttattttctgtatgacacaggtggtcgtgatgatgcgaagttgtgtattccagctactgttgttcttcgttatatgttcatgcctgctgaaatgagggtaggataaataattttgttggcttaaaactatattctcaatggttatttactagcctgctgcactctagttgtaatgtgaatttttatactaacgaaaggatccactgttgctactgactgattacgattacacacgctgagttttgagttggttacttaggaaatctctatgaaaaccttaacgatgtagctactgcatagtaattctttcaggaatttcgggatttaatagttggatttctattctgtcctgtccatatccacatattatgattataggataacactgattttcttttttaatatgttctttttgtgtactagttcacttcaatagaaatgatatttgtgtgttgtgtgggggaaaggatagttttgtttcagtttctttgaagaaaaaaaagtgactagtccttattccttatgcatgtgaatggactgattcttgtatgaaattgaatgttaaaatcatctttctcaggccgatgaaaacttacgttctgagctagaggctgacatacaggaggaatgttcaaagcttggtccgctggacaatgttaaggtaattcaactatacaatgaagttattgggaatgttgcgagagatataattttcttttctgtttcatttttcatttttattactaatattaatgtggagctttagcttgaatttcttggccttttttctccctcatcctgctagtcttggagattgactttgataaccttgagttttctctaaaatcattatttttttcttcctgatttgtttatcttaatctgttattctttcttcatttagtgctatgctatggtgaatctctagatgttgggctgaatttttaagggacccttttttgtgtgtggaagttttgggttaatgtttcgtatcggcatgttctgattgaacttgggtagttcatctgttggcatagggtcattgatctgataatattgcaggtgtgcgagaatcaccctcaaggtgttgttttagtaagatacaaggacaggaaggatgctcaaaagtgcatagaactgatgaatggaagatggtaattcttattcaatagtcttatctttgttagtggtattgcctcttgaacatttgtgagatgttttggcgtgaattggactagtaatgtttctctcatatttttgggatttaggtttggcggtagacagatacatgcaagtgaggatgatgggttagttaaccatgctaacgtccgggatctagatgcagacgctaaacggctggagcaatttggtgctgaacttgaagctgaataaattgcagttttagcaattgtttgacacttactgcctaccccagttttttcctgtaaaattccagactaatattgttagatgacctatttctttttagatctgtaaagaaattgttgagggaatcatttatatatgatttttttcttaacacatgtgtgttgtgttgtgtcctttgactacaaaatttgctcattctcatttccatcaattcaattttttagtgttgaacaaattattcaagtttagtgtagttgaaaattattataacgaatatgaaacaaagctgagttgatggaaatgagaatgagcaaattttagtttttttttaacaatgagcaaaaattggaccaaaattttatgagttgttggattctattaaaatcaatatgaaaacaaaaatgaagtaaaagaagagtacacaaattggaccaaatttagtaataatattaagatagatatttcatatcccaaaatatacaaaagcaaaaatgacataaacaaatgaatataatcaaattaaagaaccaaatacaataaaaggcacaacatcatccatcatccatggtcattgcatatggccatcttatattatcaaaccgaaagagaagaaataaagaaagtctagacttggaatggccatggccaatccttcaaatcatcatcttgctgaaccttagcagtcctcttaattgggtaagccctaagaccctgttgaccagtttgaccaccttcaacataagcataatacttcaagaaaaaagccaaagtcaacacaacccattccaaacaaaatatcaacacactcaatccaccagccaatttcaaaatcacagcaccatcttcttctctaacataagacttaagattcccaagaaaattcccagtcctactaaatataagaaccgaaacagagccttggaagatagcagtgagcacagtagccaccatgtgagccccataccacttccccgaacccctcgaggccgcggtacagccagaaacagctccgatgatggtgatgacgtggaggaggatgaggaagattccacacactgaaggtactaggcggagagagagagtgaggaagatgcagcttgaggctgcaccgaggagaatgtagttgcagagcaagaagaccttgtgggtgttgtaatgggattcagtcacacagcttggtggatcggcggtaatcgagagacccataatgggaaatcgatcggaattgggaaaaatctgagactttaggggaattggatggatttgaagaaatgggtatgtgagatgagagagatttgaatggtgaatgagtgagaatttggggtgatgatatagagtgaggagttcagggttttaacggttatatctttgcaatgtgaccgttacggaaagaattgatttagtaaggcaacggctacattttaaatttttaataatttaatttaatgaagtgacttctctttttagctgtctttcagtacttatattacatatataagtaacgttgctagttgttgtgagttgatctcaaccgttggatctaactcttactatattcaaagtaaagcatcctatgtggaaataatcattttctctcttttttttttattagtatggccgttctgagaaaaaaatagcttaaaacgaattagatttttgaactctcattttttaaagtatataaaaaaaaatattgagaaaaaagtattatggaattcaaagtcataacattacataacatgtggtatactcaaatcaactaaactataaatatttattctttataatacacttaatttcacttaaataaaagtctaatgaaatttttttattttttattttaggcctcaaaaaatatgaaccctaggcacgaatctagcctgcttatatctaaagccgagcctattgactagtaataaaaaaacgatcattacatacgtttaacttatagatatatgtatacttgtaattttttctttttacataatctattagagaaaaaggattctattaaaagatattttgattaattctttatcttgttggataattaggagagttttaattttgtttcattattaagtatgttatagttatttatggtcaattgtaaatttttataaaattttgagtaatttacagtaagatttaaatattttattacacatataattatttttcttatacatgtagtaagtaattgttccaatatttttttataatacccctaactgatatgagatgaaatattacatgtccaaatacaccattagtactaaccatagtaatagagagttattagaaatacatatataaggtgatcgaatcttaagtgtaattcaaatataaatttatatatatatnnatatatatatatatataataccttcaaccaaaacaaaaatgagtggacgaaattttttatattttaatttttatacacttaaatcttttatttatttatttttttacaaaatctccttaatttttttttttataaatttaaaagtgttagttaaaaattatcattaaataccaactggactactgtgtacacgtaaaagtaaaacttttaagctaatacagtaataatctaatcaatatttatcggtgatatccaactaacaccttaaatttataaagaaaaataaatataaaggaattttaccacaaaaaaaaaatattttcctacgatgtcattatatatatcatgtttgttttgaagtagttttcaagcactaataattattttaattgaaatagtgaaagttttacatttctaataatgatactcttttgtgaaatatgacccgaatcgatctgtaaatagtttttttcattagtcacaataatttgatactcgcgttaaatttaattaaaataactccacattaaaaaattgaaaacattttattttttacggtatataaattaataaacgacacgtaatactataaaacgacataatcttagaaagcaacaaaatggcgcaaaaacgaccgtgatatataaaacgacgtcgtcatatggtaatagctgaaatgaacctgaacttgaattgaacgtgttcttcttcggattcttaattgtttcacttttcattaatctaatcataacagagagaagtaagta

SEQ ID NO: 15602 - DNA, 5418 bp, Cannabis sativa
ttgcaaaacacagggtccaaaatgatatttaccctagtttatatagtttggggagatttttgaaaaaaaaaaatagaggccgaattctagaaagtcatagttgaggaaacaaaattcttgttgtcctttataattggtatgtacttttgtccttgacttgtaccaaacatgaattgttagggtaggtaataactaaaaactccatttccaatttccaaaagtaaacactacccttcattaaggcaaagcttcctaaacataagcatatataataggattttgacctaagaccaccaggcacccacaagacagggaaacatagtaatcaaattaagtcacattcgacaatgctacctaaaacaagggaagaacaatatatgtacaactcatcacacactatatattgaccaaaacacactataaattttggtctccttacaaaaaggctttagttgaagataatctaataatgttgttgcttattgccaaatataatgactaagtggcaatatatatattagtttatttcttcttgactacatgtataatttgagtgaaagggtttgtatagatacatgttttcaggtattgacccccctagctagaatagacattttatgtttattttttgaaagaagaagtaggtttggtttgaaaagttttgactctcttatatataccggtacttacttttgttggaaaatgactacaaatgtagtaatgtagttgttttatccaaaggagaaaaaaaaacataaaatatacatagctacttgaccaatatacttaggacactttttggtcaatggtttgtctcaagagctttctatatggtctcatcaccatcttataaagttgggaataagtcataatcgattaactaactactaattctaagatattaattagcaaaaacaaacactacatgtacatatacatcgttttctagaacaaacataatcatcacacattcacattgtcataatataaatatatatattataaaccaatacacactcaaacacctactaacactactaaaattaataaaatcacaatatgtcattaaatattttaatcacacattgtgaaaataaactaaattaagaatgctatagtacaatcctattttatcatttttttttgcactcttgtccaaggcaaacttaagtccatgcatgtggcgctccaacctcatgaaatagccatttttatcaagaaaggttaaattaatacatttttttttatatatataattacataatctttattaagaaagttattgggtctaactcactctaataaaaatagtttgttcgggtaggatttactttcaccttatttagtggatcaagcatatattaccaaatatatatgagactttaataatatttatgtaagaatattttaaagtaaaactaatttatcctaattaagaagttaaaactaaataaaatattggtatacaacatttcttaccgccaaaagtatcaatttcaacaacaataacaatataattttctaataaataatatgcttctatcaaaataaaataaaataaatattattcaaacattattttgttgtgtttaaaaaaaaattaataaaacaacaatatttttttaaaacacaacaaaataatatttgataaacatctgtataataggtaatgtaacagaaagttcatcaaattcaaactctaaacattatattaaatttaatttgatctctcttatcttgtatatcttatattaattgtatttcaaatttaaattcattccacatatctaaaaaatatatatttattattaattttttacctaatgcgcacatctaaaaaatatttctaatattgttattttaaacaataaaatagaaaaagtaattatgtttcttaaagaatcaccgttgtaacgtggttacctagaaaaaagatatgctatttctaaaataaataaaaataattataaaattaatagtatcacagttaaattaaaattataattaacaataaattttaaatattattatattttttttatataaatattacttaaattaaatattttctaataaaaaataatgttatttattaaataatatataattaattatacaattaaaaatatacataactaaaataatatttatgaaaaacatactttaacttcagacttaagccatctccaactggcctctaaaataccaaatatagtgtagtttcacactatatttactctaattggacactaaaattatactcataaatagatttgtctacaatgtcgcactaaatttagtggagcactgtaaaccacactattttttttaaaaaaattaataattaaataatacttttatgagaaaaaactaaataaatatatatatttagtattaaaatattcttattatactaataaataatgtaaaatttggtgcaatttttagtgttgtgattgaaattgaaaaaaaaaaaattagtgttgaaaataatagttttttggtgttgatttaacactaaatttaaattttaccattagagatggccatataacatactttatccagttttaactttttcttaatgaataattaagtactggtgaattagttttatacttgaattatactaatatatatataccattttttttatttttaattacaataaaatttgtgactaaaattaaaaaaaatatgactaattataaatcaatatttttatgttgtgactaaaatgtttgtgaataaaagtattagtcacaaatattacaatttgttgtgactaaatatatttttagtgacaaaaataagcgtgaatataattaaattagtaacaacttgtatttaaatattatattttagtcacaagtaatattttcttgtgactaaaaatcacatttagtcacaaaaaaaattatgttatgactaaaaaaaattatcaggctttcagtttattgtgctttcaacgttgtcaagcatatatatatttgtagtgtacattttcaaatttcacatatacaaatataattgactacttaatcaataagtggtgatcgatgttgacttaattcgaattattacataaacattatatataaaggggttactattatacatacacatcgatgatgatgattatcaagtaataatttaattataattcaactacgtactagctagttttctttcaatatatataatatatatgttttgtaattagtcatatcatatgtatattcaaagtaataaaaaacgaaagctaattatgaattataattaaattttggaaattgtagtatgtgtgatcattactcaatattgtttggcattatatacagttgttaatgattaatataaataactttaattatgtgtgtgtatatatatatttatgtgttctattcccctagaagttgagtattaataaattaacaatcttaaaatatttatgaaaaacaaaaagcatgtgagcccagcaagtgattagttctaaactaccctagaaaagaatttaattaaaattaaaacaacaagtatatatataattaagaaaagaattatagcttagcgttgacaggagccacatcaatcgacttggaaagattctctttttacaatttgtctccaatttctgtgtttttaaataattagttgacttgcattgtgaaaaaagattcttttaagatagataatagatcaataaaataccacaaatagtctaatattaaagcagttttattacactatataatcataattttctttttctcttcataagtaatagagacaaaaatgctaaaaaaaatgacgactgataatggtcattatatttgtatatattggattaactatattataattattaattaatatttaatatatattgaataatttttatgaggaaggcactgaatgatatgggtcaatttggaataaaaagaaaaaggaaagaaagaaagaaaaggtggggctcaaatgaagaaacgacccttgaataaaatatcatggatgtgattgtatatgcttcttaaaagtatatttaatcattatatattaaacattattaattaatcagcgcacggggtccttttttcttttcttatataaatattgaaacattatataaaatatataattttttatgagtggattttaatgatacttaaaattagattaatgatgtttctgagtccgggtatgttcttattagagaatttccaatagtaaaaaaaaatgaaaggatgcttgtttagatggatatataaaatagtaaaatattgagatgttatagtaccattagagaaaaaaaaaattatattctagaaatatgtatgaatgatatacagtagcattgattattattttttttaataaaaaattaaaattaaaaaattattgttgttaaaaatttaaataataatgcgtgctatcataattatagtatttttaaaaagtgttatactattggagtaattttagaagtaagagtgccaaaaataatgtggaagagagataaaaatgaaatattatatatttggatgatatgtgaatatttagtatccttaaaagatgctactattgttgatgctcttaagagatgttattagtttaatttattaggtttagttagcttttattttatttatctttattatgatatgatgtgctattatttatttatttatttatttcaagttcaatccattctttaggttgagcactcaaccatcgtgactacatcaataataatttctttagtctcaaagaatttgttatttcaaactattaacatcgatttaatggtgatgcatcgaagaacaactaacacaaaccaacaacaaaataaaatcatatcacagaagcaagattagttgccataacctaaataaaagacactagaaatatgtcacaattacaaagactaaacagtagcaagaacctaatcgcaggagcaaaacacaatcacagtagcaaaactacactccccgaccaaaccatacctaatcctagggagagctgtttggagagaaaagacaacctctgccaactaaagatttagaaataaaaaatcctagtagacaatataaaatatttagagaaaaccactctaaaagtatatttattcctttttttaaaaaaaactttcgttgatattttatatgtgtgactatttgaacattgttggatttgtaagtttttaagaatgaaaatcttaccataattatatgcgctcattcatttaaataattatacacacatataaaatattttatattgtctgctaaagttttttcgttactaggattaggtttttactactgctattagtcttgtatctatgatatggttttgagtgtctagggtgattgcgagtcttcttccatgacataatttttttttatttcgttgttggtt

SEQ ID NO: 15603 - DNA, 10523 bp, Cannabis sativa
attgttgttgttcataatgttataacaacattattgatcttttgtttgtaggctttttctaaagtcattcgtagctgggcttcgaagaagtttatgacaggatggtaagctcttttttgtggcaatatcatgttgtggttgtgataatgtagtagaaataggaaatactgaaccttcttggcagtgtcatacttcttccaatggctataacattctatgtaacatggggtttcatccactttgttgatggtttcttctctccaatctatactgaactggggatcaatatttttggtaaaccacattgtctgtatagtttttgttaaattaccatactcgcaatggtttttgacatttcttttcaacctctaaatttctaacctgcaggtctcggatttgttacctctatctccttcatcttcttagttggaattttcatgtcatcctggttgggagcttcggttcttactcttggcgaatggttcattaagaaaatgcctctagtaagctatatttatgctgcctcaaagcaaataagcgcagcaatatcgccaggtaaagatcgtaaccacttgccatcggttgccatgttctgaaacttattgaagctcattttgagccctccccccattgtagaccagagctctaatgctttcaaggaagtggctattataaaacatccacgtattggggagtatgcgtttggattcattacttctacagttgttcttcagaggaatgtaggcgaagaagaactctgctgtatttatgtgccatcaaaccacctctatattggagacatatttcttattgattccaatgatgttctgaggcctaatctgtccgtacgagaagggattggtacaaagttttgtagataaaatatttgtaatcctgtctgtatatattgattattaaactcatttatggtctacaatgacaatttggtttttggttttaatgtggcgcagaaattgttatctctggtggtttgtcaataccccaaatattgactaccatggacgcacaagccaccacaagtggaagaagaatcggcaaagctaggagcatcaatagtataatggtgagacttgagtatggtcatggaacagtgggaatgtatttgctatgaaatcagttttggtgttcagaaaaagagcgttaacattctgttattaaaaaggacttattttaattcactttggttttctttttctaacaaagaatataaaataataaaggaaaacaaaagtgtattaaattgatgtttcctattaaattgcagtaggaaggcaatgttaagcgaagaaattgctgtgtgaagaattatatagaagaaaatggagtggaaacctcgaatcgaagtgagaaggaactttttctacgaacctttctgccctggaactgtactattttcgtcatctacctaattttaagttgcaatggtctcctatacttcgtcctttttggaatacaaaattgaacatgattttcaatttttcaaaaaagaatgatgcattatctcttccttcaaaatttctagtgtagtgaaaattctcaaaactgacagccaaaactttgtaaagaattttgcatccactaaaataattttctgtaaaagttagcttaatccactaactccctaaaatatcatcgattaatccttaaaataatgatcattccatgattctttcggcttgtgagaaagtatcacaagcacacaagaagcccagccaagcagcaaagtgcaaaaacaattctgaaaccctaattccccatataaataaatataggctaatgttattaccgaaactaaagaaaaaaaaagatcgcataataaagcaaatgaattaaatcaaaacatcaacctattgtaaccccgctcaggttttctagtgaacaaaataaacagtactcttaacaccgaaaaaagtacacaaaatcgcttaaagcagataaaaatagctgctgctttgctgtggctggctctatgaaggaaaacaaaagtcctagaagaaaaaccatatacaacagttcaaaaccaaaatgtatttacaacagcctcttaacttttcctaatcttccacagtctgaatctcacccatcatgatccggttactgacaacattaaatcccaaaacagcagggctaactttctttcctttcttccccttcttcttccctcctttcaaggacccgtcacctgcattggcatctcgatcaacatctccaacactggcaaagtcggaactcatgtctccagcactgaacccagtgacattttgatcatttcgactttggaaggcaatttcaagaacatccgcaggtaacaactctttgtaattgagaaatttgtcaatgaacttgtgatcaggatcaaatgatccaaggttctctatcaaaagaacctcagcctctgatcttgattgtttcaagcaaaattcgaggaaacttgtatctatcaagtgtggaaaagaaaaaaaaacaccattaaaactaattaagcaatattgacctgcagcttgcacatcataaatttggtcaaatggcttcaacattaagcaagaagccacaatatggacagaaaaggcccaggatataattagcatgtaatttgagtgagctaaaaattgtactaaatgaacttctgaattgcaagtaaattattggatgcaagattgaacgtacctctattacccataaggcgaagatactcactctcacaccaatctctaaaacctgtggcctctgcatgaaataaataacacgaaaatagaaatgtaaatgtcaatacaaatttgcttaacaattctattacaaagcttacctgatctcttgctcatggcatctcttttgccttttagagatgagtgtacagagacaggtgacgatgaaagagcagctcgctcagtggctttgccacccattgacttttgccggtttaaggaccctgctgatgttgcttttgaaggattgtttttcataccccaactaccctggccagagagattaggaaaatctgccctgcttacagaaaataatatgtaagcaaaaagttacatataatattgaaatagacttaatgacaagttcagcatgattcagaattcgacaatcaaaattaaattcaattcaattgcactgcctcttcaaaaaaaagcaacactatcaagcatttatattagaacaacacatctatttaaaatatttacccacccaccatccagcactaaacaagatctataaggaacaggttgaattgtttaatcacacattaaaaagatcagccagacccatcccgctcataatatactacaagacaacggagagacaattccaacaatttaaggcaaaccaagctaaataatgattataaagagagaaatcatactgcttattgtcttgctttgtttggtcaatcggcccccaaaataagtcatcatctcccttgtgtcttgactgagaagcaagtgaattaatctgcataggagacgcaactttagatggagatgagccagaaatagaccatgaaggaccactgctgcgtgggggatgggttggctgtgccttctgaggagttggtacttgattcacttgctgtgaagaagataccttcttctcttgctccttcagaatatcccttaaagatgttggttttggaacctttccagactctgtagaccatgctggagaaggaggaggaattgctggctctcccttccaaaaaacaaaatctcccaaggaaggccctgatgggattgcaggtaatacttccttttcctgctgtgtaggtcgggagcttttgactttctcaacagggcttgaactaataggcacatcaacagatgcactagaagctgagatcctacttccagctcccttagctttagcagattttttgcgactctttttagtgtctttcgcctctataaagttatcatcatccacaggttctgaaatgggagttgcaacctgtgatatgcttgatatagtagcagaaacatcaaaatccatttcagtagacttcgccaatacttcttcagccaatagatcatgcaactggctcttcttgctctttgggtttaaagtgctgtcaggcttcccaacacttgacacagcagtacctacatctctctgaacctctctagatacttttggatctgaactggccacaactccagcccaaggagcactagacaaactcaaggagttaacagatgtagcaatctccgacacaactatatctgcctgcactctattctgttcttcttgttgaatttctaacaatgactttgctttgaaaccaggagcaggtttccatgcccgctgcccagctgcaacaggcccggtgtgaggaacttgagtacttgcagccattttctgaattggttgggattcaacaacctcaacaccagcattcctcgatttattgaccccattgtcttttaacagatgtggtgatgacccatatatctcatcccctgcaccaacttcagcctccaacttattgtcaccaacaacagtcctttcagtttccaactgctttgattgctgagtagagacagtcttggcccccttcgcctgctcagacaattgtgcttttacagatttctgtttcttagacttcttctcagaagcctttttcggttcacgaacttcagcattttttacttctgtcattgtagagagctcagtgttcatttccatggcaaccttctcttcttctactgcactagtaaactgtatattcacatcatttgcatctgccactttaggaatttcacttgcacaaacttctgattcaggcataactccaggatgctccaaggcagaagattctgcatttaacccagatctgggaaccatgatgtttctttcagatctaaatgggctttcagaaggcatcccttgtgatttagtcataatgctatcagaatcagatacggatttttgcacaagtaattcctcagtagccttgttcctcacctcatgcaatgatgagcttgaatttggtaatgaatccttctgacaaccatcaccaacctgttctgcaacagtaccaccccaactcttttgatgggtaacattgtcaaacatttgatgaggtaaatgtaaagaggcttcggaacttgcattataacgtgtatcctgattaacttgtggagagaaattcattaagcctgcagacacttcatgctgaatactgggaactgccatatttgaaccaactggaaacaggtcttgaggtggttgaatacgaggatcaatagatgcattcactttcggtattgctggaacctgcaattgcccaaatgatagttccccaaaatgttggcgggtttgatgctccgacagaacatgagaaagcagctgttgctgttgctgttgctgttgtcttaaaaacatttgctgctcttcctgtttctgctgctgcttaagcaacaaaattttatcaaacaatgatattggctgtgctggaacaggtgtctgagaatgtaactgcaacaggtactgctgttgtagcatatttaacagctgtggatcctgtgctaaactagaaggcagtaacttgtccggtgttggaatgccttgtgtattatcaacaacctgaggaaacagattgggtaaagatggttgattctgcagctgcaacctttgttgatggatcccatgaggagactgaggtggagcaaaactctggtcatgacgcaattccatctttgtctgtagtagatctgacccactttgggcattaaaatttgaccaaccagcaacattattatttacaccagatgatgaccgatcagataaaccttggaggacagacatcatgtcagcattctgcaaatgaggctgggaagaattatctgtcactggtggcagtagtttggagtcagtggccatctctgacatcggaactaaggatgctgaatctctacctggccaatatggataaggagtaggcaatgacctctgacgttcaagagccattctcttggcaagtaggttgtccactccagattgcggcaaggtatgagcattattgccaacataaccttgcaaacctacaggagaacataatatcaatcagcaaatgctgtcactaataataaaaagcataatccaaatcacaatcacatatcaagaattatcaacttttgtcgagaaatcccaccttcggaaaatgcaatcttctggagaggtgaggtaccagacatcagtgattccaaatacctattctcagcttctgtagttgaaccatgatgtttaagcctaggttcatttctcattaaatctatgtcgcttaaaccagcatgagttttattaacactgccaaagtttggccgacttcctgtgtcagaaacttcatttggtttaggagcagcaaatccaggtgggggtctggctttcgctcgaagatggggcatcacatcaccaagggatgcgaatggtacatcattggatgctcctgccaagcgaacctgtaaatctataccaaagtatccagcctcaaaccatccaataatatcagccccagcaaaagggccttgaatcataccctgaggatctacataacaaagttgtaactcttctggagaaggctgcagaggtttcctcacatcctgttctctgtccaggactccagacggttgtcttctaatgatatgatcctcattgctttcccactttgccccagttttggttaaagatgaatcagcggtattactttcccattcattattaagattcttttgaagatgtgaccaacccatctcaggtgttcttgacttagcatcagttggagtctctttccaatcatgcacgaccatatgagagggttcattcagtgattgggctctccatgtagcaccaggatgagcagaaacattttcctgcatacttgacgagtttgattccctactaatagtcgcttcgtcagactttttaaaagatccaccatcttctctctcaactgcatataaataaactgtagtgagaaactatgtctcaaaaagttacacatgaaatacgtacacttaaaaaagatccatattctttcacagttacatctatatatatatacatatatataaattatacacaaatatatattatataccaagacttcatttcaaaagagaatataaactaaacattcttaatgcccgtaattgttggagcaatagatctccatgtcttaaaaaattacacatgaaatacgtacacttacagcagatccatattctttcacagttacatctatatatatataaatgatagtacacaaatataaatattatacaccaagacttcatttcgaaagagaatataaactaaacattcttaatgcccgtaattgttggagcaatagatctccgctttggtcacagccaacatttctagacctcaatcaaaagtacactgggcaactagaacactcacattagatcatttgtagatcaacaagcgacatccaaactgaggaaaccatcctcgtcagttatacctattacctagagtgggttcttatacattttttccgtattataaaccctaaatggattttatattctggttggactctttaaggacagtctgccttactagaaagggggcatcggagtaattcaacaaactaccttttgaaatggcagagttttcatccttaaaatcttcaaaaccttgaggtaaatcttctttactacctgcaatgcacacacaagataattccatcaaagagtaaaagcatgagaatcaactataggaatgtatgttttccaattcactaaatgaataagtgaaataccaagcttagttcgtcttgattgcataaaatccgtctggccccgtccttctttggatatttgtggtgcgccactacttacaatatcccctttatcaattcccttaataaccacctactcaacaagaaaagaatgtttaagcttgctgaaaagtagaaagcagtaacaacacaatatttaataaatatatatatgtatatctaatgcaacttaccatttcctcaggacttggtgtatacagagctagaggctcaaccgggtcatccactgtaagggaaggaacttctgcaccatccactagtctccggaatgatctcaaatcacccaatctgtacacatcaagtaactttgtcctactatacttcaaatgtgaatgctctccatgaccactttcacctttgtctgaaaaggtgccctgggactgagaatgcgaagaaatatttgcagtggctcctccagaactaactctcccacggccaagagaaaatgaatgaggtgcattttccccacgacctcgattatacaaatatggaggtacttgtttgtttgaggtttgtgtttggttatgcggttctccccttcctcgaccttgtaatgtgctggatctccaaggacgaacatggtccccttccttttcttcttttccatgattagcaacaattgaagacctcttatcaagatatgagttagcatctttaccagaatccatccatttctcacgcaaaccttctgcctctttttcatcaggtccccaacgagagttccacttgttttcacgtcgctgttcgtaattggaatccttgttacttgaatcagcccatcgctcagatggagcacgacgcccttcaccaaagtgtctagtggatgaattgttgtctgtccaacgttccaccctacgagggtcgccatgttctttttctccatccctccacctatcttttcgcatagaggaattggtgtccctttcttcatctcgccagcggtcacgtcgaccagtttccatatccagcaaggatggtcgaaaaacatcttttctcttctgagtatcatgagtctcctcaccgttgcctgctggtttcaagaaatctgtgcgatttccatatggaaaatttgagcttggaggattttcctgcgaacattaaaaaagaagtagaaaattcactagataagtactattttggggaaatttcatagcattcctgctttttatacatgtaaaagtacaaaagtagctgaaattattaaatattgtaaattagtctgcctataattatacacagtaagtaagttcccgtcagtaagcaggcatatgtgaaggactaatgctagatacataaatggtcaactaagtgataagggtaacacaccccagttcctattcctggcttgctctctcccggcttagacagaagccattgtggtgaaagtgggatgggattgtcaaatccctgaccatctgcatataagatataagcaccgagtaagaattttaaaaaaataaaactgttacacaactgtcaccacaaaaccatcacaaagccaactggtgaagagacatagaacgaattagagatgactcgttactctatgataaacggtatcccaagaataacaaaataaataaaatattgaaggaggcaaactgtttgaatgaagatacagaagtgtgaataacaagaagttaaaccaccaaaaaatggattgcaaaatattgtaagtccaactagattcaccacgaacgaaaaatgaaatttgaagaagaaatttcaaaatacctatatagaaaaagactaaaaatcgccgacataaattgatcttacactaatctttatgaaaacgtctttctttcaacagaaaaactgcatttctttccaaactcaaaacctactatttttcttgtaatcttcgaatatatcaaacccatagttaaggcgtaatctagtaagagagcaaaccagcaaaagaaaaaaaaaaaaagagtccgaaaacagaacaaaaccctaagtgcaactatttatgaaagcttaaaaccaaccatgtagaaaacctcaataagaaaaatgcatcggtaaagaccagaagcagaaaaaaaatgagaatggagatcagcatgcgcctcggcctctcagccgaactagggttttagagggaaatcaacggcggacgccataggagacgaatcgaatatcaaaatacctttggggatctgattggaagtggcaacggaaaggttgagaggacgagaatcagagctggaacgagcggccatggatgatcgggtagagagagcaagagcgactgagacaaataaaacccttttgctttcgattgagcttgaatgagttgtgtgggaaagaaaaatagaaaacaggaggaatggggggaatatagtgaagggcaaaattggagataaatgagatagagatgagtaggttaaaaggatataacctagaggcgcacgttagagaagtgtctttcgattttgttgtctgacctttaatacttaaatagataatattatacacgcgccgataagaaagtgtaaatcacgatagtacaaaaataacgacacgtgtcagatcagttgttcgtggtgtacacgtggatatctgattactgtctatgtctggataacattaactttgcccttgttagttccagattggaactttatgtatgattttttttaatttatttagatttgttttatagaatttt

SEQ ID NO: 15604 - DNA, 6802 bp, Cannabis sativa
tagctaagtgtttgaagaataaaatgcattgaaggataaaacggtaaatttatccctactcgatgtaaaccgtctatagaggatcattgattgtttagatcggaataatagatgattcctagtgtatctatatttggtatataaaatgttttatgtctgagtctatagtggagtcaagaaaaattaatatgtaagaaaatttacttgtaaatttcgtatctacttattaagaacttgatggccgcgtattatgtagaataatatcatcttgtaaacttaattaattaatttatttaattatttaaaatttaaaaattcacttcactgtatcaaattttcaaattttagagattgacaaattgttgggagtgtctaagtaaaagtttctcaaattacttaaaaggcccttatccaactcacatctcacgggtactcataattcatcgaactccgaaagaaatatttatcatcatctaccgcaattcaaccaaaccaaattttccgccacttcaccaaatcacgcatattgttgcaccagctcttctcacgtgcataccagcccttcaacatttctacgtgtaattacaataacaattattatttattttatttctttgttcttatatagaaagaagtcttaactgagaaaaacactacaagtagaccatatcaattccaccactacaactcacctcgcccaacaatgccgtcaatctccataatcctcctctccatactaattgctgttggagtgtacagtcttctcaagaagttgcgaagcagaggatcctcactccccctacctccaggcccacgaccatggcccatcgtcggaaacctccctcacctgggcccagttcctcaccaggcgatagcggctctggctcggaaacacggtccattaatgtatctccgattgggcttcgtggatgtggtggtggcggcctcggcctcggtagcggcccagttcctgaaggtccatgacgccaatttctcaaaccggccgccaaactctggggccaagtacatcgcttataactaccaggacctagttttccgtccgtacggtccacgctggaggatgctccgcaaaattagttccgtacatcttttctccgccaaggccttagacgattatagatatgttcgccaggttcgattattataactttcttcctttaaactaatttacatacataaacatatataacgctactttatccaatctattacttgttactaattaattgattattaatttcttttagaagcgtactgtttatattaatttttgagttagatacctgaccccacacgcaccctaattaataccttctatatcgctatatagcctcaatacaccacttgagctatacagagtatctaggattacctcctagttacatatatgaatcatattaatataggtccgagcatctctgtatatatataaatctatttattgatataattatattgctcagcaggaaagaaaaaaagataccatatatttaaattacaaattaagggtctaatatatatttacttatatatatatatattgtatatatattaaaaaaaaagtctttatatattttgcaggagcattataggattatgtttttcttttttactaaattaaaatatgtaagatatcataccaataaaactatgtatatatgattttcttttttactaatatattgtttaattgataaagttttttctccgaggtttaaagatactcaattttaatgaactgttgtttttgagtgagttagaacctttttttttttaaaaaaaaaaaaaaaaagaggtgacaagtgtacttattaaaaataaaatatcattgtataaaaataaaccatttttttttgtgtcaaaaaaaaaaaaggtttattttaatacaatgataacattgtatttaactaaacggatacttctattatttaataagcacccacattttttttttctctctacactctgtttcaaataagttttaaactttgctttcaaaattttaaaatacttgtcaataaaaatgttgtaatgcaaacattagtatttagctgcaattttactaacgttttcttttttaaggcaatttgtatgaagtttgaaaacaatgacatttttatttatgagttgtaactttactttatttatataaacgccttttttaagggaaaaaaaaaagagaaaattattacattttttttttctaatattatcctattaattaggatatgatattctgtcaaaaagatacatgcagtttcttttttaattagaattttcgtgtactaattctagcaattgtgaataatgtgtgcaggaagaagtagcaatgttagtaagagcactagtagaatcaagaagcaaagtaaatttagggaaattgctaaatttgtgtacagtgaacgccttagggcgagtgatgctagggtatcgagttttcggtgatggaagcgggaagagcgatgcaagagctgatgaatttaaggccatggtgatggaactgatggtacttgctggaatatttaatataggagaatttgtgccagcattggagtggcttgacttgcaaggtgtggctgctaagatgaagaagctccataagagatttgacactttcttgggggccattattgaggaacataagaccaaaattgctcaaaataaacaacaaactcatgacttgttgactactttgatttcctcaaatgaaaatggtgaagatgaaagtgaaaagcttacggatactgaaatcaaagcacttcttttggtacgtatactctctcttaaataaacatttaataaatggacacacttaaagtatatatacacattatttatacatatatatgtaatgactttatttcagcgaggtaaatgggtgtgcgttatactgtcaatttagaagttaatttttgtggttttaacttttaattcgtttaaaacctctcatggatacaactttacaaaatcatgtaaaataataattatttttatggaatgtatttgtttagtataattttgttattgctagtcctaatattatgaccacacaaaatttgagacacttttcaaccaactatctctatttaagattcaaaatgaattatcatgcaagtttatgtcacattttgtgtgtaatttagtagttagcacgtattagaaagctaattacacttttacaaaatgattgcagaatatgttcacagctggtactgacacatctgcaagcacggtggaatgggccatagcggaactcatcagacaccccaacatcatggcccaagtccaagaagagcttgatcgtgtggtgggccgagataggctcgtaggtgatatggacctagcccaactaacatatcttcaagctgttgtgaaagagacatttcgtctacacccatcgactccactgtcccttcctcggatggcaagcgaggattgcgaaataaacggttaccacattcgcaagggatcaacccttctagttaatgtgtgggcaatagctcgcgacccagaacaatggactaacccattggagtttaggcccgaaagatttttacccaatggtgaaaaatgtcatgtagacattaaaggtaataattttgaagtcataccatttggtgctggacgtagaatatgtgctgggatgagtttgggcttgcgcatggtccagctactcactgcgaccctagtccaggcctttaactggaagttaccaaatgggctagtcactgagaaactgaacatggatgaagcttatggactcacattacaacgggccgcaccattgatggtagagccccaacccaggctagcccaacacttgtatggcgcataatttgatatttgggtagtagatatgttaaaaaataagttattacatttacacccgattcgatgatgtatgatttatgttagataagtttatttgcctaccttatctagcttatggtgcactacttaaatatcataataaaagaaagggaaacgagaaattttcgcaatataaatacttttttttaaaagaattggagggtcggccaagagccaaccctataagtttggcatatttagacaaaactctccaaacataagtcctcttttcctattcactattctattagaatactactcttaaatgtcaacttgtactactaatgtgtacataagtgtaaacgagacatatttttattggtccatacaattttaattattacaataatataaaatagaaaataattttaaaaaaaccattaaattattaaaatatttaaaaataaatgaaacaaattaatatatgttatgaatgactacggatagatatgtagtatactctacatgataaacctacaatactatagaatagtattcaacttgtagcagtaaagtataataattatatgcatatacatgcatgtattctcctatatatatgtataagtttgatgaagaaataaaaaggaagaaagagcagaaaaaaaaatacaagtattattactcatatctgtctaaatttataacaataaattaattgtagatgaaagaaaaaataaaaaataatttttaaaataaattatatattttcgcaactataaatgttttcgttaaagatgctgttatagcaatgctaaaaataatatttcaactttatgtatttacaagtgtatctttcatcaaaaaatagtcatatcaagattcttacaataaattaacaaacaaaaagctctggaatactctcctagggtttttccctcttcttctggatttttccagcctttcttccctgtgatgatgtgtaactgtcgttttggttccctctctaattttctttatcataatttctaattaggtttaggtatttaatgcatctcagtgaatctcaaaagatctatttccatttaatacttttgcagaccttatttaaatctcttttgtttttcttccttctctctactcagcgcgccgtcagtagaagaactcaggggattttggtgattattacctcttccatcgagggatcacgccagttcctcattaatgtggagatggattcggcatcttctattccttcttagatgttttctgttcttaggtattttccttttctatatatatccttttatgtattgtttagtttgctaagtgtttctctgggtatctctctatctgtatgtcctttttcctctgtcttcaaaattttttccttctgtgtcatggcgagttctagcagaagctcgcctactcatcttgctttaaatgatgaggaagctcttattcataagtttgatggagtttctttgggtaatggtccttcttttgagtcgttctgtttaattgttaagatcctttctctgaaaagtatcaaacctgattggcttgacaaagctatgagggaagcttggactttaagatatcctgtcaactttactaaatatcactctggtctttttcttgctcattttgggtgtgaaggagacaaacgcagggttatcgagaaccagccatggcactttgaccattgtctgatggtttttgctaaccctgaaggtcttgatcttcttctacctgaacaacttaggtttgtccctttctggatgcaaatccactatattccctttggatttaggtctcctagtcttgctaaaatggttgctgatgatattggagatctcaatgaaatccataaaactactctgctggaaatttctggtcctttcttacgtattcaggttctcttagatgtctctaagcctattcgaagggggatgcaggtgttctttcgaagccttggtaggaccaaatggcttatgtttaaatatgagggccttcagaattattgctatttttgtggaaaatttgatcatatcttttctaagtgtggttcttttctgcaacgttgtgatgatggatatcaccctcctgttctgccttttaaggagaatattagagctcctctcaagtcacagtttaagcgtgacccttttgatttggctaactctattccctttgaggagatgaatcttcgatccttggcccataatcatgatcttcaggatgctattaatcagtttcttcctcaatcaagcttaccctgttctcaggtttcttctattactttagctcctactgatcaccaggttcattcctcgtctactatttcctctcaggacgctgtgacatctgattcccagtttagtggtcttcagagtcttctctgtgctgtttctcaggcttctttgcatgatccatccactattgttcatactgataagggaaaagggattcaagcttctgactcctttgttcctcattgttctcctcgaactttatctataggtgatggttcgggtaccaagagatcttttgttaggcaggaggtggctgttggttcctctgttcgtggtatgttgaagagggccagggccaatggtgctgatgttatggttctttctgatgattctgatcatgttgtactggcggggttgctctggaaaaatgagtcttatatgttggaatgctcggggtttggggagcccccgagcattccgaaacctttcccttttagtgaagcagcataaaccttgtttactttttgttattgaaactaagctagggactgggtctagttctagttttaagtctaggttatcttttgattatgttttggaaattcctagaaaaggtttaggggggaagtttgcttcttttttggactgctgctgttgatgtatatattaataactactcctctaatcatgttgactattttgtatctatgaatgat

SEQ ID NO: 15605 - DNA, 12019 bp, Cannabis sativa
tttactaccaattaatgctattgtattgtgtctattctattttaaactatttttgcatttaattacctcaaaattataatatataaatatatatacatcgagtatttatataatttacagtgatgaaatatatttaattttttttttgaactgtagtaaatgagaatattaaaatttatttttgttggcactacaaactaatctaaaattttgagaaaaatcacaaaaaaaaaaaaaaaaaaactttactatcacaaccatgtcatgaaaaaaaatccaacataaatttttgaggcaaagttgagaaagaaggtaacacttattgtattaatatttttttatttaaaaataaaattagtgaatggtggctgacctattcatttcaaaggaaaaaaaaaagaatatttgttaaaaaagtattgctaattttatatatatatatatatttatatatataaaaatcatctactaaaacaaaaatacattagtaatacttcggagtttttttttaattatttttatgaaccatattttggaattattatatagtttgtaataatgaaatatttggtctattgctaaaaagaaaagaaaaaaaaagaaagaagaagaaaatatgtggtcctttttttttttttgtgaataaaaaaatatttacaccatttaacactttcgaagacacataatcaagaactacaactgtgtttatcataatattgagaaaacataatatgaaaaattttccaatcaagtaataattttattttttatctgtaatgtatatttagtgaaataaaatgtaataaaattagacatatattaagaatgacagataaaaaagacttaaaaaaatgatgtcaagctctatgaatctaaggaagaaaagcttttagaaaagaaagctcattttttgtagtacaccaaattgaaagtagaaatctaacccacacttgttttcactaaaaaaatagaatatatattataaataacattatatagaaattttttagaaatataaataacaaatgctctataaagagaatgtcaaaaaaaaaaaaaaaaaaccatatatagattcaacaccaattataaaattaattaaatatctaataacttcaatcactacaaaaaaatttagatatcaaaataatacttttttttttaccaaacttttgatactatctgatcctgccctaaaattattaaaaatctaataaataatataaactagattttgtaaagaaaaaattaaactttttttatttataaactcatatcttaaaaaataaagaaaaataattagaaatttaataaaaaatataaattgttttttcaaaaaataaaaattaaattaaaaaaacattatgcttacttaaataaatttagatttttagaaaaaaaaatagactcaaacttattctcttaaaatttagtttttaaagattgaattttttaattaattttttttttatctaaatgggcttttcaataaaaaaaataattaattctttaaatcacttaattaattttaaaattttgatttttttaatcattaaaaatgatttttgtttaagatgtaaattaaatttttaagaattacaaaaaaaaaaaaaatatatattgaatctttttcataatacaatttgatagttgtcaaaatttatgaaacaaaatcactaatttacaaaaagacatcagtatgcaaacagaataataagataaaacctaaccaaaagaaaaattgaagaattttttttaacaaatagtatattttaaagccaccattagtgttaaagattcaaaaaaaataaaattattaattattctaaaaaaaaataacaattcatatttaatataaataacttcaataactttataataacttataaatttttttaactaatttacttgttttttatgtagtatttttttttttctttagaatatatgtaatatttgtatataatgtacattttaataatgtaataaatatgatttcattgacctcaattagaaaatagtgaataaatcaaaaaaaaagaaaatagtgaataaatagtttctccctaaaaaaaaaaagaataaatagtttcaataaacattacagcacgtagagagagatagaaagaaaattaaaaagagaaaattggcaaatttagagaaaagaaagagaaatcagaatcagaaaaagaaaatattacagagtgtggccgttcaaacggccaactccacctcaacctcaacatctggttggcgctcaatgtcatcaattcaccatttttctctctctctctacaaaacccaccaacaaaatccaccattttttcccggaaaatccttcaccctcttcaatccaatatttatttcaattatattcatgagctgaggtggtttgtttcatcgccataaggtaacaaataaattccttaaatattattattattattacccaatttgattatatattgtaagaagattgaatctttgtgtattgtgaatcgaaaaaagaagttgggtattgagaaaggttgaatttttagctgatgatgcagcataataaatttacaacaatgcgaagtttgaagatcatggatgggtgtaaaggaacccaggtttatgcacttaatccttctgggcctaccagcaccaccggaaatggggttggcgccggtaccggaagcggtggtggtggtgggggtggaggtggtgttggtgataagcttttacatcatcttcaagatcatcttagggtcaattccattagatccaaatcgaatcgaacttttcaagcttctgtaccaccaataccgaatacatctttatcagagaatcttcttccttatggattaccttccactgatctccttgaacctctcatcgagccttgtcttaaatacgttgatttcgttgaaacccttgctgatttgtatcgaaggatcgagaattgtccacagtttgataaatggaagatgtttgttgagcaatgttctgtgtttaagggactctcggatcccaaatttttccgacggagtctccggtcagcaaggcagcatgctgttgatgttcacaccaaaattgttctggctgcttggttaagatttgagagaagggaagatgagcttttgggtacttcggctatggattgttgtaaacgaaatctggaatgtcctaaggctgctttggtttctgggtataatccagaatcagtgtatgagtcttgtttgtgttgtagaaacagtttagatgaatttgaagaagatggggttttgattatggaggaagatgagtgttcaacatctgaggaagatggtgatatctcattttgtattggggatgaggagattaggtgtgtaaggtacaatatagcttctttgtctagaccttttagagcaatgttgtattgtggctttacagagtcaagaagggagatgattaacttctcaaagaacgggatctcggccgagggtatgagggcggccgagatttttagcagaactaaaagattagattcatttgatgcaagaattgttttggagttactgtctttggctaacaagttttgttgcgacgagatgaagtcggcctgtgatgctcatttggcttctttgatttgtgatatggaaggtgccatgttgttgatggagtatgggttggaggagactgcttatcttcttgtgtcagcttgtttacaggtgtttttgagagaactcccgggttcaatgcacaatccgaatatgatgaggtttttttgtagttcagaggctaggaaaagattggaaattgttggtcatgcttcttttgtgttgtatttgtttttgagccagattgccatggaggaagacatgaagtcaaacacaacagtgatgcttttggagaggctaggtgagtgtgcaactgagagttggcaacagcagctagcgtttcatcagttaggcgttgttatgcttgagcgcaaggaatacaaagacgcccagcgctatttcgaggctgcagctgaggctggtcatatttattcaatggtaggtgttgcaagagctaagttcaagcgtggacacaagtattctgcttataaacagatgaactctctcatttcggattacacaccagttggttggatgtatcaagagcgagctttgtattgtattggaaaggagaagatgatggatttgaacacagcaactgaattggatcctactctgtcctatccatacaagtatagagctgtgtctttgttagaggaaaacatggctggagcagccatttctgagatcaataagattattggtttcaaagtttctcctgattgtcttgaacttcgggcttggttattgatagttcttgaggattatgaaggagctttgagagatgttcgagcactgttgacacttgatccaagttacatgttatttcatggaagaatgcatggtgaccatatggtagagctccttcggcctatcgtttcgcagttgagccaggctgattgctggatgcagctctatgatcgatggtcctctgttgatgacattggttctcttgctgttgttcatcagatgttggcaaatgatccgggaaaaagccttctacgctttaggcagtctctcctattattaaggtaagtttacaaaaattgttggtagcttttgttaacatttttgttaatgaaagtggaatatttgagactgtttggctttacagtttaaaaactgttttttgttttttaaaattgaaaacagtttttaaaaactattaggagttgacaaaaatgtttaaaaattgagttttaaaatactagaaaatagaaaatatcaaaatgttgttttcaattttcaaaaataattttttttgtctaacatattatattttatattttgctcacatactctgattttagacccaaaaccatacccgaacatagacccagatgggttaatgtcatggtatggtgttaaaatattgatttttttttgtaagaaaaaatctaaaaacagtttttaaaaatttgtgccaaataccattaaatttttaaaatgacaaaaaacagttttctattctcatttttaaaaacacaattttaaaaactgaaaactaaaaacacagccaaactgtttttcaaaactaaaaatatgttctgcttttgtattttaattttaattttaaaaacaaaaaacaaaatatatgaatttttgacttttttttttttaaattaggcaacatagctgattttaaatattagatatattaattttttatttcatatttgtttaattatatattaatgaataaaatattgtatcttacaacaaaaaaatgaatgaaatattgtgaaaattaaaatgaataaatgaaaacataaaagtcagtctttctttttgctcactgacaagtgtgagagtctccggactctcttcctttttttttatttttattttttaactttttttctttcaaacattaacttggcagtccttactttatttatttattttgttactttttcttttaattgcataacatctaaatatttctcttattttattttatttgtattttttaaaaactttacaaataaatttccaacttcatatacttatttctctctcttttttcttttacaagttttaaaaatattattttttactacacaaataattgttttggttttaagagttatattattgcaatcaattttttaagataattatttttaatatgtggaaaatatattatttttttgccgtcaccaaagaaagataatcgaacattttagtttcttttatattttcttaagtaattaatctttaaacttgaataaaattagtgtaccaaacaactggataggtcactaaaaagtattttcttattttatctttagatgtcacaagattaaattataaatagacttattttcataaaactattttgatagatttataaaataacttgtaaataaattaaatagtatcttaaatattatataagttacaatttaaaaaaaaatgccaaacattaagcttaaacaaaattaaatatacttactgttaactcgaaaattttcctggtgatatagacatcaatatttttatatttagacattacaagattgaataaaaattaacttaattttataaaactattttaattggtttataaaataatttgtagataaattaaatagtatctgaaacatcatatgagttacattaaaaaaaaaaaaaaggtaatctcaaggtatcttaaacaataaaataacataatgtagcttaaaaatatataaagaaaacaaaaaagttttttttattattagccgtcttttttttggaaacagaaaaatatatgtttctcatatattaaaatgattatattattatttatatatatttaaaattctgaaataaattttttaacagaaaaataatcaattgatatcttattcacatcaaaagcaactaaatgattgtttttttttcaactctcccaaaaagcaaaaattcttagaaatgagatttttttagttttttctatttttggcagttattttgaattttggtatgtatgctgacgtggtacgacgatattttacctgagagagagagtcgagatatagagagaggaagagattttacctgtagaatagctgaagctatgaaagagaatatggaatggtatgagcttctaaacgaggaatcgagccagagagagaaacaaaagggaaaaagtgtttttaaatttatttaattttgattttaaattaagaaaaccaaaaatatttactgaatgcattttttttcttctttccccgctttatcaattaaaaaacagaaattcaatgtgtaaattgttaccgaacagggccgtagtttgtaacttagatttctgtttatacaattgaaacttgttcatgagctttcaaaacttattattttctagatgttgttttcttgagatgtaaattattgacttttatgtattagctcttagggtgttctaagtgtgatcacaaacttgctgcattgttttagcagtgtttctgatttttttgatgtttgtaggttgaattgtcagaaagctgcaatgcgtagtctacgattggctcgaaatcattctagttccgagcatgaaagacttgtttatgaaggatggattctttatgacactggtcaccgcgaagaagccttggcaaaagcagaggaatctattgctatacagagatcatttgaagcttatttccttaaagcatatgctttatcagactccactctcgatcccgagtcttcaatgcatgtgatccatattttggaggaagctcttcgatgcccttccgatggccttaggaaaggacaagtatgtgccaaattctgcacaattctatcatcttggttattatagcaaaattatacattaactctgaacaacttcattgtgtgcaggcactaaacaatttaggaagtgtgtatgtagactgtgataagttggatcttgccgctgactgctacatgaacgcactcaacattaagcatactcgcgcacatcagggtcttgctcgtgtataccatttgaaaaatcaacgaaaacttgcttatgatgagatgacgaagctgattgagaaggccagaaataacgcctcagcttatgagaaacgctcagaatattgtgaccgtgacatggcaaagagtgatcttaccacagcaacacaattagatccactgaggacatacccttacagatacagagcagcaggtaagcatgatttatctgtatttggtacacttttcttttcaatttgataatactcatgttcgaaatcaaatcttcaaaagaaaaataggcacccagttttcaagttggatgatatttgaaacatccttttggtacttttagttgcttgattgtcaaacttattcctctggcaaattatttgtttatgactaaaggaaaattctctgatgaccttatcccaatgagtaggacctatatagataatcatatttacttctgggctgtattaacacgagtagatctcgctagaaagtgagctacattgtttcgacaattttacaaagcccaagtaaccattgtaaccagcctttgttcagagccaccaaatcttgttttcgcctactaaacttcttaacgtgtcgttgcatgattgagggtatcttaaaaatttcttccttttctcaattttctacttaatgttatcttttctatctaaaatgctccaaatattttgcacatttcatcgtaaggtgttttgtagtgtacatgtaacagaacttattgcaaaatgtcttggaattggatgtgaaactagtttgtcttctattgattttttggtgtatttggattcaaactgaataaaactcaaatttcatgtaattttacatgtcttgaatggcataattactaactaacatcagaacttattgaaccaacagttttgatggatgaccataaggagaaagaagccataatagagctatcgaaaccgattgctttcaagccagatctgcagctgctgcatcttcgagcggccttttatgaatcaatgaacgattatgcttccacaatccgagactgtgcagcagctctgtgtcttgattccagccatgcggatactatcgagctttacaacatatctaaagagcatgtaaatgaaccataagaatgaatcacaccaaacatagatagccattgttcatcatctccattgagcaattccactgcttccaacccgaattttagacgaaaggcacagcagtcttgagctcagctcagcttatcttctttctttttatacgaaaaacttgcagagaagaaattcaaagagggaatggaatgaaagagagtttggattaaaaaaaggaagacaaagtagaggagcaagatataaagcatgtaaatattttttatttatccactggattatcagattgatcaatcttcaaccacactcagatcaatgatcttgaaagttgaaatcccttgtacatgaaatgaatctaatagataataattaaaaaaaaaaaacagagaggtcttgttaatgttatgttgtattttgccaagtgattttcaatgtaatgtaaccttagattcacacaattttcccttacaaaaaaccctcagtaatcaaagagcataattattaataaatattacttgtttattatcatgttcttaattctagtattcaaacacttggcttaattttcattgcataacctcaaatattcaaaatgagatacgtgggatattttcatccatgtaaaaacacatgtatctcattttataccaaagaaatatctatgtatactatatatatatagtcatatgtacttgacaaaacacataatatagctacgtacgtgtcaaactagggaactaattaaaccttgtaaaagttctagtccgtggagaatatattagaaacattagcctttttctttagcggtgttttattaagtacatacgtactactcatggtccttatatatataaatatatttatatagatttcaatcgatctacacacatgataacaaaaaaataaaggtacttcccttttttgaacaatactatcaacatgtgaagaaatctattttaacttaaaaaacttcacgagaaaccccccatacaattgttaaagcttaactttttatttaattacttcatccaacttttctctcttttgatcaaataatctttcttttcaaatgaaaaactcttctttattctctttctcaaaacacacacaacaacaacaaatctcccactatagtttgatcatcatttcaccctatggaacaagaaaatgattatgttgatcatgatcatcaaagctatagatcaagagctacttctcttaacttcaacgtaccattcttatcaacaagatttcttcatcattcaaactccattaatgaagctctctcttgttctagcataaggcgtcgtaatagcactagcgtaaatgatagggttccgttttcgtgggaaaaagcacccgggaaacctaaagacgacgaagattacaaaaacgaagtgtcgtatggcttaagcgacaccccacgtcccaaactcccaccgagtttattatggcattttcgtcacaaaaaaaatgacgtagaaaatgaaaacagttttagcgactattacgataattgtgacgcagatgtggaagttgaattagaagaaggggaagaaaaagtaagtgtttttaacgacagatcagacgatgtctactctgacgccatagatgtattctcactctccgaagcaattgacatcgtggaaagatcggagaaaagagcgcgggaattcacgacagacaagttgaagttgaagatcattgaagattctagaaatggtattaacaatcagtacccggattttattatccagagatttttgcctgatgccacggccttagccgcggcttcaacgctcggggccatgagcttgaagaagagttgcgagagttattatagtaataataatattgctgatgatcgaagtttcaatcatcagcagagacgtcgttctcatcatcgtaaaacgttcacgtttggtggacggccttcttcgatgacgagaacgacatcgttttcttcgagcaaaggaggtgggtgtggtttggatatgctttttccttggaaacaggtgaagcataagtggcctatgtgtggtgtgaaaagccctgttcgtcatagcagctcttttagtattaataaaagtaataataataataataatagtatgcaactcaaacacaaaaaacgttgaaataattagtagtaatatatatccatccattattattatctcaaaaattttcttgtattttgtatagatatattaattaaggattattgaataagaacaatatctagtattattattatacatgcatgagtttaatatctaggttgtttttaatcattataattaacaaagtgcaagtattatttctctacttaattgcatgggattttgtttaaattaatctctatttctttgctgagtaccatgtatatatattgtattgaatcaatatgtatgtagattattgttttatctttattagtgggaagctttttgtgccattaataaattaattgataaattaatgtacttaattattttaataatatttgacaggtaatttcctataaaagacaaataaatattatattcaaacacatcttgaatattattcatcttcttttcggaagtccttccttctctcacctttttttaagtactaaagtttcatgataaaatttaaaaacaatttttggttacttctaattaaaaaaattaatatttagggtgttttcaagtgtccaaatttttacatttcatcaatatttaagatatttccacattatttatagatagagaaatttttagttttgagtttaagtcctagaacatgattaaatattatttaccagtttactattatgtgacatagagcatgtaatcgtctagtgttttcgactcagattggccagcacatttgaaattagatttaaagtaaaaaaagtcaattataccatttaacatattgatttatgatacggtaattatcgtttgtacgaaagagttattattcttaacttaaaattgttgttggatttcttacttattggttgcctcattaggcaacaataatgacattaattctctcatttggaaatgagaattaatggttactctatcaagtaacacgagtagtttatcatattatactaatacttgatattgtgaatatttatgttatattatgatttactgattaaatatatgagtatgtagttgattatatgaatattattggttgtatgttgtatgtgattttgtattattatttttcttgttgagtctttataatttacaggtgctttgtggtacagatagggaaaaaagaaaattatggcaaccacgagttagaggtcttccctagcgaatgtacatattagctcagctagcattgagtgtccaattgttcggatttata

SEQ ID NO: 15606 - DNA, 8998 bp, Cannabis sativa
cttgcagccacatcaactgtcactgaaggttgagaagaagttggaggggaggtggcaggtcgcggtggtgcagctgatggaaatgggaaaggtgttcctgcacctggagaaaatgcaggattgctgaatgggctattttgtctatccatttgacccatcatagtcttaagagcttgttgcattgcatatttctgtcagaatataattataaacaaacaaaattatgaaaaaaatagacataaacataatggcattggccaagtacccatatactttaattttgcatatttcttttgtttaacctccatgaggagattaacaagaaaacggccataaatggactggaaggaatttattaaattattattcttcaagtgacaaaaactcccatgagatccacagagcccttcttttcagaaaactaaaaaactattattagcgtaaaacaacaaaagatcaagaaggaccgcttgaaaaaacaaagacttgaacaatcagagaaggaaactttctgttcaacttgataaaatcatacttaaagaaatgtccctaaactctcatcttgtaactatttgggtaaggaattctttaatgcactctaagcaagcaaaatcatataaagaattgccaacttacggaggataacactaacctttaagttccctgccacctgccatagcaatcaacttgtcaaacatggtgtagttaaaaaaaggaatgtctaaaatgaattaaaacaaagaagctattctctcacccatgaaaatagtgctgaaagaccaacaccaactccaatccagaagagaggtgatcctctaccaaaaattgaaaaagaaaaatgaaatttaaattaaattaatataaacactcaaacgctaagctaatgaaataaattaacctctcatcacaacttgaattttttaaaataacagtcttaacaacaatataaacagcaataaaaagggtaaaatgtgattacaattgtgaagaagaagagctgggaggcaaaggttgcggcgtaacaccaacggaagatgtttgttgagtactactgcttgatgaaaaaatgcgtgcaaacttgtctaatttgtgtcatcaaaaaaacacaataagagtcagcataaatacattgcaaagttcatttttagtaatcaaaataagtgatacaatatgatgagaggtttaattcatttcaaatccctccaactacaaattagaaagactaaattctccattttcccctcctagctagattgtgatattatcttctaatttcttccctacaaaatttacctctagttcttttccttgtaattattaaaacaagctaaacacaaacatgagaatttgaaaattgaacaaaataacaattataatcccctcaaatttagacaaaccaaaagtgattgatggataaagcataagaaattaactctaagacgttgaaagcggttatgcaattattttcgtctttgcataaacataaatagattaattaataaatacagagagagagagggagagagagagaagaacactaacctggggaagaagaagatgaagctgtgatagtagagaggcgagaaggaggagcgtaagaaaaaacgggtctaagatagaaaagggcggaggaggatgagggggagagggaggaggagtatcggaatcgaaggggaggagtggaggaagaagggttaagggaatgggaaagagatagagacattgagagaggcatcgtcaccatttgcaacccaaaccctcttttacctctctctgcaatttactcacaaaaacgaagaaacaaagaaacaaagaagaagaagaagaagaaaagagtgtttgtttgtttgtttgtttggggttttagccttggatcaaatcaactactactactactatcatcttcttccaccctaattaccaatttacccctctctttactcatccttctctcttccatttttttttttaaagggatcttaagagcattgttatgtttagcactccttttttgtattgatataattaagtattcggtttcatttcattttaaaaaataatttttagagaacattattaattatatataaaaaattgttgagcactactaacactcaataataacaatattttataataattttttaattagctatgtttgatatttaaactataccaattagtatcagtgtaatactttttaatatttctcttttttattaagtaataaaggaagtgtgtgctgcctaacttaactttttaattaaatttaaagtttgttttaattaatagtgtatcacctctaagttctagcctatgctcataaaaccaaataaaatgtatgtaatttcgtcatgtaatatattatcacaatttctaacaatattaagatttattattactattattagtttatcacatataaatgaaaattatatttttatattattttttttgatgaaatatatttttatattattgagaggaggcaaagttatctcatcatgtgaacctctacgtagttttttttaatttcaaacaaataaatacccaaaattataatcaaattttaatccatgataataagatgatgatatattttcctaattctaatatatttttccacatattatttatttaaatgagctttttaatattgtaaaaaatttggtaagaaattataaaaatgaattaaatcggctttttcagctttgaataaaataaaatttagtgcctcgtttcgtaaaagcgagattagaatagaattcttcaaagtaatgaaatgaaatgaaacgacatagaagaataatggaaacgacatgaaaaagtgaagaaaagatgcaagctcaagctcaaggtggtcatggcggtcaaggtcaggttcaggttccggcgagcgaagtgttctggtcactggtccacaaagccgataagaaattctccaaaatcagagatcttccctattaccaccgcaacaggtaccttcctacctactcactacgcttagggttaccattttcaatttcaatcttcattttcattttcattttgattttgatgatccatgatccattcgatggatcaggcaggagtacgatgcttacttctacaaggtcttcaaggtctacactcaggtatggaagttccagcaagaaaatcgtcacaaactcgtcgaaactggcctcaagaggtcagagatcggcgatattgcctctaggatcgctcagctctacttcgctcactacatgaggaccagtcaggcaagctatctccacgaggctttcatcttctacgacgccattctcactcgagactacttcaatttccactctcactccaatgcttcacctcacgacatctccctcgcctccaaacatctccgcttcatttcaaggtacattttactttcttattggattcgatttagatcagtgtttgtttgtttgttgtaaataaataaacacgtaatgtgcttgcttcaggtttctgatggtgtgcttgcttttgaaccggcgagaaatggttcagcaactgcttaaccagctcaggcttttgcttgatgaatgcaagaggaccttcaaagaaaccgacttcaaggaatggaagctggttcttcaggagctggttaggtttttgaaatatgacaccaattttatgaatatcaggcctcttaggtatagtgttgtgttggacactttttccgattcgctgtctccacacaactgttctaggaatttgaggcttcgagacgctgttctcgccagttatcatcacaatgaggttaggtatcgatcaaggttttccttctctatctttttttcaattcaattacaaatgctttgctaatgtctgtcaacataacctgaccacatttcatggctaactgaattggaaacctttattgctgttgttgttatctttggtggtacacaggtaaaattttcagaggtaactcttgacactttcaggatgcttcagtgcctggagtgggagccctgtggctcattttaccaatcaaatctaaccaagaatggtcaaaacggaccctctgctgcccctaaagatattctcgaccctacactgcctcctaatcctagaaaggcggttttatatcgtccttccatcacacattttctagctgtaagtatgacaaatatttttcaataaggcttcatacaattgtgaattttcatctatgctctctattatgttaagttaacatcatggaatttattatgagaaaactgtttactcctactacttgtagttatgttgttgagtaaataactttttagtgtgtgacaatgtgatattggtctgcttgatattatttcagaattgttgtgtttttaagcctatttaaatcttatgtctactttcttatggcaggttgttgccactatatgtgaagagctccctcctgatggaattttgttaatttacttgtcagcttcaggtttatttcttgtcttttattcaaaataacattttagttcgtgattgttactttttgttatagttggtagactgttatttatttgtattgtttcatctataagaactattattctgtctcctgcaggtgctcggtacactgataccacctccccttctccattaggatctgtgttggaaagattagacccttcttccgagcagcctgaagaatgtagctcagcattaaattctggttgtttacactttgggactcgtgggaatggaggtatgtgcttatgttcttttgacaatgtgatttatatggcatttttagtattgactttatacatgagaagcagacaattttctaacttgaggatttattctaacgtctgatgaatcattttacaggaataaattgcatttatcccagtgacctggttccttttacaagaagaccacttttcttagttattgatggtgacagtaatgaagcatttgaggcaagtaatcacctgccatgtttgaggacatctacttttttaaatgcattggttctcaattgtgatacatgctactttaaatattcaaccaatatttttttattttaaaatcgtattgctgattgtgttgtatattatagagttcaatttttgcatttatcaaaacaaactgtcattttgatgtgtatgatgagtagtattttattttggtctctagtgaaatatttatttcacctatataaaaggttattttgattgtgtgagaaggcgataaatggagcagcaaaaggagaaatggcagcaatccttctttctccgagaagttcgtatcactgcaccagcactggttcgcctcttcattctaccggaagtctattcactgtttttcttacagctccattacaggctttctgtttgttgctttgcatttctgactcagatgttgaaatggtatgtattgtgtaacagtcaacccttttggtttatgaatactgctgttttttagcctttttttatcctgactcgctagctataacaaactatttcaggatacatttgttaaggctgagaaattgatctcatctttcttaaaagattggggtgtaaagttagctgcatcagactcccttcatcctgtgtgggctcagattttgaacgaccctttccttaggcgacttgtcttgaggtaacattgattttcactttgtgttcgttagtttatctgcttgtgggatgattgaaatatgttggaacagtgaaacatttggtgggttagcatcagatatgcttataaacgcttggaaacttaaaaatgtagccctttttctaagattcaggtgaaattaaaacaaagattgaagacgttggtaaagtaaaattcagaccgtgtcattatctgcaaaaagaaaaactataattcctttgttgagctgattcataaaaaaaagtttagagcagttactgagtctacattttcttctatacaggtttctgttctgtcaggcagtgcttgcattacatgctcccacattcaataaagatgaattcgtaccaaagtctctgcctgcgctcccaccatctttcctgccttcaactgtcttatgtcaaacgctagttatgcagctagcgaatatcttcggtgctaccaacagtttcgtattctctgattcggttgcacttccagaaaatgcatacggtgacacagactcaatgtcatcttcttgaaagcatgggtggagagccaatctgtatcagttcaaacagtcaaaatatccgagttgtgttttcataattgtgctttaagtaggttacaaatttacaagtgtggaaattcagggttaaattgtggaatggtcaatctcactttgttaaaatcaagatcacttgaaggttgttatgatgtgatatggcacaattttgtgtgttgaatcatcaaattggatggtaaaaattgcctggcatacaaagctgagttgagtaccatgatatattttactatttttgaccatgacattattttgtaatgaagatatataataaagtaaagtatggtttttctatgatgaaaacttatgtgatattgagtctcaacttccttggactctatctgacaattgcataacgaacacagatatcacatactagatagatgtactgctatggatgcttccaacttgctaagaccacaaaagtcatatggtaagaaaatactagtccctaaaccatactttgataccatgatgtctattaatttaagttaaattagtttattgcaaaatggcaaatgacaataaaataagaataaaacagaaaatgagtattaatttaagtttttatatgaagatcgagcagaggcaaactgcagtgatgagttaaatagtgaatgtggcacaagaagtagataaagcaacgttcacatttgcagaactgtctgtctgtgatatatattcgtatattaattaatagcacacatgtacactataagacgaaactggtgaattctaggagtatcagattctcactctcgatcatatcttccatatatatcatcttaattatattattccttttgttttttatttactatatatactaaccccactactcacttcttctcttaaattaataccttattaaatataaaccatgcgaccatgtacagtacagtgtcctttttactcactatattatatagattataaatagaaaatatttaaaaattgcatgcatatatgtagtacgtggaatcacacattgattattaagcatctttatattaatgtattaacggtatatattaactttgatattattattattattttgaattaataacataagtaaacaaaagaacatgatgatgatgatctaatcaacaacatgctaatatatgtaaattaacgttccatttagggaggtgttatatttgtgttgtccttatattacccaccactccacttatatatttattgactgtaccatatatttataacatggaccagtaattaatatattattaattgtaatatactgtagtctgtaccatgtctatacatataataacccaaacaaattaatccaacgttcatttatctgtactcataatcatcatgatctcaattctcatgcatgctgctatagttctttcttatttatttatttatttatttatattttaataacaaaatgaaaattttaatggaattataactactcagtacgtacgaggcatcatcataacttaagcatttatttcaatcttcaacaatgttcatataaatatatgcttatttagttcacaggctcacaccacaccagatcatcatatactcgtgccatacttttttttcttagaaaagtacgcgtgacaaaatatacagtctaacgtacaatacatgtttatttttttaattaagttccaaattaaatatatatacttttaagttatagccattgcatatatattattagccctcatgaaaactccaaaaaaaattgatccatttcatggtgatgatcttcacggcactgagttgaaataagttataagtgaaaaaaaattaaactcttactattataaagataaatagtatttataaaaattattaaaaaaaatatgtatattttttaaaagtattttttttatttgggtccttaaaacgagtgggccctaggtgcgggtctaacccgctatacttaaggcccaccctgatgatcttcaaaattagaacagacagtagtaaattatttgagcatttctatttggtaccttaatatgtctaatactagtgtgtgtatatatagtgattttgtaatggtcattgagaactatgtccacttgggtaaacgctcaatggaaaggagtccagttaggttattgaaaactacgtctcattttataatggtcattcttctttattttctggttgtattttctctaatattaataggaattgtaattatgtagcccataatgtggctaaatgggcgtttatccataagttatttggtgataccccgatattcatcatcccttcaaatattttatgcaatgacagtgaggtctaacttattcttaatctaagacgcttttattcaaagaaaaaaaaagtatatatagtgattttgcatattattaaataaattaaaatgtatgagattcgatattacattacacatgacacttcctatttgaaagtatctcttatcatttataataatgagtattattattggatgcttaatctttttataagtaaagttttacaattaattaataatatttcttaaacattattttataatatttagttaaatcaataactataactattaagtatatgataggtacaagaaaattggtaggtaagaattaggttttattaatatttgtggcagttgcatggcatttccgttaatataagcataaaagatgtgtattctcaataaatgaaccacgtgtccagaccagtctgacgtgtcaacaacgctcctttctctttcctttttaaaccctctcctcttcactcctcactatactatctatctcactagtacta

SEQ ID NO: 15607 - DNA, 13064 bp, Cannabis sativa
  modified_base (100)..(107): a, c, t, g, unknown or other
  modified_base (9315)..(9315): a, c, t, g, unknown or other
tagtcaagcaaaaataactaagacaccacataaatcagttactaaagaaaccgaacctttagatttgatacattctgatatatgtgaacttgatggaacnnnnnnnngaaatggtaaacattattttattaaatttatcgatgattgttctaattttacttatgtgtacttgatgaaaaataaaaatgatgcacttgacatgttcaaattatttgtggctgaaattgagaatcaatttaataagaaaataaaaatgcttcgtagtgatagatgaattgaatatgaatcgaacttgtttattgaattttataattcacagggtatgatacacgaaaagactgcaccatattcacctaaaataaacggtaaagctgaaagaaaaaaataaaacctttacagaattagttatgactattttgttgaattctggtgctgcttctcattggtgaggtgaaattttattaactgtttgctatgttctgaatagagtacgtaaatctaagagcaaagtttcaccttatgagatcttgaaaaataagcaactaaatgtttcttattttagaacttgggttgtttagcttatgttagaattcatgatcctaagagaataaaattagcttgcagagcctatgaatgtatatttattggatgtgcagtgaataacaaagcatatagattctataacttgaatgcacatgttatagtggaatctaatgatgctgatttttatgaacatagatttccctttaaattaagaaatagtgggggtgcatctactagcaatgttcctgcagttaggaataatgagcacattgagagtagtgaaatagttactagaagaagcaagagatctagagtagaaaaagactttggttcaaacttttgtgcttacaccttagaggaggatcctgccaacctccaagaagccttgtcttccctatatgttgatttgtggcaagaggccattgatgatgaaatagactcacttattacgaacaaaacctggcattataaaaacttaccacctgactgcaaaactatagggtgtaagtggattttgaaaaagaaatttaaacctgatggaactgttgacacatacaaagctcgtttagtagcaaagggttttagacaaagagagaatattgtcactagaattagatccattagagttttaatttcactagctgctatacacaatttagttgtgcaccaaatggatgttaggacagtgttctttaatggtgaattagaagaagaaatttacatggataaactttaaggtttcgtaatccctggccaggaacataaggtttacaagttagataaatctatgtatggtcttaagaaggaacctaagcaatggcatgagaaatttgataatttagctatatcacatgactttaaagtgaatgaaagtgacaaatgcaattactataaatctgagaatgacatttgcactattatatgtctatatgtggatgattttcttatatttggttcaaatatccatgttgttaatgttgtgaaatcattattatgtgataactttgatatgaaggacctcgaagaagctgatgtaatccttggtattaagattactaggtctgaaaagggaatttctttagatcaatctcattacattgagaagattctcaagaaatataattaatttgattgtaaacctgcttgcacaccatatgatccaagtgtaaagctatttaagaacaatggtaacggtgtgagacaatctgaatatgtgaacatcattagtagtcttcgatatgccactgattgtacgagacctgacattacctatgtcgtgagattattgtgcaggtttaccagtaggcctagtatagagcatcgacatgctattgagagggtaatgagataccttaagagaaccatgaaccttggattacatgatcaaaggtttctagctgtccttgaaggatacagtgatgtagactggaccactttgtcagatgactccaaaacaacgagtggctatatttttggcatagctggtggcactgtttcttggaagtcaaagaaacagactcttgatagactcacctatgtgaatgtgggagtggggccgcttcctatggaatttagggcaaaatttctagagcgtttactatactgggatagacgtgcatgaccattaacacacgagcttgtttgaatacatccttaaaagattggtgtgtggtacgatgttagagatggagttcaagaccttaagtcactctagtaaaatttaaattgtattcactatgcaagattcaaatcgaaagatatctttgtttaagcactgtcttataggtgtctattgctcgagaaaatatttttaaaatttcaagtgggggattgttggaactttgtgaaattttataaaaaaaaaatagaaaataatttatgtgagtaaatggattcccacgggatagaaacacttcattagaagtgcatataatgtgcaagtttgagatttgggtttgggactcacacactacaccaccatacatgtgcgcatgctgctgccgccattcgtccgaccgagctgggccggagggcgggtgaggtgtcacttaatttttttaaaaaaattatttactaaataaaatttaacgtggatgaaatactccctaattaggataggcgtctaagatttactccacattttgctggtaggtcttgatgtataacgatcgagtatgtttgaaagcatatcgtcatagagaattacagttatttgagtgatccaccaagtagctagtttctgctacctgatcgaaccgtacgattgttctaaaatacccctaattaggataggcatgtaagatttactccacattgtgtcggtaggtcttaatctataatgatcgagtaagtttgagagcatatcgtcatagagaattacaattatttgagcgatccaccgagtagctagtttttgctatctgatcggacctcttttccaagcaacaaaatattaaaattatgaagcttccaaaatccaagttccctataaacctttgggacacacattcggttccaactcatcatgtgaatgccactatcattttcacacgaattcttccaccaaaaagaacacacttaatttttccatctcgtcacacacatttttaggcaaaagcaaaatgctcatagcataagtggggagagattgtactaccgtcttcaacaaaacctcattaccagctctagataaaaatttaccatcccacctttcaatctgcttcctcatcttttccttaagaaagcccaacactgttgacttgttgcagttcatagtatttaggagttcaagatatgagcaattctgactagcttccaccatacctaagatggagcacaagcaggctttcatactaacattagtattctagctaaagaaaataaaaaattggctgaatttaccttctgaaccaaagctatttcaaaactacgaagcaacaacatcaccgtattagcctcatcgtccagcgtctaacagtacaaataatggttacccgcaaagaacatatgagagataacaggcgcaccccgagtaactttacaacctttaaaccactctcttcgtacatagtcattaataagagcaaacaatccttccgcacataagataaacaagtaaggagacaaatgatccccttggcggatacgccgaggttgtataatcggtcccaaagagaaactaccatattagacccaatatttgtatatatttaatgatataatatattcatttattgtaataacaataaaataatatgcattactagcaattttttatacaattattttaacattatataattttttttttttaaaaaaaaaagacatgaaaatgaaataaatgtatttttataatttttattatttgatttattatagggtctttttcatttattacttttacaattgactttttatttatttatatttttataatttacttgttattcatttataaaaataaaaacagcataacctcaaaataaaaacaacttctataaaatggaaacaatataaacttgaaataaaaactacatagccttaattctctaccttttgagggggataggatcacttggagtagtcaaggtcaaggtagagggctatcaaagaaaggttagattatggatttgttaatgactactgggaatctacctttcaagcatgttcaattcagcatctagactattacaagtctgaccatcgagccttaaaagttcttgttgaggctttgaatgaacaagcacaagaagttcacttcaagtctaggtttaggttcgaaaaaatttagctacatgaggaacaatgcgctccattaattcttgataattggtcaactggttcaagtaacaatattactcaactaacagccactatctctaatgttgcaaataaacttcagacttggcatcattccacattcggccaacttaagcaccagatcaaggacactcaaaagcatgtttctacacttcataactctaaaaaaaatagagaccacctgcaagctgtacaaacttcagaacaaatccttgatgaattgttagctaaagaagaggattattggcatcaaagatctcgcatatcatgtttacaatcgggggattccaacactaaattcttccaccagcatgccagtaccaggaagagaaataatcagatcagaaagcttattgatgctaatggtaatactcaaacaaatcctccggctcttttgaacataatttcagactactatcatgatcttttcacaagtaatggtgttgatcaagcctctttggatacaatccttgacaaaatcccctccaccattgatgatgattcaagaaatctcatttcggccccatatactgcatcctgatgtatatgatgcactaaaaactatgtgtgatgataaaagtccaggcattgatggcatgtcagtgatgttcttcacaaactattgagacattgttggtccacttgtcccagctgttgttttagatgttctgaatcatggtgccgatccaagtacatttaatacaactctgataacactcattcctaaagtgaaaaagccaagtcacatttcacaatataggcctattagtctttgcaatgtcctttacaagcttgtttccacagccattgtgataagactaaagccttatctcccacaagtcatttctgaataccaaagtgctttcctatctcagagactcattatggataatatacttgtgactttcgaattattccactcacttaagaatagaaaacgaggttcaaaggggttcgccgcaatcaaacttgatatgagcaaagctttcgatcgagtggagtggctctttgttgctcaaatcatgatcaaaatgggatttggaacaacaattgttgatctcatccttcgctgtttgacatcggtctcttactcttttttattgaatggttctattcaaggccaagtgacaccatctcgaggtatttggcaaggtgacccactttcgccttatttatttcttatatgtgctgagggtctctctcgtctcttgcaatatgaagaagcatcaggtgctttataatggttgaaaaattccaaatctgctcctttttgtatcacacctgtttttttgctgatgatagtgtcttattctgtcgtgctaatcaacaatcagctcgatcaatccacagatgtcttcaaacctatagcaaagcttcaggacaattaatcaacccagaaaagtgtgttctctctttctcagaaaacaaaaggcagcatgaataggttttcttcaaagatctacttggtatgcctattcaaccatgtcatgaacaatacttggggttaccttcgtttgctggtagagataaaaagaagctttttggaggcataactgataagatttggaaacttcttagttcctggaaagagcatttattctctgctggtggcaaagaagtattactaaaagcggtagtacaagccatacccacctatgcaatgagttgctttagatcgcctgttactctgtgtcaccaaattgaaagtatgatggcgagattttggtagggatcctctgcctcgggcaagaccattcactggaagaattggaaaattctttgtaaggctaaagttcaaggagggctgggatttcgcaatttcatacactttaaccaagctctcttggctaaacaagcttggcgtatcatcgagtttcctaactcccttttaagcaacctgctaagacatatatacttcttcaatggtaatttccttaaatttggtctgggatctaatccttcattaacttggagaagcattgtttggggaaaggatttactcttgaagggtctacgatggagggttggatcaggtctaaacatcaactgtaattagattcttggttgccaggacacactacttttaaaccatatttcttcaaaaaaaatcaaaccccaatttgatggttgcaaacttaattaatgggcaaagacaatgggatctgctatcactataggctaacttcagtcaagccgacattgatcgtatacttaccattcccttaagtctatttccccatgatgatgttctggtttggaatcactctttcacaggaatttataatgtcaagttcggttatcaacttgttgtttcacttgctgaacaagaagactcaacctgcagcagttcgattgaacattggtggtcaacattttggaagatgaagctccctccaaaagtgagaatctttgtttggaaaatctttcacacgtctcttcttgtagcagcagacctttatcgaagacatattgccacttcaccctactgctcaatctgtaattcttgtgaagaaacaataaaccatgctttgttctactgtccaagagcaaaatccgtctgggaattgtctaatttacgcattaacttcccaactttaggacaaagctcaggtgctgatatattacttcagctctcatcaacactttccacaccagattttgagctatttcttgttctttgctggagtatttggcatgaaaggaatgatattaatcacggtaatactgtccgaacaccagcggctgttgcatcatacgcatcatcgtatctccaagactttcaagctgcccgtgcaaagcgtacacaaacttttgcttcatcagctactactgtcaaagatcctcggccttcctcagaattcactcatgtacctaaatggacagctccaccccagggaagactcaaattaaacacagatggtgcaattgacaaagcacaaaatattgttggtattggagcgattctcagggattctgatggctttgttgttgctgcactatcgaagcctttcaaaggaaatttcaaagcagcgaaaatggaggctctaggacttgcactaagcctgaattggttactattgaataatctctcagtcgattacatagaaactgattcactattagttgtctaaggattaaaatcatcccatttatttctttctgcttttcatgctattcttaataatattaactatcttgtatcctttttcccacgagcacagatcggtcatgtttatcaatctgctaacacttatgtccatactttggttaagtttgctcttacggtggatgctgattgtacttggttggagacttttccatttccactaatgattcttatgtaattcttctgaattaatataatagtctttttctcaaaaaaaaaaatgaaaaataccgtatacaaggtaattctttttcatttatataattggctattttagtatacatatatatataataaaaaataaaaaataaaaaataaaaacattttcttaatctatttgagaacattttccaaccatatcgcccttacaattttgcgtctgttttcaacacaaaactcttaaattagttaagctaattacctaataatgatcacaactgttcttgactttgggtgtaacaaggtcgttgttgagtattcataagatttgtaagtttcttttttgacaattgaaatcgaggtagagcattggtagatctatcttctgttccacatatttttgactttgatacattaatttccttagccaacttctcggccatttcttcctccttaataacttcatcaaaacagatatatctaccacctcttcccttcctcattgcctcataaacacacacctgtgcctctgccaatctgtttacatccacacttgccaacaccccattttcgtacatctcttgagctcctgtaatttttaaacattagacacccaaaaagaattgtttaattatgaagttggaacttggggctcaaaaattgtttacctttaagataagccgttgtggctgttgcattgatattgttaaattcaggtccagtaatgagacctgggcaaatggatgccatttttaacccactttgctctgctattttccacgttgccttctcagcccgtagctttcccagtgcataccagagctgatttttgaaagtcaaatcaaaatatatattaaaatgacattccgtaattttaagaaaaatcccctttttgttttttttattaattaaattaaggtttattaatgttagtttgttacatccatgcaccatgatcaagataggaactaggaagcttacctttttgtctctacatagcgattcactactccagctatcgtggtttattacgggagaattttcttgttgagtgctcctgtctcgccatagacaagtcaaaagtgaagatgtgaacacaaatttcttcactgatggtgttcttgcgcatgccttgatcacattctcgctcgctttggcttctatgtcagccatgtatttctgtatagaaaccataatacacaagttaagtagctaattgaaaaagatttaactaaaaaatgatatcaaaattctagtccatagacccaactgtcggaagagtttttttttttttttctattactattgatcaatctaatttgggtcaatatgctttttctgttgttgaataaataaaaagggtattccaattttgctatacggtttagctttgtcaaacttgactacagtatatgaaagtaagacccattctctccaggaaggtgagagcttccgtggtgattgacttggattatgaaaaaaacaaataaattgctattttattttaaagttaaaatataatcgaaattccaaatgaagaagcctgctcggctttccacttcctagtagttcatgggtcaatattttatgtagcacgtttagcatatgacaatatatatatatatatntatatatatatatatgatatatccttaatacacaacaatgaaactatagttgtacataaaataattgtcatatgttacataatctaataattctctttcatatgatgaaatttgaggactcaacttctccatatatatttataattatatacgtgattcatcaatagatatatttcatatccaattagacatatgcaaatcacaaaatcaagagttaaacataaatcaatctgatgtgggtttaaaaaaaaaaattaaatcttgtggaccttaactataaccaaccaattgggaattggcttcctcacaaggaaaatctatgaaaaggtgtgaatgatttatgttaggccaactagttttaggcaaatcaagtatgcttataaagtttcgaacactattttccaagtagcattcaaataatgtaaatgtatttaattgactcgtttacttctccctattctagggaatgggttgaagcaatgataccgtgattttcaacatactacttattattaggagtctattgttccacgtcttctatataaaaaaaaataataataaaaatatggaaggtagcactaactaacccgtttttcttgggttaaggtttgagaactaatgagtataacataaacacctacacgtaatttattcctacttttaatcccaaatttacttaaacccaagtaatttatttaccttttaatctcaaatttactcatttgattcctatacaccgggtcccatcatatttaaaaaagagaaaatataatatgagttgttttttatttattatatgagttgtcacgttgtgacatgacattcacagcattcggtacgcatgtcacattttatatggaaaattatgtgtcacaattattttgagaaattatgtgtctcagttattttactcaataatgttattgattgagaatacaggagtaagtaggaaaagcccattaagcaaatattatatttttattttagtttagaaaataataaaatgagtgactaaccgtgtagccagagagacccgcagggtcaatgaaagcagaggtgtggaatacaccacgacaatccttgaaagcttctgatagtaagctctcttcatctgttaggttcgccattatggctgatatgttattactattgttattcccactgttgtagtttgactccatttcttctattttagccagatcttctgtacattttcaaatcatatcatgtaaacaattacattaattgacaaactatataatcatcatacgcatatacaataatagatttataaatattgaagagctaacgccaccaaaacagttaacaatagcatattgctaagaatcaaaaacagaacaccaaaatagtattatttgctaaatgaaaaataaaatcaattttgttgtgggtgaagaagaaaaaatggaacgaaagaaagaggaattgattgattgtttatttggatttacctggattatcgacgatgattcgaacggagtagccacgaatcaaaaggcggttgacgatggcgatacctaaaaaggaaagaccactggtgacacaaaccagtccacctcgttcaccttcatcggtttcgtcaacagcggcgttgaatcgatgatcgtgctggtttttccggcgatgggcgccggcagatgccattaacatgcggcggaactcgtggagctcggcctttgtcctgtcttctgatctaaggatgcccattgttgtgaggtgttagcagaagagtggagtgaagaggaatttggtttgtggatggagataagatgagtccgaagcttaatgctaaaccccttaatatatatgttaatgttaatgaagagagagagagagagagaaagagcagggcaatttctgaaatttggcaatcacgtaaaacgtattgatttttttatttttcatctgagcttcggctcggctcggctcggctcattctttgaccactgaatatgttattgttttctctctttctcgaccagtttggaattagattgggcaatccatcggacatgattggaattggaatattggatactattttttcaaaatatatatatatatataaaaaaaaattgagtcaaaattaaaatatattttaatgataactaaataaaaatttaaatttaaatataaatataaatataaaataaaataataataagccattatataaagtaataaaaaaaagtatatttttaaaaattaatatattatggttgttagaagaatttaaacatcaaaaattgcgagtattcaaactaagcaagaatactcacgtacaaaactgtgagtattcaattaaactagaaaatacttagaataattatacgattaattatcaagttggttagaattcgattagaagttagttaatatggtttggatttgtgtgaacagctttgaatttgttagtgagtttgttacacctcactaatccttactacagcatctggagaagatccatgttgattgctcttgttgctcgaaataaagtgaaatttgttaatagagattgcctcaaccagatgacgatcatgaagattatgacagctggtatagatgcaatagtactgtcatatcgtggattctacatgcaatttctgatgaaatagctaacactattatgtatctagataatgttgctgaaatctgatctgaaccctatgagaggtttatgaaaggaatgcacctcgaatctttgaagctaagaagactatgcaaagtcttactcaaggatcgaatagtgttactacttattttactcgactggaggccttgtgggatcagatcaaggaatatagaccacaacctattttttcttgtggtgctatgagagtgattcgggaatatcaaaaagaagatgagcttcttgaatttctagttggattaaatgattcttacagtatggtgagatctcaaattctgatgcgagatccactcccaaatgtgaataaagcctatgctactgtgatttaagaagaaaggcagtgtggactaactagtggccctagtaattcctctaaaattgaaaagtctactgcaggcaatcctggacagtttgttgttgctgttcaaccattcagatctaagtttaattacttgtactcattgtggcacaactagacatactattgatagatgttacagactcattggatatccacctggtcataagttacatgaaaaatttccaaatcgaaatgctgcacctaaatctgctgctacaaatgctatgggaactgatgaggaaaagcttgaagactaatgttcaatgccaaaagcttatggccttgcttgctcagaaagtacctaataagacttgaatcaatacacctgatgagcagcccatagtatctcatttctctggtaagaactcttttgtacagtgaaaattggatcatagatactggggcaacacatcatgtgtgtcacaacatctcattactcaaaaatgcctatcatgattctcgtcttaaaactgttttactgcctaatggtttacatacacgagtttcctgtcttggaattgttgagttaaaccataacttagtccttaaaaatagggttgttcaaaaaaaattaacaaatcgtccaacccaaataaactgcccaaaccaaattgagtaaactgacaaaaaatacaacctgaataactttacgaaaaattcaaacaacccaatgaatatattaagcgggttaaatattattctaacccacccaaataa

SEQ ID NO: 15608 - DNA, 2058 bp, Cannabis sativa
gattggcctatctaatgatacccgacttgatgagttagtgttgggagatgtaaacttatttgttgatgatggttttaataccaatgactggaaaaattggtcttggggttgtggtgatgagtcaagcaagtgaagttttctacttatagtgtcagtgatggcagcctatgaacctcgtgtggcaaaagcggtagctttgttgcaaggggtgattttttgtcctcgtctcgggtatacaagtcgtcggtattctctaattaattttatttggtacaagttactttgagtaaaaaaaaaatcattccactaaatttaacgctattattaaggatattaaaaatttcttattctctctaatattttcttttattattgtaagtgattattaaatggattgacctattctcttgctcgtattgcactttctttaaatactgctaaataaagtttagtgcccagatctctcccttaataattttgaattttgtattgatcttttgaattgctggctttgtgccttttaatggaaacattccttcgtttcaaaataataatgttcaggtagagaactctcaacaatttacaatcgaaaaaatcctaatgttttattttcttaataaatactatgtcacaagctacccttaaaaaaggaaaagaaaagaaacatgccccatctgattttttttttcttttacaaattaggaggtatttggtctccaactcaccaatcaaaacagtactttttcttgtgacatatcataatacctattatcatcaactatatcacactcccatgtagtatatagtcaaagacaaattggctctgacaatattatcaacaagttatttataaagaaaaaaaaaaaggtgaatataatatatagacacatagttatgagtcatgacactgctaaaagatacccttcagtggctacattttatacataaattttatacactcactactcgtatatgtatatatatatatatgatctatgtatgtatatatccatatgactcactgcctttttgctaatgtcttcttcaatccattaaaaatcttagcaaaccacatcaaattcatcacacctaacaccaaaggcaccactgttactaaaaacactcccaatgtctgaatttgtctaacctgttgtgtgagaaaacattaatcaaatcaaatgtttaaaatggtttcaatgattttcagtactctcatcagttgatattgtcatcatttacctggtcatagtgaaagtagatgtgataaaagaggtacatgaataagattattctagcaacctgcattatatcaattagcacaggtgtgagtgaagaatagaagttttctttcatgaatgaatacaagcacttcataatacagattttgacataccagccaagaaaagaatatcccaaccccatttattatatatgctctagacctcttcataccagctatgtcaagataccttcaaaagtagcattatttatgtacacaatgagataaattacaagaaagaaccattactattaccataattagtactattactatagagattttaccatctcaagttgatcccaggagtggttgtttcggatataagaaccatatatgtataaagctgagcctctccagtcaacatggcataggccaatgatacaatagacagaagatgatgaaccacctgatatgttagagaaaggaaaaacaatcaatggatattaactgaactccaaattggttgttttggcacttggctcagttaattatgtccaaaagggagtacacttacatactctaaaccacctagatcaggataaaaccagaagatcatcgcaatgtcggcaagaaagtaaccaaccgaaacctgtcaaattacagcagtgtgaaatggatgtatatatctcttaaccaaatgaacacagcatacactaacatgtgtagaacttacactatatagtaatcaatctcaagttgaaagcagatttaaagttagagaataagggaaaaagaagtagatatacatgaaatgagatgctctataagcttcaatt

SEQ ID NO: 15609 - DNA, 3175 bp, Cannabis sativa
accatctttatggtaattagttaccttggtacctggttactcttacttgatttttctatatttttttcacaaaataacttttttttaatttttttgttaatttttctaagacccaacaaatctcaaaatggagaaatttcatgaaggtgtaacattcattatattatgtttcattttctaatggtcaattgtatggaacatttttttttttcatgaactggtcaactgaactaagtttgactaatgctgtcctgttctgttcttgtaggaacaactgctggtgtttggagaattgctgcgattaacgaggccggcgggtggaaagacagaaccactgtcgaagacatggatctcgccgttcgtgctagtcttaggggatggaaatttgtctaccttggtgatcttcaggtacatttttttttctttactctgtaatttacaataaccaaagcatttttcttaccaatttttctctttttcgggttataactacataggtgaagagtgaattgcctagtacattcaacgcttttcgattccagcagcatagatggtcatgtggcccagcaaatttgttcaggaaaatggtgatggagattgtcagaaataaggttagctaattattaaagtgacaaatgtgaagaaacattattaatttgtgtctgtttttttaccttaatttaatttgtttgttttttgtataatgcagaaagttaaattctggaagaaagtgtatgttatatacagtttcttctttgtgagaaagatcatagctcacatggtgactttcacattttactgtgttgtacttcctttgactattttggttcctgaagtcaaagttccaatctggggagctgtctatatcccttctgtcattactattctcaactctgttggaactccaaggttagtctgctttttcggtttttagggtaaatattattttggacactgtatttgtgttatcttttctctttaataatgttcttgctttttggtttttttctttaacaggtcaattcaccttttgttttactggattctgttcgagaatgttatgtcgatgcaccgaacaaaggcgactttgatcggtcttttggaagccggtagagtcaacgaatgggttgtcaccgaaaaattaggtgatatcgtcaagaacaacgctgctgctgctgctatcgccaagaaaacacccttcaaactcttcaaaaaacccgggtttaaattcggtgcaaggtatattttatcactaaaaattctttctttttgttcttgcacatgtactactaaaccaaccacatgttataccactttgtttttatcctaaaagaagaatcttttagttatttattcattgtttttttgttttgtgtttaatttaatgacagattacatctattggagcttggttttggagtgttcctcttcttatgtggatgctatgattttgttcatggcaaaaacaactactttgtttacctattccttcaaaccattaccttcttcatctgtggatttggctatgttggcaccatcataccaagctcatgatcttagttcaagcaaattattatttattattattattattattatcatatatatttatatactttgaagaaaaaaaaacagaatgatttgtttttcacccaaggtccaaaaaatccttgtcatctgcaacaaaaaatgtataagtgaggaggaaatttgtaccatatgttctcatcatcaagctcattttttaagttaagaaaacaaagcgatttatcggtcgatcgatcggtggtgcggaaatgaggaacaaatattgaaagaaaatgttgttcttgatgttgatcacttagataagatgcagaaaacagcataggtttagagtatttaggcaaggagattattattattattattattattatgttggtttttaaattttattttttggtaacattgtaattttattttttgggttaaattttgtttccttttatttttttttgggggtattttgtagttttttttttggaagaattgggtgggtttaggttagatttgcttggaataatatctcatagttgaaaagggtgtatttgtaatttattaccatttgatgtctctgtaaacttctttatattagagtgtattgaaaaactgtatggaatatatatacaggagaaggttcagagagactaaatattttgattattttttatgcttgataattattatttggatattttatttatatgaggggaccaatgttgacatatttgaaaactattattagagacaatgacataatatcaaattgttcatatactaattcttaaattttgatatctattaaattatgctcttcaaactttaatatgtatcaaattatgctcttaaaattttcatctacattacacttttttttagtaaaattaaacaaagaataggggaaacataattcttaacgacatgaaaaatttaagagatataatttagtatatgtcaaaattcaaagaacaaaaatctaaattaaccgttataaaattttgaaatattaatagaattcctatatataattaacacttttattataaccaatcttgaacctaacattaatatttaatttttgggaaagaaaagatgccaagaaggacaataatgtatatatatgtacaattctaaggttactttgatatttcaatatgtaaaagatttaaatatcaaaattgaacaaaaagacaaggttgtcactctaatcacttgtctaattaatattattaagcatgcatatcatcctaataattaccctttatcacaataacaagaggaattttgaagattaagcttaatttaaggactatgatgagtagtaatgttttagtgagttttatttattttaggggaaaaagtcatgtcataattaattgtttgactttgaaatggtataaaccaaattagatcactcattatcattatttgacatgtccaaacattttcatgataagttcattaaaattttactaggtgagccatgtcaaggcaaaacctataatagctaacccaacattttcatttcaccttttcatgcctaacactagatcaatcattaattcaaagtcttgtgatgatgttgtaaatacacatatattatttgcattgaccattttgctcactttgaaag

SEQ ID NO: 15610 - DNA, 4373 bp, Cannabis sativa
ttgtgaaaacaaaaaataaaataaaatattttcattagcctaaggttcatgtaatgctaattcgagcaagtgttcacttaccggtcccttgttgccagttaacctccgaattgatggagcccttgccatagatgaagctgctgcagctgcagccacacggattctgcaagaattgaagaaaaaaaaaatcacattaaaattcgttgtaggtccataaatatcgacttagctttactaaagcttttcaactcgacaaaccttttatgcacatcaacaaattcatctgtttcatcaacaatctcttcctgtaaaggtttaaaaaaatcatcagtttgttatatctacaggacaatagccatgaactgaaaggagagacatcactagccttaaattacctgcagaagttcttcgaaaacatcttccaaggtaataattccaataacttcaccatcttctatgtcctcagacaaacgaggcaaaccaatacttgttgtatcattacggaaagaagattccttgtttaaaatgttagtccttggagtcttgtcgatttcaacgacaaaattgtctgatttcttgtcgtgcttgagaagcaaaggagtagtgagtttagagtcaccacttgtaaaattgctgtcatcatctttctccccgtcaattgtaggaagcttgctttttcctttagtcttcaccacagctgccatatgactgctgcccttctgaaactcgttcaatatatcatacagtggcatatcggcaggaactctgagtatacatacaacatacaaaatacgaatcaacactagatactctggatgaatatgtattttctgacaaataaagaattagtaaatgaagaattaagaaaaccgtggtattctccggatagaaacagcactgactggagtctcggtttcaggtcgtacagtaagaagacttttcacctaacaataaacaaaattgaacaagtcaaagagcaaaatagaaaatatgttgcccgctgtcaattcccttgctaagtcaaatttaaagtgcatgtagtatacaaacatctactaaacattcacattctactattctagcacccaccagaagcagtccaattacgttctttggattcccagaatagacaggaactcgactatgccctcgagcaagaatttttcccatagcttccctggtttatagagtaaaaaagggatgaaaaatgagaaatacagcgaatagagtaattttttctactacaaacttctgctaagtgaacagaaaataactgtggtaaggaaacacatcaagttatcaggggattcatacattcctaaaatttcaattgcagtataagacatgtttcagtaaaacacgcgtcattagatatgccagagcactgtacgcaaaaataaaagtacagtatcctaagtaaaactttatgtaaaaaggtgacagatatatagactactgacaagccagcagctaatggagatagtgttctcaagatgataggctatcttttagaagggaacctgtcagacaaccgactgaccaccccagctagaggactagctgagaacgatcctctacagccgtgataatccgaagatgatctagccgtaaatcactcttatcggacggtcacgattcatccaccaggtttggtttcctatctccttagaactcaaggaaacagaggtacaagccgaagatgatggttatcacaactaaattatcctttcttttatagcaatctatcattagactatgacaacgaaactttttattagcccgacattgactttcaagagggggtgattagaagtttaaactttttcaaatattataaacccaaactatctatttatgcaaataatgaaactaaagcaaataaatagatgaacaaatgtaaaatcaaagtagatacttgaagtgaaatgaattaagtggtagcaatatcaaattctcgattttagaaagttcaatgaaactaaagtcatctacgaccttggtcttcaaagttagaacgatcttcgaattccactaatgaattatggacttgaccaatcctttcatacaatcagtaactttcaccaaggtctaccaaaccttatacaatagttttttcaagaattgtcaacctcacttggattgttgaattgctattttcacctattttgagctgtttgaaataacggcgccaacctcaccttaatacaaagaaagaatttattgaaggtgcgaaaaatacagcaaactctctcttgatttacaaaatacaatgtaagaaccaagtgagaaattcacaaactcgagaaaaatcaattttggctcaagatatgggaaaatagttttcaacaaagttctttgaataaaatggttagagcattttgatagcaatatcagcaattctagaataatcaaggatgtttcaaacatttaagattggtctacttataaagaaaatgactgtttgaagaattaaattgctctctacatgagtcaggtgcagtcggttgaccaactaatatagccgttgcaagcgcacttggtaaagaaagtgtgcccctctttttaacacgcgtcagcctgcacaatttctgggaaaaggctttttaccgttgacgtttatgatttggtaattagcactaagagtggctaggaagtggaaggagcatcatgaggattatcaaaaaccaaagtggaagtggaacaacactaagattaggaacaacacgtatctagagagccccatgagcttacgtgttccttatacgtattgaggaagtggagagtaagctcatgagtcatgatgctccttatacatgttcttaagaatatgtaaggtcaaagtgttcttccttaataagtatacgtatttagtgtaaggccaaaatgttgttcctaatcttcaaggagaatcatggggtttctaggggtttagagtggaagtggaagtgtaaggtcaattttatttttgagatatgtaaggtcagagtgttgttcctaaattctgaatacatcaaatctcaaatgtattaatgtatacactgaaaaccaaaagtgacaaaatcttaatgtatttttggttcaccatttttatgattaagtgtattgaatatatattgtacacagaaaaaaaaaaggaaaactttctcctacatacatatatgtaatcaagaaaacattcttgataacattcagatggaacaatataatgttatatacatatatatacatatgtatactcaaatcaacatgattaagcacatttcagtaattgaatttgagactgtcggtttaccttgtttatatctagagttcaaagtctaatttggttgagaaagttaaattcaaaatctaggcacaatattatatgtaagaaaatgatggatacccttccttagtttcatgaatggtgaggtcctttcaaagtggcttcaacttttttttttttttgaaagaatttgaagtggctttaactgaaaagcttgattgatgcatattccagagcaaacaccttggagtgagaaattccccaaagcttgttcatgaggataaaaaatagcgcccaacatcaaaccatgtgggaatactttcaatgttttggaccccctccataatttttatgttttttgttttttgttttttgcttttatgtttcaaatatgtatgtctctctaaagccatctcttttgactttgttatacttgtgtattttgttttggtttgtctaagtagtcaaacttatgtcatggtttattttaggcttataatgatcttttgtaatattttggttgctttgaatagaaactaagtgagagataatcctgaatgataagaaaagtaaattctctatatctctatgcatatgttaaggtaaaatttcaaacttacatttatctttatttaacctctccaataatcaaatattttgctatcatcgaaaatgggagattgttgactcaagatctttttgtcatttatattatgatggtatgctatatttgattattaatgctactaataaattattgatcatgtagaagaatttcaaaatgtaatatctcaaaaacaaagaaaaccaacaacagaattattttcaagttgagaagaaattccaatcaagcatcgagatcaatttcaagactagtttcaagaaagtctatttttcattagtcttgtgaaattggtatgcatgcgtactcttggttaaatttatatttggctcaaaaagtattttaaaagaaaattattattttaaaaatatacgaaaagctacttttaatttcaaaagaaatcaaaaactatttgcaaatgaattagaaggaaaatttgttttaacaagtacctacataaatatgcaaaactttttgcaatacaaa

SEQ ID NO: 15611 - DNA, 8521 bp, Cannabis sativa
  modified_base (642)..(643): a, c, t, g, unknown or other
gttaaaaacctgttcacttgagtaacacaagtgagaaaagaatgtgatggaccaaaaaaatccaaggaactaataaaatcatagattaaattcgagttgtatgctcgcttcattgagtacataggaaagctacactgatttaaagtgtaggaatatcgagttccaaataaaagattttgttttttctccgagtattgcatataaaagagatacgtagagaaggaagttaaaccctaaattcattagatctttttttatactagagtagttaggccaggtagcctattagctagccttgactcctgccttggccggagtatataatgtgtttcatatatccatgttgagaaaatatgtattagactcgacccatattttgagttgtgtcgatgttaagcttcagacaaatttattacatgggaaaaacatcatgtccaggttttaaagtggaaaaagaaagtaatatggaatgagatatttccactaattaagaaaatgttgtagagaaacaacaagatggaagaagcaacttgagagttaaaatcatgaatacggggggtaatatcccaaattattcaggtaaatttcaaggatgaaatttttataaggaggggatggttgtaatatcccagaaacctaatnntgaataattagggtttattatatattatggaataaataagtagtaatgagtagcattatgatcttgctaatctaatttagcataaattataaattttgctataagtggaaaaataagcgtagtttgttaaccatggagatttatttgaaatatgtggatatcatatgagttatttgtgaaatatagatattttcaagttcggcgatcttagaggcaaaaaatatcacaataattttagttaaaaatattgaaaggattattaagataagttgattttagagatatcgaaatactttgggatactcggagttgaccaaataccctaaatttaaagattttttagtggctaagaaacaataagataactattaatgttaaaatttttattaatattatattattattattattaaaacgtgttctttcttatcaattaatttatttatatatatatattatatgttttaaaacataaactgaagaatgaagaacgatgaagaagtcagtgtggagtcaaatatgatgaagaagtcaggaagttcacaaaagttcccttgctgggctcaggtagaagaatattagacaatggaggtcttgggcctgacctaataggcccagtcgacccacttctataaaatcttattagggccttattttcttcaatttatttagcaagctccatcatgtgcaacagccctttgggctccagaattcttaaaggggcttggattttggtcttcaaccctttaaaaaatactacttgaagtgcctggtctcccatcgttccagcagtcgcagctagagatttgaatctacttgtgtactcttgcaccaatttcatttgacagagaaaaaatatcagttgtacattgtgccatttcccttgggatgaaatcgctagaataaagcgattttacttcctcccattaactaataacttacctctagttttcccaatgaaaccagtttaaagccccccttccaggcacaaaacgacctcctctaattgcttcattgaagatagccgttgtaatcctaagtatcgcttagcttgatatgtacattcatttgggtcattgctagtaaacacatgtaattcaattttctgggcttgaaactttattcgatgctttcctgccttaatgtttctctcattcaaactagctccaatgttcctaccactgaaaccaactccaatgatcctaccattaaaacgagatcctccaattgcagcagtggtccctactccttgaagatgtcgaccaaagccatggattttgttcaatccttcttggagagaggccagttcatcaatgaatctactattggcaataacaattttttttagaatttttctcatgggaagctccatcccatgagtctttagtaatgctccatggtcactaagctgactttctttttataaaatcttgattccattcatgtagtcaccaaaattcatgaagaacgacaagctctgataccaaatgataagctcctaaaccagtagtcaataatagcaacagagtttttatcaagaaaaaaaatagcagcagaagggaaaattaatagaatagtagaaatttgaagattgagttcgagaagctatattgaataaatgaaagaagaccaaggtctcatacaaaatgagagagagggagagaagactctccatgatacaaataataatctcaattcttggatgataaataatagctcgctcaaggcactaaaaggcctacacagtaacgaaaataccctcaaacaaatccatagctatcacacctctcaaatgactaagccttcccttgttccatgtgtctcacacctctcctagtgtaagtaaatttgatgttaggcttaacaagcctatcattctctcattgccttgttactcatggtaagaatcctaaattggaagaatccttaaggaaaattgacaaaatatttaaaaatataattttcaagattcccaactgcaaacaaatgaaaaatttgtaaatgtgcctccttgcaatgtggaagaaacttagctttgttccatacatgaatctaggaaaaaccacttgaaataagccaaataacttttagaggtcagaatacgaacaagtcattcctaaagtgcctcatgagtagacttcacattgagttgaattggtgcaaatagtggtctagttcctacctgagcacgacctcctcctgtatgagcacaagcttttaaattgtgagtgttgttccgtcgagctcccaaggtgcaagctttgtatcaatgagttcccaatgtgtgaacttcatcttaatgtgatccttatgtgagagcaaaagctttacatgcacgaccacaagttctttatgtgtaaacttgagctcctcatgcatgaccacaagctcttcttgtccaagcacaagatcctcttctataagtaagagctcgtaaagaaagaaagaaagaaataaaaacgtctattttgggcaaggtatgaatgtcgttataaaaaatcataaataacacatattaaattgaaatttgatatcacaaccatgggcagacctatgaaggggcaagaggggacatttgtcctccctaaaaataaatctagaaaaaatatatatttttcagttgcaacatatatttttaattaaatgtgtttattaatttagtgctagtaattatataatggttaagctatgctagtaattatataatggttaaggtgtcttatacacatataatagaggaaaagcgttcgaatcccaactagatcatttatattaataatacaaaaaaaaaaaaaagcacgcccctcctccattacatacacacaaaaaaagcatgaccctcatcttaaatcttgttccacaactaattcacaacaaaatatacttattttacgcaaaataaaaataattaaactaagttatggttgtgagaaataataaaacgtaaagagagagagggagagagagaattgagttgtgaattgttattcattaaaaaaatgagctaaagctcaatatatacaagtataatggtcacttacaatgataactaactataacaaagcagagctagaatgagttaactaaccaggctaacttataatagcttaatagaatgctaaagctctgtaatatctctaacaccccccaaactcaacttggcgaatgagactaagctgagtttgtatctaagaaacaaaaacctagtgctagaaaaatcttttgttaagatttttgaaatatgatcatcagcaagggtatgcttgacttgtagctgcttggtaaaaattctttctctcataaagtataagtacaactcaatgtgtttggtctgagagtgcaagacagggttggctgacataagaatagtactttagttatcacaccagattgcaggtggttgatgtagaggaagaccaatctcagtgaggagagcttgtatccacataacttcagctatagcattggtcaaacttttgcattcaacttcagttctagaacgagaaactattctctgctttttagaggaccaagacaccaaattagggccaagataaaatagaaacctgatgtggacctcctatcatcaggatctaatgcctgattagcatcataaaaaccattgagagataaggcttgagtagacttgagatgaagaccatggtctagtgtacctttaaggtatcttagaatctttttaacaatttcctaatgagactctaatggagttttcatgaattgagataccttgtatactgcataagcaatttctagccttgtaacattggcatattgcaaagcaccaaatgtgcttctatacaagtaaggctcagaaattggatcacttccaaaggctgaaagtttctcacccccaggcataggagttggcaaggaattagcatcatgcattttaacctttgttaagagatcatgtatatacctttttctgacaaagatggagagttgtagttgtgtgatgcacctgtatgccaaggaagtaggtgatgtcacccagatctttgagagcaaaataagaatgcagttgattgatgaggaactgaacaatagtactagaactccctataacaaggatgtcattaacatagacaagcacagaaagtgtgtgttgatgagtaatacaaatgaagagagaattaatttccttagagcatacaaaatcgaaggataacagtactgtttgagcttgtcaaactaagcacgaggggcttgccttagaccatacaataccttacacaacttgcaaactaaatcttgttggctgaaatcaataaaaccaggacgctgcagcatgtacacttcttcacttagatcaccattgaggaaggcattgttgacattgagttgcttgattggccaatgtctagataaagcaactgttaatacaatacttatggtggttcgcttcacaacagggctaaagttctcttgaaaatcaaattattaaagaaaacccttggaaactagtctggccttgtactttcaaatggcgccattaatgttttcttttattttgagtccatttgcagcctatacctcttctccctttaggcagtttgactagagtccaagtcttgttattcaccaaagcatgtatttcattgttcatggccttgttccagttattatcttttaatgccttagtgacagaaagtgggacactagtagctagaaaaactttaggtttggagatgccaactttggctctagtaaccatatgatgggtattgagagaaggaggatcaggcgcaggtgcaggtgcaagattaggtggaagggaaaaggaatgtggtgtggaggtggagctgggatgagaggaagtggtggatggagacatgttaccaaaagatgagaatggagtggcagcggaagtagacacaaaagggatgagagagagatagttagaataggagtatgagtagtggtgggagacacaaggggaaatgattggtgtagcagcacgcatatgaaattttttggtttgagagataggaataagattggattgggtggcaaaggagaaaaaaattcattaaaaaaacacatctctagaaatgtaaatcctgcctgtggaagacaaacacttgtagcctttgtgtttcaagctatttcctaggaaagtacacttgacagacctaagctaaagcttattcctgttgtatggcttaatgttgggaaaacatgcacaaacaaatacccttaaggagatgtaatcaacaggtttgtgaaaaaaaacttgaaatggagactgttgttgaagaacaacaataggcaatctattttgacaaaagggtgcagttctcatagcttcatcccaataagagagagtggcataaatgcatgagcaagataggtcagtgctgactcaaagagatgtctgtgtttacgctcagtaacaccattctattcatgagtggtgggacaagacacatgatgagaaatcccatgttttattagaaatggttcaagagactggtactcaccaccccagtctgattgaatagaccttatggaacaattaaattccttttcaacttcagttttgaaattgatgaatgttggtaaagcctcagattttgtttttaacagaaaaacccaagtatacctagaatatgcatctatgaaatgtatataatacttgttgttaacgcagattttcgttaactaaatatataagccttttatataataaatataccacagaatttaataaaaataacaaataaacactagatatttttacgtgattttttagttaaaatctacatactcctcgagtccttcttattagggatgatgatctggatatagagtacaatcccctcagtaaatgcaaaatatagtttttctcttaattttaccgtccttttatcctcgattctacccctatttataggtgtatatgatggcagttattttcactaggatctaatcatttacaactactcatgaaacatggacattctcacgttttatttttgtgcacatgggataatattaaataactactcaaccactcttttgtctttatccttaaatggttatgctgactatgaaggttgtttctcgctaaatgtgagttattcttcttcactatctctatagaaaaaatgctaagtatagatatgcttcgcctcccagtgttcttgtattataatgatattagcgaggtggcaattctgtcgcgtagagggggagatgaatgattgtagttattttgtagcgagcttcttgatatattgtcttgaatacttctattatatactttgtctatcccgatatggacatattttctcatcagctacatctattaatagttattattcttatctcgcatatgcttatgtgacaccgagtttgaatatttttattaactatgatttattgcaacgagttatttaagccacgtttaataatgtaatttaatatatgaatcaatgagctgattcatattccttttatagtacacgtgtcagcttttggttgatagtcgaatttcaggtataacacttgtatccatttaaggaaagaatgggggagggaccccaaatgtctgtatgaattagctgcatgataagtgtaaacagtttcagagtaagagaaaggaaacttgtatactttacctttgcaacatgcttcaaaaaaatcatgaacacttttattgacatcagaaattttataagattggatgatgatttttaaaaattttgtagagggatgacccaacctgttgtgccataaagagaaatcagaacaacttggtacattgacaacagaatgtgtagcattattaagagaacatgctctgatgaaggaagagaggatgaagctaaacaagaatggtgtgacaaatgcatttgagacggttgaatgacgtaaaaagactaagctaatcctacaagaggacttccttggaacctgatctttgacaaaacactgattaggaaagagctcaaaataggcattattaatataggcaaattttgagatacacattcattttttcgtgatttgagggacatgaagaactcaattaagataaagggttttggatgagtaaggagtggtgaaggaagtctcactaacattttgaacaccatctcccatatgaactttttctgagccaaattagggatccttgtgagtgaaattattcacatctgcaatgtaatgagatgttgctcctgaatctagataccacacaacatcattagcaatatcaaaagtacatatgttggcaaaaattttatcaacattggctggacaaattcctagaaactccatgttaaatctttgatagtagcgagaagcactttggccaaccttggagcagagttgacacacatgtctaccaaagttgccagaaggaaagttagaattatgggagaactgaggtagagcactgtggccaaatcaaggaggaggagcagactgttagtttttagggtttatatcacagtcgcagcggaagcagaaaataggatcaagatttaaaaaaaatatttgttgaatctgatatgaaccttaaacgctgaatcttaagacaatataacataaattaaatctaactacttggaataataattttacctcttaatgcctatcagggtttgtatctttatatcttttcgtataatttttcgatcatccaatctaaagctttatgggattgatgaagaatctacaccaaatcttctagatcaacctcaacactcaggataagagagggctaatagatctaatatgatgaatgaatttttttattacaatatattttctactcatgagacaatgtaatggagattggaaaaaatcacacaaccacacttagagtgtgttgcgagagagagagagagagag

SEQ ID NO: 15612 - DNA, 7618 bp, Cannabis sativa
accagatgcttcgaacaagaaccatacgtgcacacatgtcttggacgcatggtttacacttggttgtgaaactttcctttattgcttcgactatctaggagtgatactacattcagtctatgccgctccctacccatagaattgggtctacgtgggtgcatgcctagaggcagtaggtctgtagatagtcggagtatattgggttcccaaaagtttaactactggaactagagttgaaaaatcagaacttgacgttaatactggtggagtaggtgttggagggattccaaaggcttttaaataagcatcttcaaagttaataattcactgtgccttaaacatgaactcgaccagagtctcaaacctctttctttttactcgctccataagaaggagcctactattaatccagactagagagccacaatgtcatcactgaccttcgtctttgcagctgcttccatcattcgtaggatgaagttcttcaggctttctcctagctgttgtttaaggttagtcaatgacctgacctctctatcatagtgtctggtagctacaaactttttctggaaggcagactgcaactccttctagccatgaactaattcgagagataatctcttccaccaaacttcaacagactttgtcaatgttagtgaaaaacaaaggcacttggcgtcatcacttactcttgccacttgcatcatccggttgtatttaaataggtgggtctcggagtccgtccgaccatcgtacaactctatttgtagcattttgaagttgtttggtggtggggctttgatgattagtctgatgcacgactcttgctcttcgtcttccgagtctgagagggcctactttgcttctagaccaacttggtaagggtagcaatctattcttctagtcttttggtgtcactgtcaagaaggtcccatccgagaaccttattgtttaaatggctccttaggtcattcccttagggtcttacattcacactaggcctttttttttagcataaactttccctgtagagcagaagggtgtccaagtgcgaaggcgttggtggcgttctgcatttgtaagggctgattggtcgtgttcacttttttcataggaggtaacggggactatttggtctgaggctcgcccactttcgtcttcccttgttttttgaaagagctgaggctctagtgttggttgggtttgccctattttcttcgtcgacaagttcctccgaagcatccactttagagtcttcatctacgtccccaagtttttcttgaaggcaagccatcattttctccatcctttgggagaacttttcctgacactctaacttttgttgggtttcaattagcttgttggacacttataacaggtcagggtcctgttcgtagtagtatccatcttcgtagcagttgtctttgatttctccatcgtcttcctcctccttgtctctaacataagggtcttcaaccataaactattcacaacgtaaggctagatcgtccactctacccccagcttcagatgcttccccatttctcacatggctttactgggtgtgtgctggagggagtggagtaacatcgtcaatggcgacatcgggatctacccgagggggtttttttaccacagttttgtgcgtagccaccattgttcagtagtttcaagcttctttcaactttcaatgaaagcacaaaaatgtttaccgagattttcataaactaagtaagtgctttaagaaataaaataatctttaagtaaaggagatggaagatttttatgtagtttgggtgttaattatacccagtccatgagtcaatatattagccttttaggctttgaagtgtattacaagtaggttttacaatgaagaacccttatttcccactttctctatggcttcgtatgcccaatatgtatggccggtacatagccatgtatgctatactttgcatcctgagcaaccttcctattcttcttcttatcaacattctccttgtaacgcgtcatgtccttactcatagaccaaattaacttatgaaaagcatgctcactccatagatacttgaataaaaatttgagctcctcaataaatttcaacatctctagccaaacttggacattgccttcttttgtaaccaatacaccatcaataaaagggataagaccaagcttgtacacgtcatctactacattgcatttctccaattggagcaatagtgtatccaactgcacaccactccttccttcaaaatacgtcctcactaaatggtcactggacttggcttttatctcttcatcagtagggccattacccataggtaagctagtaatctatccaaactcaagtctcctgaatcttatgtccattttaccaacataaaaccatatctcgtcttacttctcattttcaacttttatcttctgcaggagtaggctgtggcccaatgtgcctgagaaagtcgattctctagcttcctagaatggtccaaaagggctggccttaaccctctcagtcaaatttatcacttcaaacttggccttaatatctttaaacctatctgagtcccgataggtaagacgacatgtgaaatgctcgaaaactagtagtttaagtccaggagccatctacaaaatttaagacgaaaaaagatgaactattcaaacacattgaaacgtgtcgcaaaataccacaaaataaatcgctaaacatcaaaagcaaagtcgctaaatatcgatagtaatcgctaaagcatgcatttaatctgtgaaaaatggttcccaaggcatatgtcgcgacatgtcgctaaatacagcaagacagagagataaaacacaaaaacatcgaaattgaaaatgttgtcgacaacatatcgctacatgtcgctaactacatcaatactttgagaaaacaaacaatagacaacaagatcgcaaataatgtcgacaacatatcgctacatgtcgctaatggtttcaacttccaattccagcttaactaagattgatggtatcaacaaaagtcaaaaatatgtcaagaaacatcactaacaatatctaattcctaacctaaggttgatgatatcgatagacgtcgacaatatgtccataaacatcgataaattgcaaaaattatcagggaaatccacaaatcaaaccgaatcacacaacttcagcataatatcaaaaaaattctctaaaacttaaggacaaacaacaaaactaacacattattctttacagacctaatccaagaaaaattacaaaaacattaaaatcttaccaaaaaatggagattaatctgtgggattcttgaatcttccaatgtatgtcgactcccttccaatggtgttgggcttcggtggtgagtgggattcggcatgggtttcaaatgaagaaaaaagaaaaagggagagacgaggacatgggtttcggtggtgagtggattcgatggtgttggatgttgtggatggtggtgggtgcggtggttgatggttgtggttcggtggtgtggtgagtgagagagagcaggagagattcagagggagagagtgagagtaattaggtgagtgagtttaaatgggaggggtatgttagaggttaagtaaaattgaggtgtatttagagaatattttttaaagtgaaatattaagagtccctaattccactttaagcatggattgtcaaattttcctataaaatttccaacatccagagcccttcataaattgaattgtatggttacaaacaactacacatatttatattgttttaagttttgggtgtaaattgggaatgtgcttatcattccttaaaaaactcattacataactatcacattatatctggttttgtaagtagtgccatgcaatgttgaagaacaacagattatgccactatgctatgcatactatatttaatttactaagttagagtgagtcgattcccatacaacatagcttaaccacaattattcaacatcatcattagaccacccaattaaagcttggattattctaagcaagttaccactaattaaggctttcaacaatctttgtttctgaggtgtgtatggagggtatctcacagaggcatcaccatcgaaacttctatacataactgacttcttgtgactaaagccatcaaaagaaaatttcccatgatacgaacccatcccactctcttccactcctccaaatggtaacccaggaaccgtgagctggagtggtaaataatacaaatactattagagaatttatttacattaatgtttcataatagattaataactattgatatgattatgatatatatgaagaggagagtcactcacatgtataactgtatcgtttatgcacattcctcctgatgatatgttttgcacataatcttgcttcaattgatcgttgttggtaaaaagatatgctacaagaggcttcggtttcgatttaatgatatcataactttcttctaacttctcaacctgccaaaaatacaaagttattacagcagttgtatgtatgtactaattaattaattagaactagaatatatacttaccgtgataatagggagaagtgggccaaatatctcttccttcattatctcggtatcttgtggaacatccaataaaatagttggtgctatccttctgcatcgttgtgtgtaaattaaaaatcaatagtatttatatatgaagtcattaaaagcaaaactgtttgtatatactcacagtttgttttcatccctttgacctccaactacaattttatctgagaccttatcttcatctaagagtttcaccaaacgtgcaaattgggatttgctaactatacgtgacatatcttttgattccattaaattttcaccaaaacattccttcagaccatttttcagagcttcgatctgtttaaaaagagattaatcaatattaacaatattagattaattaatattaacaatactagtaagaaaaattgtaattacaaaaactcattatgcgagctactacattgtccaagaactagaagcagtactagtaatatactagcaaatataatgtaaataatagctcgatatatttacgtaatgcctataactcatatataacatacgatccatttaaatttataactcatatataaatttgcataatcattttttgagcaaacttaccaacataggagcaaagcttttggttgtgatgatgtaatctacagctatgcaggcttgtccactattcaaagcccacttgcctgttactattctcctggcagtaaccttaattgaaaggcccccaaatacaaatcaatttaagcaacttaaaatacatgtatgtatatacatatagtatataggtactcacttgtaagtcaatattggaatccaccacagctggacactttcccccaagttctagaatgactggtgtgaggtgttttgcagctgcagccatcacaattcgccccactctcgcactacctacatccattgtagatcatatcattacattcatatattcaaaagtattaagtacatactaatttcactctaaatatatatatagtgacctgtgtatagtattttatcccacttttgttcgagcaatgcagttgtttctggaacagccccctcaacaactcttatagcagagttatctaagtattcgcggaacagtttaacaagcaaagaggatgtagctggagcaatttctgatggctttaaaaccaccgcattgccagcacaaatagctccaatgactggatcaagggataatactgccaaattaaatacatttacactattaacattaatattattagatcatcatcatatatatatatatatccataattattattatgtgtactagtggtccttcgtttaatttatacgtacagaaaggaaagttccaagttgagatgaccaatacaactcctagtggttctgatacaatttctgctgttgatggataagttgtaattgaagttttcacctgaaaatatatatatttatatattcacagtcatacctatgctcaaattaaacttcttacatgcaaatcaagagaagagaataaatatatataccttttctggctccatccactctttcaactcttgtagagcatgtttgcacgagccttttgtggtagaaatctgtttttattactgattgattaattactgagtaaaaaagaatgagcaaaacaaattaaaagtaggagaaataagggatattattgattaattaattacctctgaaatgaaggcttcaagataaggctttgcaaggtcttcatgaagagcttgggtgatatctttctccttctcttcaagcatcttctctatactttgaagctgtgaaattctccactcatagcttcttgtttttccagaattgaacactccttgaagctccttcactagtaaatttgcttcatccccctcaaaacttcgcttttctacctctgaagttactgatagagtcgcagagcaacttattttaaggctaaaaaccaaaccaaatatgcaacaaagtaaataaaagaaagaaaaaaaaaaaaacacaatttcataaatcaattcaatctgtgtaattaataataaaatttataattaaatgtaaaattaaaattattaatttataagaaattaaggattaatgaatgaattacaaggatgaggatgtgaagttggtcacggtggggtgagaaagattcgtcaaatatttaattctctgaataccagacttcaagccagtactaacgctgcttttactaaataatctgttgccaataataagaaaatataattaccaaaagaataaaggaaaatagagtattaaagcatcaatcgtactataaattttagaatatgaagttattgagacacccttaaaaggataagtacattattgtttcaaaaaataaatataaaaggcaagtttctcctgaaaaatgagtttaatatagttgcagtaagtgaatttaagctagttgcaataagtgagtttgaagagtgaagagtcacgtcataaaaaatcactggatttcgaaatatgtatagtaaaactttcttacaggaaacttggtatatattaatacaatagatgtaaccttacttgataaaacaattatatatgattttaataatattatagaaattacatatatttagatatatctatcttcctcagttattcagtctccctttctttcatctaaaacaattttttttttttgtcagccattgatgcttgatgctcagttccaaaatcttagttgtaaactttttgtccctacataaatatctcacgcattttcctttctatatccttcatttttctctagtgtatcttctcgaactgtcctactttttatttgtttgccaccttgctatttggttggcttcttagaatcttaatggagttgctgcctctgtttgttttaatagcactgtattgcctctattaagaggaatcagttatcaaaaatagaaaaaatagcaattttgtattggactttttttcttaatagagaagaagcacgattagctgagaaactattgtagtccacgttcttcattatcaactaaaatgtgctctattttat

SEQ ID NO: 15613 - DNA, 11032 bp, Cannabis sativa
  modified_base (10404)..(10408): a, c, t, g, unknown or other
tttaaatattatgacaaaaaaaataaaataaaaaattatatgaaattttcttaaaaaaaaaaatatatatataaatgagttataaaaatttataaaaatgaaattaaaataaatattaaaattaacataaaataatctgaaaaaaaaattttaaaaaaaaaatattaagagtaatttttaaaaatatttaaatttatatatttttttaataagaaagtgtttattattttatggggtacaaataaaactccattttttaaaaataaaaaataaataattgttatccaatcccacattcaccaaatataggattattaatccaatttattagtcctatacgtaatacgtacgtagtaattaaaattcaattcaatcttatatacgcaccaaacgatctatactcaccaaggtcatcaaaataaaaacataatcaatttaaaactcatcaagttgtttattagtcaacaactttgatttgatataatattatatatgtgtaagcattcaagttattgcttaaaaattctaaaaaacttttctcgttttcttttttacttttttttatgtcatgagcactacttttcagaatgagaatattgttaatgaactgtaattaataacatattcttacctagaaaaaactgtataaagctttaatttagtctttcagacgggtcattttatgcacatttttaattctacttaaattatacttatatgacaataagatcttatatagcaaaattattttatattttagtattatgaatatttggagaaaattttgaacagactaaaaagcaaggcaccatttttttagtaaataagcaaggcacaatttaataataataatttagaaataaaaaatgactaaaatagaaaataaataatgagtagtatttgtgtattaagtatcacgatatataagtttatttgatattttatattctaattttagtttttgtgtatttcaatagacatgtacaataaaacccaaatccaacatattggtctcatgaggtggatgactttagtatgtccacattagttagatagtgtacaatgtgaattctacgttataaaatttattaaaagttaaattagatccaatgcaccattaatagaagaggtaaattagttaataagtagttttaagtttgttttaaatactttttttttttttgttaaaataattttaattttactaattaataatttctttcttttgtattataaggtagattcagtatcccatacataaatgatcacattaatgttagtctacgtgatttgtaggtagattatgtgaaaacagaggtggtgtgtcaaggaaaattataagtatatatctcaatatttatgtatatactggtacgtaattagtttcatataatttataatttatatattttttaattaagttagttaaatatatttctgcaaattattaagttatagtaagaataagattacaaatatttttgtattaatccaactacattattaaattaattattttaactgtttttataaattgtaaaaatatgaaaaactaatgtgaataaaaaatagcagaaaatttatatttttcttattctagaaagtaacattgaaaaaaaaaaccgacgctacaaaacacagtagtttaaaacaatcggctgtattatatttttttttttatttaagtatttatatattacaactatattttacattagactcgaactcagaactttcaacacacactcacctatggccacttaagctagcctcaaatagtgcgctgtattataattcaattgttaaaaatctacacttataacattatatgcgtcagtttacaatataatataatgtaaactgagatctatagtgttatttaacagttaataacagacgacaataggggtattataggtgtcggcttgaaagagccagtaacattcggtagagtaacgttcattaccaactattttctcccaatacctatgccacccaattttttataagtcgaataggtatcagccataaaaatcaacggccataccattaccatttacctcactcttttaaacagcccaaaaatccattttcttaatagtgttcagacggtaaccacttgagggtagctcaagtggccataggagggtgcgtgtgtgttggaggtcctgggttcgagtcccagattatgtattgtgtaatatataaacgcttgaatcaaaaaaaaaaaatagtgttcagacggtcattttacacatctttatcaacactatatgtaattttattttatttaaattgtactgatatgacaataagatcttatataacaaaaattttatattttagtaatgtgaatatttgaagaaaattttgaacagacaaaaaagcaaggcacgattttgtaataatattaattgacagataaaaaaggaccaaaataaaaaacaataagtaaataaataaataaataatgagtagtattttggtaggaagtacagtgggtgacatcatgttcatagttcttgacgaaaataaaaaattaattatttatttgtttatttgtggaagtaagtggagaaatattctcatttaaaaaaaaagtggagaaatatttaacacaagaaaaatataacaagtgatgaaaaggcaatacggtggcgccacgtgtgaaactgaagtgtcagttcgtaggaaggcaattttgtggtggccacgtggatggggtggcctacatataagatggtaatagtatagagagagaggggtcgtagatatccttcagatgctgacacaccaaccgtcaccgacgagaccaccacccacttgttaccgaaagcgacgacacgttcgcaatcctccagaacctagtcatgggccccacacccccttccccacaacgtggccacgtcactcacaggtgtcttcacgcgctttgcctttctttcactctctccgccacgtgtcactactcttcagatccccctggccccatctttaacgctttccggttctttcactgttctataattgtttaacccattcctaaaatgaaaataattaaaaaaaaaatttgaagaattattacaaccatgctcccaattctcaactctctctcaccaaccattattattattattataaataaatataatttttttattaataagaaaaaaaaactttctggtccaggcacttttctttagagtctcgttccttctgttaataaattataaatttaattttggaaaaaaaaatgtatacaaaccgaataaacgtcattccgatccacgcgcatgattgtttcgtgaacgtcactaactggtaggttgacacgtgttttacacggcgtgggatgcgcgtcctcccgcgcaatcacttggctctttaaatacgacagctctagttttgaggatttttctctctctctctctctctctctctctctctcattctcattcgctcattggcttttttctcgattcggtaaaattacggttcttttttttttttaattataattatttatatagctcgattctcgttctcgttctctgtgattctttctttcctcttttactaatttaaattgaaaagaaataaaattcttttcagttcagttcagttcccattaaagtgtttgttgacgttaatcttagcaatcccataaatatttccatctcctaaaagtgtattcactttggtctggtttttgtttttgttggccgccgagaaagaacaaactttttctggtttgaaaaaaataaaagaaattctctgtttgacttacagcttcattcatctccctttaaattattttcttctctttcgttcacttttccttctgtcttcttggcaaccaaacacagtttttttcatcctattgttacttatttctatttgggctttaaaggttttgggtttctacgactgcattcctaagattaatcgattaaagcttcaaatttcggtacgtatctcgctttcttttattttgggtcttttttatttactactttcatcttgttcttatattttactgacttttatgtttggcttcctcaatcctctgattggaaattcaatttcgaagactcatcgttcatattttgtatttaacccaacaaattgttattggcctttatgtgtggttttggattcactgtattacgagtttttattttttgaaatttatttatcaaaatcaaagatttgatgttaatatggttctggttttttgcccggtttcttgttttttcaattttttgagttttctttcttgtttgacaatccctattggattggttactacggttttttcagtttttttccaaatcttgcaaacgaatatggtcgacaaggatttttagttttttttctttttttaaaaaaattaaagataattaaagcttgatgtgatgtgatataggtctttgttgtttttaatttatttttttgacattattattggtaaacatttaagtttctatcaattttcattggtgcacaattaactgggtcaaatatcgtgtcgtaatcgtgtgaactattcaaaaccagatttttcttcttgtttttatttctattcttcgagtgataatagtatttattccgtatctccacagtgaaatttctatcctggagagccattaattttcctactgttttcaaatttcgggtaccataatcatatcataccaggaaatattgtgttcactaattgaaaatcattattcttttgttgttttttggctgtcacttcatttggttttattaatcactgatccttatgagttgggaccctatgtatagttgaatgaggaatcctttctctccactatgtggggttgaatctatacaactaagaaaatatctcaatcaaaagactgtgcatcttttgttctcatgcctttgtttaccatgttaggcttttatggtcactctttctcagtattcacataatttatactcaaaattaatggttcctttgatcaggatcactagtatcagttcacggtcattatcaagttcttattcaactcaaaacagtccatgttctgatgcatatgcatacacttaacttttccttttatttccctatgaatcaactaatcaggccactgttcatcacaccatagttttgtttgatgctctgacatttggctatagctcaagcaataatttggtgccttttctaatttttcttatgttatatgaataagaacactgatttagtactacttttaaatattacaaaacacagggcatggtatgttctgtctgacaacacattttcatctcgttagttttttgtttttgttgttccaagtcacaatcatagtctattcccatctagtcatcactttggatttacaagtatttttgaagggattttgatggattgtttgtttgtttttcttactgatgttaacattgaaaatttcacaagacgtttctgtttgtaatttttatggcacctttcattttagggagataattatgtttgtcatttgtgaccaccacttactttgattagtccattttagatagatgcttttcttttcttttcttttcttttgagtcattgattgtaacattcatggttttatttgtttataaagactttgatgttaatattatcttcccagttgttgtattgaaaacctttcttcgttcatgcagatttcagttaaatttgcattgttgctaccgcgatgaaaagctataatctgtaagaactccttgttttttcttttatgttttactttgacctctcaacgattctctctgattaaactttttcattgtgttcagccttgagggatcctttgcttaatggactgcaagccaaatagtagtgacaagaagacattaaagaggtggtttttcattgataaaagggtcgggtaaagaagttcttcatagaagaattcttttttaaaaaaagttagtttatttattcttcatcgttggttgcacaaacaaatctggatccgatggacgtaaaatcaaaccatactgctccagttctcactgatcctgcacccttaagcaagtcaagacttggggtacattcaaatttgtttccctactcaccaacaggagcagccttttctccaagtcttttcctaactatacctcggaagaagactggagtacttgacgatgttcgttctagctcttggttggatgccatgaaggcttcatcgcctcctcataggaagataacaaaagatgtcaacaatgagtctcctgcgtatgatgctgatattgcttaccgtacttggatggtatatgttcatccttacctgtattgtactttttctctgcctagataatttgcttttgatcaaaaatctcaatattgttccttttatgctgtttcaatctttcaggccaaatacccttcagctctcaaatcttttgagcaaataacaaataaggcaaaaggaaagcgaattgcattgtttcttgattatgatggaaccctttcgccaattgtagataaccctgactgtgctttcatgtctgatgcggtaagaatttctctcggattcgaacctggtctattccacttctcaatcatttgttctgttcatgaagattttgtattttttacagatgcgagctgctgtgaaaaaggtggcaaaatattttccaacagcgataattagcggaagaagccgagataaggtaatttcttgctaatacatgttccttagcattagtttttgcttttagcgattaagccatctttgttgcaaggtattgttttactgaaagtgtcctatgctgtgttctttcaggtttacgagtttgtaggactaacagaactatattatgctggtagtcatgggatggacatcatgagccctgttgaacaatctatactagaggatcatccaaattgttttaggtcttctgacaagcaggtaacggctgaaaaccgcactattacccttcttattacttaagcttgagctcttagaatttcttttactcaaaactttcttcctctgtaaccaccacagggcaaggatgttaacctgttccagcctgcgcgcgaatttttacctatgattcaagaggttcgttgagtttcattcattttaatttgttgttttctaaaagcttttaatagtttcgaaataaggagaaaaagttctagtaatttgataatggatagatgttttcctactttgttcaggttcataaatctcttattgaaaataccaaaggaattgaaggagccaaagttgaaaacaataagttctgtgtgtcggtacattatcgtaacgtagatgagaaggtagtttatccttaaccaaaatttacaggcttttgttcctcattcttagttttgacactatggctaatcttaggctacttcaatacattttttcagagttggaatattgttgcacaatgcgtagaggacattctaaaagattatcctcgactgcgcttgacacatggaagaaaggtattgtttaaagctaaacatgcataacaatttgctctgtgttgttttcgttttaaatttctcttaacgggtttcatttgttaatctcactaggttttggaggttagaccagtcataaactgggataaggggaaggctgtaacatttttgcttgagtcactaggtaaatatgcatatttattctatctttaaagagagaactttacttcattcccatctttgtaacataacaaatatctttaaacagggctaagtgactgtcatgatgtgcttccaatatacgttggagacgaccgcaccgatgaagatgcatttaaggtggggaaagaaaaattctcttcaaaatttgtttaatctttcatgacattctttccaaagatctaaaatctcaacttgaatggaattgaacaggttttgagagagagaaattgtggtcatggaattttagtgtctaatgtccccaaagaaaccaatgcattttactctctaagggatccatccgaggtacaatttgtcttcattcttatttgaatcaaacccttttgttttatgttgtaattttgtttctaatattttgatttttttacttaggttatggagtttctcaagtcactggtgatatggaagaaatcaagtgccttataaacaaaaagaaaaaataataaaaataaaaataataatactatatatttatagtagattattaaagaagagagacttacatatacgatgataagggtaccctactttttctagagatttttataccatcagctttgggagtataggctcttatggcttgcatacaaggcgtttctaaagagacgaaggtctattttggtgcctaacctagttgctctgctccatggttctggtctttaattgtaaattcatttttttattttgtttttatctttaattatcctttatttttggctttgagttcccactcatatatagttttttttttctttaacccttttggttatccttatatccatctaatgtgtattagtcattcatttagttccattcccacttttcaatttaattttggttaacttttagatatcctgaataatttgttaattcttttaaatgagattatataattacaatatgtttttctttctcctggttgtcatttatttctgaggctctttttgtttctcctggttcactgagaccaatgcttcaataaattatattattggttcaacttgtgttttggcaggtcagaattttttagtacttcgaaaaagagaattaaaaacgtcaccgtatctttgactttgaatgtaccactttaaaattgagttcgttatagaaatgaatttaatctattaaatatttttaaatgtacgaagtttgaaagcaccccttcaagcttgacaaacgagctaatttattatagccttatgtatatttattatatatattcattgttgtgacatatcatagaaaattggcatgtagttcattatttaaatttatcataacattgctttgtgcgaattattaacaaaaattccaataaattattgaatttttttcccacaaaacacttgtaagcacgttcttcatgtcaggctcataaagtcataatatagttattacttttttttttttaatcaaaatactattaatgccctttcttaatgcggacaaattattagacaatccatataacctataaatgtttagaatataatgaaggaatatgaaatgtagataatataatacacaaaatacatataagataatataatattgggtgattacaatgcattttttttaaaactcctttaaaaagggtgcattgatgcacatttacttattttggactctagaataacttttagtgagcattattattgagcaccagtggtgcccaacaccttttataggtgtcattgtatgattggttagcgatatttcctaaaacttattttcttaagttatatgggacccgctatttaattacactaatagcggtatgacactaaggagggtgctaggcaccagtggtgccctttagcaattctctttttttaatattcgtttacattatagttatttaagatatcctataatattttaagaaattcggaataattatttacaatatagaaagctgtgttcaaacaatctatttcacatgcgtataaaataaaatagtcacacgtgcaacacactttttgaaccttactttcgacgtgttaaattttttaaaattttacataatgtcttaaatagctataatgtacatgaccattagaaaaaatttgattaaaaaattatttcgaatgttataatagataggggagcatcagtatatccattttaagagagtgcattgtaaaatatcaaagattatataagaaggagaccaacaataacataatactacgaactcaaagataagaagaagaaacactcaaagacttaaacatggtcttttacacttttattttgaaagtcattttcttctttcatgaatacttgggtaactctagaaatatttctaaaaatatatcaagtctcatgtactcaacttaatgtttaaggatgagtatattctcacaaaaagttctatatttcaacattataacaagtgtattacactagtcaactacaaaaaacaactagctttagtgataactttttagtcacaacatatattttttgtgactacatgtgacttttagtcacaacaaaaaattgcttgtgactaaaacatagtatttagatacaaattgtcattaatttaagtttagtcacaacaagtattgtgactaaaaacacatttagtcacagtcacaataaattgtaattttgtaactaatacttttagccacggactttttagtcacaacataagaatgatgatttataatttattacaacttttttacttttagtcnnnnnttttgttgtgactaaaaataaaaatttttgtagtaaatgaacaataatcactatataaagaatgtttattctcattcgaatatgaatgacaacataaacttttttaccaatcataatttgggcatttcataatttattaggtgatttaaagttatttgaacttgcaaccatttctattgatcaaaatggaataacatgctgaaaaatatggtaacagttaccagttacataccagttaccaatttgtttagcttttgttaattcttctccaaatgttccaattcacttcacttgtatttcaaccattcatacactctataaatgataatattaaatatccaaatactatattttaaatagctctactatttaatcacattcacacccaattagtaactcattactaattgtaagactgataatgagtaagttttaccgctcttattttgtggtcattatatctgcacaattttgcaactcctcaaatgcatattacaatttcacaaatattattttttacttaatgcatgtaatattaattaaggtgacgtttgataacacttttttaatcagtttactgtttttaaaattgaaaaagtgaaaaaatatgttctataaaactgt

SEQ ID NO: 15614 - DNA, 9241 bp, Cannabis sativa
  modified_base (4349)..(4360): a, c, t, g, unknown or other
atcagaactccgcagttaagcttgtttgggcgagagtagtactaggatgagtgacctcttcggaagtcctagtgttacaacccctaaaaaaagaaaaattgcaccctaaaatcccaacctgtctagttgctatatatttgttttcggacacattaaagtaagagttgttttgtaaaaatagtctttgtcaaattttttattattaaaatgacttcacacagaaatttattagcataataaccatgtatagtcacacaagcgactaaacattacattgtgcgaccataaaatgaccattatggtcattttgtgtatggtcgcatagagtaaattgagtgtggttcacattgttagtttggcaaatttcgtggtttgattcttcttttatgtatgcttgaatctgcgtagagttttcttttttatcggtgtgtttcagtacttggaaggaagcattgttctatgtctctatagttttttttaatgatatatttagtttgttaacataattcttatatgctgattttttgtttttcttactttctaatgggggattaaatgcacccgctcgaatgaagataattaaaggcttaaactttccattatgttatttttttctggacatcagtcttattcaacaaattgattgatttctttcttttttttttttcacaaccgccttgataatcttcataataataattcattcacctatctctattgactgctacttataattatcaatggtccttaattagaacccttttcaaattgcaacccctgagtcttatctcataaaaaaacgggttcaattgatattcatattctgcaactccgtttggcctttcttttttgtttcctcctttcgatatgtgtatacttcgtcccttgaattcttctggcctctgtgccttcttcacagttgccttgcaagcatttactattaggtacatatcatgccaagggaaaatgcacacgcgtcatcggttgctaagccagctgaatcggatgagagggttgaccttgatggagacaacgaacctgaagaggctatggaagaagagattgagtatgaagaagtagaagaagaagaggaagaggtagaagaaatagaagtggaagaagatgaagaagtagaagaagaggatcccgaggaggaggaggaggaagaagaggaggttgaagaagaagaggaggatgaagatatcggtaatgctgatgatggtggcaaagttgaagatgaggatgaaaagaaaaaacacgctgaacttctctcccttcctccacacggttctgaagtttatgtcggtggcattcctcatgatgcttctgaagaggatttaaaacatttttgtgagtctgtaggagaagttgtagaggtacgttgtattgttatttacaccgaatctcttaatttcttcattaaacatttgtaataattatgtattgtttattgacaacaggttcgaattatgaaaggcaaagattcaagcgagaacaaaggctttgcatttgtcacgtttagaaacgttgaagtggcttctaaagccatcaatgacttgaacaatacagaatttaaggttggataaattgtttaattatgttcactgactgattatgtagtttatttatttctagaattttaattatcttatgtttgctactcctttctttctcagggtaaaaaagtaaagtgctcaacttctcaagcaaagcaccgtttgttcatcggtaatgttccaaggagctggggagaggaggatttgagaaaggttgtgaaaagtatagggcctggagttactggtgtagaactggtcaaggttagtgcacttcggttatgtgctgtctgttcttaaaacgttgaagtaatctattacttatcttacatttgcttctaaatatcttttaaattttcacttaatgtgcttgcttcctttgttttggctaaagatttgttttttccttctcgatttctttctatattctatcacaggatatgaagaacacaagcaataaccgaggctttgcttttatcgactactataaccatgcatgtgctgagtattcaagacaaaaaatgatgaatccacaatttaagctaggtgataatgctccaactgtgagctgggctgacccaaaaaatgctgaatcatctgcagcttctcaggttctttttaactcttatcattaaaataaaaagctgtagtttagttagttggacccaagaagttagctatatggtgctgttagctaattgtcattttcatttacactcaattcaccaatttttcgttcaggtaaaagctgtatacgtcaagaatctaccgaaaaatgtaacacaagaccagctaaaaaagctatttgatcaccatgggaaaattaccaaagtggtgcttccacctgcaaaggccggacaagaaaagagtaggatcggttttattcattttgcagagaggtctagtgctatgaaagcactaaagaacacagaaaaatatgagcttgatggtaattactgattcgggtcctatatttaagtgtgcattctgttgtcattattagtaaccttcaaagtttttatttcattgattatcaatcaggtcaagtattggaatgttctcttgcaaagccgcaggccgatcaaaagtcatccggaccaaatgttcaaaagtcagggctacttccggcttatccacctcgtgctggtgccggttatggtatgatagggagtcactatggtgctttaggtgcagggtatggcaccactcctggttttgcacaggtcagacatttgtgaatatttgttttgttttggttctaactagtgacaatgattatgcaatcttgaatttttgttatcttttgcagcctatgatttatggacggggaccgacgccttctgggatggcaatgatgccgatgcttcttcccgatggacggataggatatgttttgtaagtagaattttcattttattatacagtatatgatcaccagaaaagaaccgaaatttccaagaaaaagaataaaactttgttagtcgcctgctcggccgcctagtgtttttgaaattcagtgctattggtagtgatgttatttcactcttgttctccttaggcaacaaccaggtcaacagcctcaactcgctcacacgcacgcacacgcgcacgctcacgctcacgctcacacgcctccatcatcgcaccatagagggagtggcggcaggggtggcggtggaagtggaagtggcggaagaagcagtggcagtggaggaagaagcagtggttcgaagggaaggcatagtaataacgacagtggtggtagcggtggtggtggtggtgggagtggacgccgatatcggccatattaattaatgattttcttagagagagttgtctcaagtttttaattgtaactaactattaattaacagtttcatttgatttattgtagtaggatgatattatttagtagaactaaaaaacatgcttgttcatgaaaatcaatcttgtcctagttaaaattgataatgtattattcaatcaaatgtgctttttaaggttttgctatttttatggtttctcttaacaattaacatagacattttcttataattctgttttaaaaatcttgcactattgttcattttagtattctttgttggtttattattagaataatttgctttaaattttgcgatattgattttgttctttaaaatatacaatttaaaaattcttctttaacttttatatatacactttaaaaattcttctttaacttttatatatacactaatttggtcatgttaggttttgtttattatttcgtttaaaagtgtgtttttgtaaattagtaactttatcttttaaacgttgacaactatcaaattgtacccaatcaaaataaaaatgagaaaaatttaacattttttatttaattttaaaaaattaatttagatattttgaatgattaagaaattaaaattttaaaactacaattagctatttaaaaagttatttattttttattaaaaatttatttaaatataaaaatatatattaaaaattcaatttttgtaaaaaataaaatttacgagaacaaatttgagtctattttttttttctcaaaaaatctaggtttatataagtaaacataattttttttaatttaatttataattttttatttcaaaataattttatattttattgaattcttaattattttttttaagatacgaatttataaatataaataaatttgattttttcttaaaaaaatcttagtttgtttaaattattgattggatttttaataatttacgttttattttttaagatacgtgtttatannnnnnnnnnnntttgaaaatatttttttaagaataatttaagttttttaattaatttaatatttttatcatattttgtaataatttctattgatttttttcataattaatagaatgttataatttttattttattttttttaataaaagggagcaaaattttctatcagtcaaaatttagagagtaaaaatattaatttttaatggtaaaagaaatgaaacttaacaaaaaagacataattatataactgttatattttagggaaaatttttaaaacatcatatattttaagaggcatgatcaggtggtgtcgaaagttaaagaaacaaaaatactaattattattataaaataaaatctaattatcacaaatttaatcctcaaattctctattattatgattaattttaattgaatcattaatatctaatttctcccaagaacatcttccaatattttcccaatctgatttctttagtaataacatttccaaatatcatgtttattttttaaactataaattcaaattttaaatttcaaaaaatataaatttattttttatcttcctacaaaattaaatctcttaataatttattttttataatggtatgaattaggataaaaaatttaattttaaatgtgggattgtattgatttctaaattgaacaagaggatcaaggccttcaaaagaaatactcataagagaataattgataactagttgtgtttgattattccttgtcttttgatggttgtagttatgaatgattaattctaacaactttgtcagataatgaaaaagaattctgtatacaactcgatcaataatatcaaaatctgataaatcagttcaacttaacttattaagaggctatcctattaaattacaaaatttcattttagccaatgatccaatcagagataattaattaaaatcaatgtattgtaaaatgttaaacgttacattaggatttacgatttttaattttggataaatgcttttgtaaaacaaatattctcaatttattaaaaagtctatacaaaattgggtgaaataagacctataaaacaatcttttcataaattgtagtatttagggtcaaaatcaagctctaaatttatgtgttgtaaagttataggaatttgtgcttattagaatttcaataagtaatataaaagattctatttaaaatttaataatcagaagttgagaattgataataatgattaatcaataaccaataaagaattattagtgagattaataatatctcaataaagaagtggatcccgaaaagggtagtgcagtaatttggccccatgggacatatttgagacaagagttaggattaggggacctaaaactttaatagtacttgttcattcgagtattataacacttgtacaatgcttaattacccttttttaatctaaacttgcataattcctaaaacatataagaagataatctacataattagtttagtgaagctaaagaagattattatcaaaatcaaccatgagtttgtttaatttcttgttagttattctttgttggtagaccgacacatcctcttctaatgtggtcacattagttgaggatggtggtgatagaatgcgagcaagctcaaccgtgtcttggttgcagttgatgacacggtcaaagcaaagatagcgtccataggcattgttgtcttcgaaaacacaaatgtgagcatccaccacaaatttgagatcaacagttactaatactccattttcatacatctcagcagctcctttcaaataaggatttgtaattgtaaggtgtgaggtcatcaacaatcctccattaaccgagaccatgttcaatcctcggtccatggctagcgcccacgctgtcttctcggctagggttttcgataaggcgtgccacaactgatcatttgaaggtgaaaaatggtgagtattgaatgaagtaaagaataacaaaaataaatgaattagattagtagtaactaatagtacttaacaacacaatttttcattctgtccttttcaaaataattttttctttctttttattttatatcaaatttttacagtatttttattatatgattaaaatattatattttgaaaacactacaataataatatctttaaataattgtaaagcaaaataagatggaataataaaattcttttatgtttacttttttttttttcaaatttgaagtgtcaggtgaatatcactattaaataccaattggataattactgtattgactttgaaatttattttcacgtatacacaggtctacacagtggtcatttagttggtatttagcggtttaatttaactgacgcctcaaatttgtaataaaagtaaacttaaagggattttaccacaaaaaaaaaaaataaataaagaaattaagtactaaaacataaggaaatttcaccaccaattactctatataatattatatatcaaagtatatatactaccttcaatttttcagataagttgatttcgccattaaatatcaattagattattactgtattgactttgaaattttactttcacgtatacacaagtgtacacagtgatcatccagttagtattaaaaggtaatatttaactgacgcttcaaatttataaagaaaaataaatttaagaataaaaagattaagtgtataaaaattaaaacaaaaagaatttcgctgggaattactcaatataatattttaccttcaattttttgcataagttgatatcactccaatttctttcatcaaaatcaatagtattagtaagttgatccctccaaataacagcagtaactgaagaagtgaaaatcactttatgaattgtatgagtttgagcacaagcttccaacacattatgagctgctctcacctcaacctcacccataaattcctgcaccacaccaccacacaatcaaaacccaatttcattctctattaatacaataatgggaaggacagagaggccatctctgatcttatctcatcaacattaattattattattaatcaaacaaaaacaaaaacccaattgggattgaaaacttacatcataagaggtgtgatcataaggaggctcaaagcaataaaacaaagcataacaaccctttaatgcattcattatgctgtgataatccaacaaatcacaatcaaagattctaactttattggatttaaatgattgcatcaacaatggatcacctatttcaacacaacaaacaataaaaatcaattcttttttactttcttttctcgattgaattgaacaaacaaacagacaaacagaaaccgagcaaatacataccatggctttgtattgctgcatggacagtgtagcctctttggattagacgatttaccagattcgagccgaggcgccccgaggcatccataacacacactgtcttagaagacatcataagaagttggttggttatttgaagtgaaaagtgatgggaaaaggaagaaaggaagagactttatagtttgatgtttttggagagaaagagagaaagagagagagcattgaaagaatatggttatatgtatgtgttttggaaggtgagaagttatggtagggacagatagatacttcttagtacctacttacttacttagagcatctctaatagtaatagggtagtgctaaaaaagttgtatatttctatattttagtatatttttttaaaatattattactctaataatattataaaaagtgtgttttgattagattacaggttagttgatcgtcattaataaaatttcattgtatattaaaaaaatatgttaaatttgacacatgctaaaagttgtgttaaatagtaatatggtaaataaagaagataaagttttgtaaaaattaataaatcataataattagtgacattgtagtaaataaaaaataatatttatcgtgagtcaaatagtagattgaatataacacaaatttatgtttttgtgtcaaatttaacacaattttacatcttgcattggagatagtcttactctctaattttgactcaaagatagtgacagacccaatgaaggacaaagtaggatttttgcctatgctcatatttttctattcatttttttaatgtatacaaaaaaaaattaaaatagaaattaactatattgaataaaataagtgtgtcccttctaaataaatacatatagttatattattcgtatattatattgttttcatgagtcagccagtacttaaagttttgacctttttttttaactatgtatagatatagtcatataaataaatgtgatcatttaagagtgagtgataggaggttgagagttgagaagagtccataatattgtaaacaacaacaacaacaactataacaacatcataatcattaatgtggtcaacttttgagtttggggctttaagaaaacaaagccaaaaacagctatgttatcatttaatgccacacaccacaccacattcatgtacaacacggcaaaccctgtcatatttatgattattatcaatgcttcaaccttcaaaaagttttgttttttcaatatatatatatatatatttataaagaattttattattgagcagtaattgtacctaacacctctaaatatgtcgctttataattagttaacaatactccttaaaaattattatattacgctataaaagacttaatacttaattagactaataacgatattgacatgtaagaaggtgctaagcactactactaccttttagcatttttcatttataaattatagagtaaatattattttagatcaaaaattgctaaaatgcaaaattgatatctaagcacttttatcagtatcatactattattagtgtaattaa

SEQ ID NO: 15615 - DNA, 8767 bp, Cannabis sativa
ttttttttttttttatctatatatactaataaattaatactgtgaggtcgaggataagtttaagcaattatctcctcatcattctctactcaagcttttatgttgtaatttttagcctcggattggatcataaaatatagattgttttaatgatgacaaagctgagcttttctataccgaccgttaagtctttgcctctctttactggatgtttatggtgctgaaagtaatgttctttttgtatgttgttgtagtaatgtatgcctccaagttcaaggtacaacacttcatttctatattacgaataattaacattgtgatatgcgattagtgattggcagggtaagaatattgaacaggggaggaactatatatctcattgttttctcttgtctcagacaaaaattactgaagcaatgccaatagctacaattgttgaacaaatcagttctatgctattttttttttaatattatattgtttataaataaatgcggattctaatgagcatgccagatttcataactactgacactcgattatgtgtaattgctctttctttttacactttggtttattatatctaaatcttgttcgttataacttgtatacaaaaatggaatttacattttcagcttactaccgttgtacaaatatatttatatgatattatatatttatatatattatatgaatcatttgaatgattacaattaaatagcagcttggtgctgatggcgaacatgtagtttcagaaatactccttgtggaactcataacgggtggatgtcttttgagtcatctcatgcgatagctgttgcagttcttttgccaacactggcatcccacaatagaagacccctgcaaatataagaaagttacttggtaaaacatctcttggtttacatgagttacttggcctgatttttttaaaataagggtggcattttgttcacagtaattttctttatctaaaaattatatatggtatggtctttgctatgctcatcatttttgtatggtagttaactaaactttaaattatcattagaaattaaatgaccttttagttctatgacaaaagcattcatggtatttaattctcaaacggaacatctgacattttgagcttcgtggaacttttttcagtcttgttatattatttggctcatcttcatatcttttattagcaggtgatgtgatgggttgttgaagcagatggatagtaagaactatgtagcgtacatgccgacttacacttttatttaaaccacacatgctcaagtcagattgttgaatgaatttactcacctactgtcgaatacggatgctttgatgcaattttggtaaatacttctttccaatttggtcttgcgaagtgagtcctcacctgcaagaaacctttgtcagcacgcttttgaattgttttgttaatgtcgaattgtttttatagggataaaattaaattgattgagcatctatgaagttgcaacacaattctgataagaatgcatactcgggtgccagagaggatgtcaaagccatgttttgcatggttgagtgcttggaccatggtgataagggtcgatcttgcatcaccctcttcataaacactagtaaggtagttgtgcatctcaatctgaccctgttattgagtttgtttgacaaaaaaaacagagttagtcacttgaaagcttattcatttcgagtaaaagccagtttagctgaaaatttgaaatttaaattactttatgatccatttctgcaacatcatccatgactcctttaaaccattcaaaagagccaggttctcttgtaacccagtaaaaatgggcatttgtagttctctgcgatttcttcttccctccaggtgttatatttgacgaggtgaagctatttaggctatcatctgatgtactagcttccgtatttgaatcctaggacatggatacattgggtgcaattaggggaagtaaaagtcaatacaaaagttatatagacactgtaaaaaaggagacatgaaacgcgtacttgctcttctgctcttgtattgtttacaagatctctaaggatgcttataaaaggtgtagctccaatcccaagccccaccagcagcaagacatcatagtttcgataatcttgtgctggtgccccgtatgggccatcaacaagcaatctgggttggctgcatttgatgttctgttttaatatttctagagataagcagaacctaaaatatttgtaggtaaagttacttgaagaatataccttctctgatatgaaactccaagctgaccaaagtgagccctaccaatcacagcggatggatcattgccttcagtaacaactcgtttcaattcttctgtccagtctcccactgttctgatgtgaacacttaaatagtcgtctcctggggctgaggtaattgaaaatgggtgcctgcaaagaagaaagtggtgacgattggtttgacgtgtgaattgtagacagagtcataaaggacaatgaatttcttatctgatgagactcaccattcaaattgagagattggtggacattgtagaaatatatactgcccacttttgtacttgaatccgggtggcttggacatgattaagttgaaaacttgccctggtagcactgagacctgtccaatgtcatcatctatgttagtttcattggtaagacgttctgaacatcttacataaacaaatatagtttgaacttcaccttcaatattttcaccgaataatgctctgatctacatgttcgcaggctccgctcagctacatacaatatcaatggaacagagatgtacatccacgtctggacaattaacaaaggatcaacttgcagttcctcttccgtttatataaatacagaacaaaaccaagaaaatcttaccgatttctgataccactcgtgtgccaaatacaggcattgcccgtggactactagcaaaatgtagacgaaagcaaacaggtgatgagagtaccagaatgcattgaagcctgtcaacttgttcaaaggcgctggcaatttcaccacgtttctacggaatcgacgagcagcaagcgtgaacgcaacgatcatgaacaccaccattagaattccagtcacaccctctggacctgtcaaaagatctttgtacgtcggctgtacgccatgaaaatcggaggatatgactgcaaatctttctggcggtgagtttaccagcctaggaaaatcgcacgttaagtggttccccgcatggagagtgattccgacggctataccacacgcaattaactgcatgacaattgacaaaaggtctaaagttacctttctgtgagaatattacagcataacttccataagtatgcaatgtttttcccttatttaaataatgacgctgctacaatataatctactgacagtagacactgccattttaataaatttaatcaaagtataacttacctgtcccatgagacagaaattatagttggcacacaaaatcgaaaccttctattaatacaccttaatactttttacccagtcattataagatgttactttgctcctaaaagaggaaaaattattctgggtcgtgtgtaataagtgttggtgaataatgttttatggacatgataactttttcttaccttgtgaaagttgatgttgtcgtcgaaggggacaaaggacctagctctagtggatcgaagccaagtcagtgtatttcgacatacgggtaagaggataagtgccatgttgagcttaagagtttcagcagcgcctttggcgaccggcaagcaatagcccattacctgaaacgccgccatatggctgtattggtagaatttccagtaaaataggcaagtcattgcggtgatccaaagcagaactatccaccctctttgccaatttttcataacaagatactgaactccccagttaattcgccgtgccaggttcttgggcctaaattttgaacccaagttttggctccagcccacacttgctatgctcagtgacctgctgtagttcatgtaagtgtccctttgtaatagcagttcctccagctgccataactgaaacgaaggacaatgtatccatgagcgtagttacaattgcttgtgagtgctcaccctttagtcctttagcacaccacgtgtacgtattcaataaaagttttactttttttatttgttatatgttttgctaaataccttcttttaatacacacatctaaacaaaagtgtggcgtgttgtaaatacctcaatatatccaaggttttcggggtcaagttcttccattattagcgaagcatattcttcagctcgttcttttagctgactaagcttgtttgcggaagcacttagcattatgagctgagatttcgaaaagagacaaatggaaaacaatccataattagatcttactgactaacatataatttgatatcaaatttatttttattgtaagaaatgaagaagcatggacttgttgtacaagttccattttataactatgctttatttgtagaaattattagtgtttctatctgaaatctgatttttcgtaattttacaattaaatctcagtaatttacacccctagaatatacattttagacaaatatatggagagagtgaaagaagaactgaaataatagaaatacagatgtcaaatacagctaataggacatattaaacttattttgtttaaaaggaaaagcgcataaatgttaggtgagaaatgtgactcgtatttgtttaggaaaaataaggcggcatcttaatatacgaattaaaaatttaatcttacctcccgcacttcatttcttgtgattcgtccatcttcgttgctatccgccctaaaatatataatattaactaattaaatgagtgattctttcaacaattaaatgtgatcataatatgaaaattattagaacatggaatctttaataaacaaataaacaaaatccggtgaaaaataaacaataattgaacggattgagcatattcgctgcagtgtttaccaccgttgatttgtttgatgcaaaaagaacaaagaaaaaggaaaacaaatccaacggctgggaaagaaaagactgacatttcaaaaaagatttgaagtcgcgcgtcaaagctctggtcggaaatctgtaaccagaaatcgtgaagctcttctttgtttatcctatcaatcctctgtcgtcttcttcttaccaatgtatcaaatattcctactgcaaactccttcgaatccaacattccttcaattcatacagacaacacattaatattgattatatatgcatgaatataattttctcagtaaccaatttaactaatacttaattcaatttcgttatctacctatgcattcaccgaagtcttctctagaaagtaatccgtctttagcgagcgagttgaacttggactcaactcgcttccacaactcatcggcgtttttagcacctgtagtacttttattgataaatctgagaccgttcagagctctttgagcagtcgatctcgaccgttgaagtttcgccttgattcttcgagcgtcacgagctgtaattggagccaccgcagcttgatcctctgtgtccgaagcaatcgacgaggccgcagtcgatctcagccacggaaatttccggcgaatacttctcgacgcattcgagaaactcctaacaattttacttcctccggcactcaccgcagaaactgaagcggcctcatcggccgcggcggcgacgggagtcctagttggagtccctgttgtcgttggagcaacgctacaaacgacaatggaatcatcgtcgtttaactctaaggtgacctccacaaggtcttgctgagagctttggcggaggtcgttgaggaacacagacaacattgctccgccgacttcatagctgtcagcttcttgatctaactccggctctaaatcgtccgggaggtcaaacccacggctgtaactcgacaatttcgaactactgcttctcccaaatgaagctggtgatttcattattctctaattactttcacccaaattattccaaacacatatatatatacatacatacatatatattatatatatcttgtgtgagagagattgatatacaactggttgtgaagatagaattccctcttcttttgtttttgctctctgttctccctttttggtctctaaaatgttaatgctaagggaagcagaaaacagaggcttggctcacacgtttgagcttaaatggccaaaattaaaattaaaattaaaataaacaaacaagacaaacacttctcaaccgatcgcaacacacaatttcaacgctttctggctaagtcgtgcttctctctcttgttgagtaggtggagttttgctcttggaatgaaaaattcctctgtttttaataataatagtacctaatttgaatttttaaaactgaaaataataagaaattttcacaacaaaaggaagctatatatataaattgaattcaattgtgagacatttttgaatattataagaaattaaggtgtggggagagtgtttagtgtttttggtattattaaaaatggtgaagactatatgagaaagaagagaagactactgaactgagattttaaagtatatacatatatatttgtaggtgttatatatataaatagacatggtctaatgcttctttatcctcaaactacgccatcgactgcgccacgtatcttatatctagctaccgggaaatctatttttattcatcaatatatatatttcaacaacaaattaacagttatattaatttaattaagtatatatatatatacaagaacagccaacagggctccctatgtaaaaatttctagagataatggagaaggtgatgtatggaaatatattacatgtcaatgatcgatatatatatatatatatatatgttacaaagaatagggatatatacttgtatatattcatataggagaacaagtcttaaatgtgggtaaggtgaaggatgcgactgcgacctatgggaactatatcatgagtaccttattatttcacttctcctcggcgattctctctatagctaattctgtataagatgatcagtaattatataaatttaatttttaattataaataatcaccatatatctcatgtgtgagtgtgacctttctttatgtgcattaattgatcaaataatatatagtttattatttggttttctcataaaaatatatatatattgtatgtgccaccatgcataaaaggtttgtatacgtaggccacagtaattattaaaaccttaatattaatgtggcagcggtaaatgttaaaaagataaagtacagctagagttaacctaattgtagaatgtgtgttaatgtcatatatatatatatatatatatatatctcaagattgagatgtatagtactatagactatagtctatatatacatatccctattggctactgcgaagaacaacaaaacatgatcattttatatatataaaaatatatataagaaaatttgtttacgtttcatattaattcgaacgaggaaatggaaaacaaaattcacgtctatgtgaatataccatatgttgttttgtaaattaagagtaagaagatccaatattatataattaaaagttagctaaatgataattattcaaactatataaactagagcaagcaattaattagcacttacgttacccttaattaattggattaagtaaaagtaacaccacacaattatactaacaaacaacaatatatgtcatgtgtcactaatttttggtttgttatctaaccaaactatataatttcgacagatatttatatgtatatataatatattatatcatgcatgacttccaaaatttaacacacagaaaatcaaactacgaaaattaaaaattgaaaagtttaaccaattaattacatataaagtattctagcctaataataataatattaattatagtactggtgactcgtggatctttgaattgaaaaaactgaagcttgactaagctagctagtagcagagacacacaaattattaagcatctatataccctactacttaatattctctaagatatgttacaaatatataaccaatgagcttaagctagctagcaaagtatatataactatatataatatataagttgtataaactatataatgccagctggcggtagataataagtggatattgtttttccaaattaacaccttccaacttgttatactaaatataaatatatcctgtctgtctcaaaaccagcaaaaagagaaaatcacaattattatccatttcaattattattagttttatgttaattaagaaaaaaaaaagagtattgtttttcattgttgtcattattagaattttcattataatttctatcgagtggcagctattccaaaccttgacttgagatctaactacattaaaggttaatttgtatatataaaagcttatggggtgtgcacacaatattcaaatatagattaacgagttaggtgtatttttcggcctcttgcataaaattcccgtatataaatagaactcttcttattatatatatgttaccaattatttcaatttgcatgattacaatacgtatatactacaatatacctgcattattagtgccagttttgttttcttgcttctataagtaatttaattatgtttttaattatatgcgtttctttctaatttggaatgatgaattagcttattaaaaaa

SEQ ID NO: 15616 - DNA, 6427 bp, Cannabis sativa
  modified_base (6009)..(6013): a, c, t, g, unknown or other
tttgttatctgtatgtcattttttgttgttattttgatgttatttaaatgttattttcaagttacttttatgtagtttttttgttgattttatgttgtttctatgaaaaactgtgaaaatgtaagaaaaattcttaatacgtacaaatgtaatttttttttacaaaaaattgtgtcttatgtaattattcctaaaataaaaggaatcacaatatatagttttttatggcatttctgctcaataataataatttttctcatattttttattttttttaaaatgccatatttagtataattaagtttgcatgctatatttatcaaaattttgattttttccccatatttttgtaaataaccctaaaactattctattataaaaagttgcaaacgaaacaaaaaaaatttgattttttttttggaaaaaacgcaaattcagttgcaaagctcaagccaatcctattcagtatttttacataacctagtctataaaaggatacacaaacttcatttttcaaagccatttttcagatatgtctttagggagagaaatcctccttgagtattctgtagagagagagtccttgtggctcgatttttgttcatgtaaaagaaaaacaagagagagtgtaatttctttttctgggataagttgaaaactaccccttttcattacacattaatcaaatataactctaaaataattttaattgataaataccctcttttataatcaaagtaccaagacagaaaataacggtgaatcaagagttgtaatgtgatatgttgatgaataaaggtcaagcatactctgaggtagcttgacggagacgtagcaataatatgtgaaaaatattaattttatgatttttgttcggtaacgatagaaaatgtgacggtttggccattagagttacatgggtaaaacttagaatcctttatctaaggagacaatcacaagtgatatttggaatatcggagttaggtgggattatggtatttgactattttacccttaagccttaagattacatttttttttttgatttaaacgtttatatattacatcagcataacctgggactcgaacccaggacttccaacacacacacaccccctatagccacttgagctagcctcaattacattagtgtgaaataagaataaataggtaatttttcctaaagaaattggttttgtccattagtagattagttgagaattttaggattttctagctgatttaatcttagaataaaacatacaaaaagaaggattatttcattttatttaaaataagaaaaactcaaagtctctctctaacctatctctctctcggcccttcttgaacctaaggaactcaaggatattttcctttgattttcaatcatcatagctgagaaacaataagggaaaatcaatagcacttgggaataattaacagaggtaagctctaaatttctaaatttatttctctttgtatttttaagaataaaaaattgatttgtgaatgtgattttaggagttagattctgtccaagtttgggacatttaaggattgttttataagttaatttatgattgtttaaggtttatatgggaagcaagtagatgtagtttaaattggaatcaagctttgagttttggaaactcaagcttggtctctaatggtaaattctatatttggggtttgttttgtgtttaagttatggactatgttctttatgtgatatataaatgttctgaaaagtttgattgtgattggggaagatttgaataggttttgggggctttaagattgaaaattttcgtgtaaattctgcctagacaaacggaattccgattggtttagggctgtaccaatcggaattccagttggatagtgtcgggtaaggccgattttcgtatttgggccataacttgtcactcgggtgtccgttttagacgttctatataccgatttaaagctaatgccgagctctataatatggtatataagttagacccaaattatgtattttttttagggtgtcttcaccacgtagtttggtagaaaaccctagattttatatgtgggtattagaaagtgttctagattagacacttaccagttttacgtaaatatgacataggacattcgttcagcaaatgacatttccattcatattgaccgacgcaattgaatctggaaatgagacaagattagtataatagttacatatttgtatacatgtttagtgtgcatgttactttccgtcagaataacatatcagggtatcagtgaggtgtacatagagctacacttagataccaacatatatatgttaggcaaatcataagccatcagattagcatattagggtatcagtgaggtgtacatagagttgcacagagatgccaacaaatatatgctaggctttcagatagtatgaactaactactaccacatcagtacgactagaatgtactgagtataggctggattcacagttagtcatattttgtcgagaacgttcttgacccagttatcaaatcgcgattaggtgtatgggcacttggttacagtctggatatatatttatgtttataattatacttttcttactgagtctgtcgacttacagttattacgtgcatgtgcaagtaagagctagaatcgaaccggtgtgagtctaaaggtaaggatgaagattatacatataaagacagttagacctggagtgtttagggtgtttgggacaatttagactcacttttgatagtcgctagacgataattttttaagtataaacattttgtaaacataggtaacttttaaaatgggatctcgaattatgtaaattattatgtttatttattaaagttaagttattcaagaaagtcttaactattcacgttttacgataaactctttgattagcaaaggcgtgcacagtatttagaaaacaccgtaacatgcctagtctagtagggtgttacaacttttgtctaattttactaaaaaaaagtatgatgtggatgaaaatttaaagggaacaatttgttacatgttaaagttctagggcatgatttggtggatatcaaagttcgggagcacaatttagtatatggacaatcgacacattagcaaaattgaataaaattatatagaagtccttaaatcaaccaatctcaatagttcaggaggaatttttaacgacttgaaaagttcagagggtatgatttgatacatgtcaaagttcaaggaacaaaaatcctaactagcttatataatatttcgtttacaatatattgatttatcagtattcttagaggttataataaagaataaagtattaaaaaacataaatttatagagaactttatgtagaaatatatatatataatcatcatactatttcttatctaacaaaaaaagcatacaaagagatttcttcaaaaattatagtgaaaaaaaaaatgttagaactgaattctcaaacaaaatagagatttatagattaaacaataaaatgaatctatggaataatttcaaatgatttcaaaaccgttgttgttactgtaaatcacttgtaaacatttaaagctggtgtcattaccgtgtctcacttgtatgtgtaaattatttagaatttttattaaattcaaattatatatcgtaaatatttttaattaatatttatcatatttagttaacacgaataattttttatttttttttatataattttgatatcaatttaaatctttaaattaaaaatttatatttaaaattcctgaagttatttattatcaaaataatttgaattgaaaaggcgacaggtgggcctaactttaaaaggtgggcatgttgatataactgaggtgatggaccaagatattaatgatactgagtgttttgatgggctttcaaacaaatggcaaattggtgggttctggtgcttaggcccaccaatcaccatgagtacatttagttggaactgccgtgggcttgggaacccacgggctgttcagttcctacaagacatgtgtagtcaaaagaagcccaaattcttatttttatgtgagacactttgtaaaaaagatttggtggagcatttgagggttaaacttgggtttgaaggcgactttttagtcgatgcttcaggaaggaaatgaggcttggctttgttttggaagatttcagaagaagctaatctactcggtttttcaccaaatcatattgatgttgaagtttgtataaggggcatgtcgacatggcgcttaactggcttctacggtgaaccaaacagaagacaacgtgatcgaacatggactcttcttttttcattgcacagtgagtcgtctctcccatggtgtatcatcggtgattttaacaatatttcaacccaatctgacaagagaggcgggcatccgtgcccaacttctcttattgatggtttcaagttggttcttgatgactgtaaccttattgatctggaccttcacggctatcctttcacctgggatcatgggcgaggtacaaactattgtgtaaaaattcagctcgataaagcaattgtctctcttagtagacacctttactgaagctactctcactaacattggtttttctagctccaatcactcccttttttttacaatctaatgcccatcatagtactatcactgctcctcatttttgatatgagaacgcttggtctcgagagcccatttgtgcacaaattgtaaaagactgctgggatatgcaaaggcacctatccctctttgataaaataaaaatttatggggataatttgacaaaatggggttcggatctcactggtaattccaagggtcgtatttctaccagtaaaaagaaaatggcacaactgaagcagcaccataattttcccctgaatgccgagtttgttaatgagcaaaataattactttgaactcttagctcaacaagagatctattggaaacagaggtcgaagcaattttggttacacaacgggaacaaaaacaccaaatactttcatgccactgctagtgccagaaaaaggaataatcaaatttttcacttaaaaaattctgatggagcttggaccgattggggaaacggccttgaccaggctatcacctcttacttttcaggtttatttactgctaattgttccttgcaaaatactgttgccattgatgtcagatgctttgtaaccaatgctcaaaatgaaaaacttttaaaaccatttaccgaagaagaaattaaaactgccctattccagatgcatccagacaaagcacctggccctgatgccatgggtctgggatttttcacaaacattgggacattgtgagagcagatttggttgagcttgttactgatttctttgataccggctattttccgcgggagttgaatgaaacaaacattgttttgatccctaagaagaagaatttcacctccatgggtgatctacgagcgattgctctttgtaatgttgcttataaggtgctttaaaaagtccttgctaaccgtatgagaagcattatagaccttgttatttctgatacccaaagcgctttcattcctgaacgtctcagagttgaatgaaacaaacttggttttgatccctaagaagaagaatttcacctccatgggtgatctacgaccgattgctctttctaatgttgcttataaggtgctttcaaaagttcttgctaaccgtatgagaagcattatagaccttgttatttctgatacccaaagcgctttcattcctgaacgtctcatttcagataatgttatggtggcatttgaagtgatgcattatcttaagaggaagactaaaagaaaaaaagattttatggctctcaagctagatatgagcaagccctatgaccgtgtggagtgggattatcttaggctcgttacggcttgtatgggtttcgctgacagatggattaatctaattatggcatgtctctcttcaatcagttatactgttattcatggaagccatannnnnggtccaatcattccttcgagaggtattcagcagggtgaccctctttcgacatatcttttcatcatctgtgccgaagggctttcttcacttatctagaagtttgaatctcaacgacttttacaaggatgcaaggtggctcatggggcaccacctatcactcatatgttctttgcagacgatagctatttgttttgtcaatcaactactagtgtttctggtagtgtctcaaacttgctcaatcaatttgaaactgcatttggacaaaaggtgaaattttctaagtctactgtgttcttcattactaatacatgtcctacaactcgtgtccagatttgtgatattctccatatgcttgaagcctctgaaggaagcctctatctgggacttccaaacattattgggagaaataaaaat

SEQ ID NO: 15617 - DNA, 3379 bp, Cannabis sativa
cattatctgttgaggaaaaagagtaagtgtatagatatatttgctttaaattttatattaaaaaaataatttttcattcgaatcaaagcattagagaatagaaacttttacgaattattatttattttcctattaaaagttaacttgcaaaaaaaggattaacatggataaattcaatttcatcccttatcttaaaccccaaatatacccattagtacataatattatggagtaaaattatcctatctcgctagcctataatgactataatttataactttcacatgtgaaaccaacgataggctcgaccaaaatcgagttaaatcactctgatttttgtattttgtttaaaaattgaagacattatgtgcatgaaaaggagaggacgttgtggctttgcttgtgctattatgtcttataaacatttttcttcctccgaaattaccaaatcaggaaagtttattaaagtaaagatcacaaaatggtaaaaaaaagagtttgactacgaaatgaacattaatggccaaaactcagaagatgggatcatgcagacagagaaaggtaaattgtttgtagtagtattacagcataagattatcaaataataactcacattgattcacatacatatatattatggaagagatatagatgcatgatgacctgataagcctggccccatgtagaagaatagaaaaagtaaagaaaaagcgttgacccacacccaaggctgtcttgggtcattgtcgtacagagctcctgatataaattttgagtagacccctcatcactacttaataaacccttttctctacaaaccacatatatcgatgtaacaacaccatcaatatccatatccaactcaaacaggagagttaaagaaagaggctttaactcggccagcaccagcagcactcccatctaggccatctcaaaagaagttataaatatatactctctttctctctctctctccatctgtcgaattagctttgttgttgtacttgtagtagtgagtgagtgagtgagtgacttgggttcttattatttgttgttgtatattatattgtgaggtgtagagataaggttacagaaatcagtgaacttggttttaaccaatacttcttctccacctttcccaatcaaagtccggtcttttcactgcttttaaataatataaatatatctgtaacttctttatattgattgaattgagtgaatgaatgtataagtttaatatggtgtcatgccttacagtcttagcttaaaagatattaactttgttactatatgtggtaaacaataatgctctgaatttagacctggttactactacctttattatagtgcctcttctccccttcttcttccttgttatttttgtaccctttgttttgttctctttaattactttcatcactcttttctgtgggcttgttttatattttacataaaataacatttgaagaagaaaagagtataaaaattaaaaatcccacctttggtctgaccattacttgaagtttgacatggtgggaagtgagattctcataaaaacccatcattttgttaggctttttctttcaagtgtcaactgaaggaactaaaagttaaaaccccaaaattcatgcccaccagttttttccttgtctttttctctccttctctgttgtattcagggtactatttttgaaagccttgaaatttgtgatctttattttggagttattcattcaaggccaagagaaaaaagtaaactcttttctttctttttattatatttgaaaatttctgtttcttttttcatttgattcagcttctcatccttcctttcctttgttagttatataagaagtagttctggtcttaagcaccaagtaatagttagagagaaatctttgaaaaagtcttatcgccttttggaaggtattgaaacaaagccaaggtagattcctgatattattctctctgccaaacttttatgctttttgattcccaaggaaaataaaaataccatttttacaactctctctttcctctgatttatatccctatttaggttgtatatatctctttctcctttttaactttatttgggcttttaaaatagataaaaaaaaaacttccactgtttcaacagttttttcttttcttggtgatactaccaaagccaaaagccagaatggaaaactggaataatggtgtgatcaacaaaaggagtggaagatcattattgagagatattgatcaagaatttgaagaagaagagatatggggttcagttaaaaagactgatcaagattatttttcaactacaggaatgagaaagagcttagtctcttcttcttcctcctcctctgctccaagaatgattcccagaaagcccacaaacaataatgaagccaaagtagtagtaactcatcaatcctcagcacccatggaaatccctgattggtcaaagatttatgggaagaataatggcaccaccatgactaatggttatcatgatcatgatgtttattataatggtgatgaagataacaatgatgatgatgatggaatggtccctccacatgaatggatagccagaaagcttgcaaggaatcagatttcttcattctctgtttgtgaaggaataggaagaacactcaaaggaagagatcttagcaaggtgaggaatgctgtgttgacaaagactggttttttagaataacatatttcattattataattattattattttgttttgttgagttgagttgagttgagttgggtccctcttttacaacgtcatcaatagtggttttggattttggtatttggggcttcaaattaatgaagttaattacattatatttatatttggtatatgatattgcctctactagtgtagagtactcaatttcgggtcccatgttaatttaaggttcattattgtactaatataatattttattagtgtactagagtagaactagattatgtccattttaaaaagaaagaaaaaaaaaatgaaaggtagagtttggttcttggcttggtgttggtgatggtgctcttaaagaaatggcggcctctgcaattttgtctgctagtggattccattgcacttatttattgttctagttgttgtaaggtgtagtatggtttataattattaattattaaaaacaattaatttttaattactattataatattggctattattttacttttggttattattaattagagtgaaaaaaacaaaaacaaaagcagagtagctttggtactcaatattaattaattatatattagtacatttcccttgtccacttgtcctacctaccttatcatggtactttttattttctaaattatagctttatgtttact

SEQ ID NO: 15618 - DNA, 12070 bp, Cannabis sativa
gggaagggaagggaagggaatgtctgaggcagtgaaaatgatttgacttcttgtacctgatacctaatcatgtatagaagcattctttcaaagcataacaaccattgagtcaatatagagaatattacagagaagattggattacagataaaaactttttttttatatatttatataaattatatagataagatatatagaaaatgaaactacaaatacaaggcagttagcaggtaccctaaataagattaccaagcccatatcagtatgataatattggttcttaactaagattattgtctgtgtttgtgagtgtatttttttgttcctgtctcagttaaatagtaacacagaaacgagtttctgtgaattgcttattctcattaacaaactttcaagatagcatgtagggaacatgatcactttgatgcattgatggatcggatggctttaaacagatcgttttgtttcaacggtttgcttagacaagcatccatcccagcttctgttgtcttgtcagtttcttcagaacccgctgtatgagcagtcagaccgaatattggtatatgagcaccgtatagtttctcctcttttcttatctccttagttgcttcatatccattcattactgacatctgcattaaaaccagtatatgtacattagtataatccaaactttgagtacaatctattaatctgttaatgaaaattgcatccaaactagtatagttacctcacaatccatcaatatacaatagtaaggaagagtcatagattctccatgtttcatctgattggctagttctttggaaacaagttgaaaagcttctttgccatttgaacatagatcagtagttgcaccttgctgtttgactattctactagccaattctcgagccaataagttgtcatctacaaccagaatcttcttcccacttaatggtagcttctcacttggattgcttgtcttggtcgattccccaggttcttgtatttcacttagaaattgagtcttagacatatgataagatgagtacctgtaatcatgttcatggattgaaagggtcttgttcaaaagcatcttgaactcactgcttgtactaccaacttcttcgatttcatgcttgacccttctagaaggaactgtagttgaagatgaagcctcaaattctggaagaagtctcaccacttggaacaaacgagtcccatggaatggcttgtacataatagtgtcatttgtgtcaaagaaagagttgtcggtggtacgagccagtggattcattagccaaaaaactcggcaagtagtgttttcgaggctgtttttgaactcattcaccacctctaacagctgtgaaattggtccagcagttgtatccattaccattactactaacccacccgatgttccccgaggtagatgatcaatagtagtactccttttgaagagggaaagtgcgtagttttcgccatttgtttcaatggctttgtaaggactctgggatgctgaagagtctgtgcttgagttgtcaccactgttgttcccttgcttcatgcacttcacttggttgagaatactaggaagttgttcccactgttccaccaacaaaacatttatcccaagtctcttcatgaaattcagtgaaactcttctcctttcatcgttttgaatcattaggataacataagaactatctaccttaggacttggactacagttcgggttgagtgtgcttatttggctaacaccttcttcttcttgcttaccaatgttacttggtaccagctcattagtttccaattcatggtcttccttattagtagcagtactactattattagtagcattagtttccaattcattttggtcttctttagtagtacagctattattattgtcaaaggcatcctcacacacagagagaagaatattgaacctgaagcaagctcccttttctccaatgttcttgtccacgacagagatttctccatgcatcaattctacctgaaagcagtcaaaatacaaaatgagtttagagctgtttgacaaaatagatgtttgttttgaaaattctttgtaaaatagtctttctagcaagagtgttgagtgtgtgtcaactatgtccgataatactactttgggtataattacttaccaaagacttgacaataccaagtcctaagccagtgcctcctttaattacagtagtatctttgtcttggacatagttttggaaaagcgcctttcgtttttccttcgggattcctttccctgtgtcatccacttcaaacacaaagtccataacatgcggatcgttcttgaccatattcatggattgatcatcatcagcagcagcaacagcatcatggtcatggtcgttctcatgagcttttttcttttgagacaagcatggaaatagtttctttataactccttcatttggtggggtgtcattgattgagctatttgtgaagcatggttttctagcccaagctctaagaaccacttgaccatgatttggtgtacatttgacagcattgcttaacaagttgcatagtatctgtttaagcttgattctatcacctttgacatgtgaaaactttatcacagaggcatcacaagggtccaaaatcatatcaatttctctactagctccaacagggtggtacaaatcagctacttcttccaaaagaggagccatttcaaactcttcctcttctagcctcatcattccagcctcaattttgcttgtgtcaagaatggtgttcaatataccttcaagtcacataaaattgtcacatattaaaacaaaaaaggagaaaagcaaaatcaagatatggattatgaattatgagtgttattacctaaaaggtccttggtacaagcatccatttgtcttaaattagtttcaagctcagtgccaggagtaacctccttataagacaactctatgagaccactaattccagccaaaggagctctaatgtcatggctggctcttgcaaaagctaggcttctgttttgagtcctctcctcagctagtttggttgcctcccgttgctccatcagtgcatctctcagataattctctattattgagtctctgaaatttatgaacacaaagctgaatattggaagaatggttgtcaccattattgatactagaaggatgagctgcactgtactttgcttgtgcacaaagttcaccatttcactttgtggcactgccaatgcatacacctgaaaacccacatacaaaaatgatgaagaagtcaattgaggaagaccattctatgcagcgaattcaaaagaaataaataggtagaaattgttgtaggaaaagtagtacataccgattgcaccccaatcacatcaagttgagaacaatagaagtcataattggttccttcaatattcacaactgtagtacttatcactggtgatggtgaagatctcccactgctataagaataacatttaacacttgcattatgatcaccactaccattcggttcaatcaattcaaatgagactgaaacatgattactatgatcctctacatcaacgaccatcttagtccctttgagcccatgattaacaaccatttctccacctttggtagccaagtacaacaagctactactactactactactactcacatcaccatataactcatcacttaggtctttgaccaaataccctagaacaatgagacctttgccacggttaacagtggctgagttttggagtaagagatcatgaccattgtcccatttggttcctagaaaagcataggagccattcatgctgttcaaggctaagtctgtgaaggagcttgcattaatggtggtgaatggtttgaatgtggtgacatctccaagtgtctttccagtgtcatgatcaactctttgtttgtaccaattggtgtttttcatgggggtggaataatagtgaggagagtagatcataaatatttgattgagttggtccatggagtaggatataacttgaccatcttttccaatgtatgagatttgaccaaggtgtggggtcattagtagcgattggaataaaagtggcgccacctataaaataattagcaaattttaatattacatagtttttattcttcaataaacctcataattatttatttatatttaattatatattttatcaaatataatattaatattctatacaaaacggtaatggattttatgaacttaatttattacacaaacatgtttgatgtatttattatagttataggcagtaaataatatatattaattattttatatttttattataatttatcatatttattatttgaatatatagtaatactatcacgctatatatactatttcattaatttattttttaaaatatatggataaataataagaaatattaataaataaatttatatatttatatatatttaaatactatgcatttcaatcatatttgaaaaatacatgaaaaaagttacttttatattaattagtataaaaatatgaaatttaaaaaaaaaaaaaatacttattatctctaatgctttattattgttttaattgtcaactaattatattttataatccacacaaaaaaaaaaattaattaattttacaaacacaaataaatatattacttattatttaggtaattacatgtatatcttttatgtcattagtttttttcattattttttatagcataattttattaattattttaattttttttttaaaaaaaaaatttattagggcagggttagctgggtaccctatgcgagttagagtaatatttgtaacttataaaaaattataggataatagggtaggctatgggtgggtagaacttttttttttataaggtagggtcgtgaaataagcataccctactcataccttatttgttgacattcttaaattaatttaatttattttaattttaatttaaatttaacttaatatcattattttttttcaattaacttttatgatattgtaatgattaatacaatataactaataaaaataattttctaatataatgttatatatatatattttaatgttctagttatttttaataaaaaaaatagataatttaaattttaaattcgattatatatgtatcactaactaatttatcagccaagtaggatagaaagtaacacaatgtgcacaactttgcaaagggaatagttcaaaataaatttttaataacacaaaagatttagagagtgcaataaggtagtaataacagttttaagataaaagccctacttattcatttttctattaaaagaaggccacacaaatatattgaaaacaaaactaaaactaaagttcatataggaatgacatacacgtactgcaccgtaagaaaaacaatcaaacaaacttaaaaaaaaaacccacatatgtgattttacaactagaacaaacataaaattaagataaaaggtatgtaatcatttcacctatcttttgtcaaaataaagatttagtatcatatattttcatttcaacaatatttaaacgttgaattcaaattaaataaaattttataatataaaaatgatcttcaattatatgtttatacaaattcaaatggaaattttgaatttctatgcttgaaatgacacttcataacaaaatatcctacaaatctccatatctcaaaaatatgttattattcttctcacaaccgaacatcaactctttctctccaatttattctccttatgatcatggagacaaaaaaaaaagtttttgatgatttaaaacttgcacacaaaaaagttcaactaagacactaatatatgcacttcgaacagttaatgattttcttaggttttcttttcacaatttttttatatttaaaacgttaaaatttacataaaatcgagttcaacttgatgaaaactcgatgctcctcgtttccaactcgatgagcctgtctctttaaaaaatataataataaaaaaactcaattaaaagtcaatgctcctcgatgcccagcttgatggggcctttgaatcatgattttcacaaaaaactagataaaaactcgatgtcaactcaatactccttgacaaatcttgatgtaatttgttaaaaattcataatttgtcacacgagtgtctttttgaggtaattttttttaattagggtacttattttatctatacttaagagttgtgtatatgcacttttgagaagtataaagttttaaaaaataacaaaagcatctcaaaacatgaggtatttgttgaattttttggagtacttttaagcttcccacttcccaaatgtccatatactcattttcaatgtgtaaagtttgaacaaatgcccaaattaaaaataatcacttcaaaaggacacctgagtcaaaaattatgcattttaactactaattgtatcgagattagttgatgtgcacaatttttatcgagtttttttttttaaaaaaaatataattttatgatcctatattgagttgggcattgagttttatttttttatttatctttattatttaatgaattcattattttaaggccccattgagatgacatcgaggagtatcgtgcaaattttaatgtttttgactgaaaaattggatgagatatagatggtgatgtagttcccatactccataggagaagagagaggagagggagagagcaaggaaatagttaagagaaagtgtggctgtttagagaaatgtactttaggtagaagctagaagctgaatcatgcattataatattttttagatagagagattatatatgttgaatatttttgttatggaattaatgtcatgttaaggatgaaatcttgtattcaaatttaattatttatatagttatatataacttagaacaatttgattaaattgataaacaattattaatcaaatttaacttgtgtattatagaaaacacatgttactaaacttgtgttatcaaaacataggatactaaaggagtatatagtttcttctaaaaactaaactaaatggttaagatcatatatactctacataatcacccttgaaaaatatcttaaaattaaaatttattgtataatattggcccatctagcttatgtgatgatatcacattatatgtaaggtcagcgtatgcctagctagggcttcaattttttaaaatattattattatttttcaacaagaattatttaaaaataaataacaaattttgcattgagtcttagtatgtaacccatgcagtatatgcagtaacccacttggtataaaatgataactttatatacataaaaagagagggagacatttaattttagtttgggaccctaaacagtacaacacttgcattcgataattttattaaaaaaaaataacaaaaaacattgttttataattaatatatatatatatatatatgcaatagtactgaccttgatttcaatatcagagaatgagaggttagatccattaaaagatgaatctaaaaatcttgccaagttgggtgtagaagaagttgtttggctgaaaagccttgtagttctctcaatttgggatttgagttgggaatgcaaatggttggagctcacatgtacatcctctttaacatgtttaatcattccataccaatttggtaacaataaaccctgaagtactaccactgccgttacctacatttatttattttaatttcaaataaaaataaaatattctttagtgtaattttgcaaaataacattctcgattatcttgtaaaaaattatcaaaaaatgacaattcaaataataatggatattattatgaatgtgagtacgtaaaagaaatgtaatataatgttgcaatcaaattaatataaatttatttggaaattatggaaataattattaccagaacaatgacaacaaggagccgcagcagtactacaggtgataccagcctcatggtatatcttcaagtaattgagattattaagatttttttctattttattctggtaattatgagaaaaaaatattagtcataatatcacatactatgtattaaataatccatagaattgtttattgtatatttaggcatgacaaatgaagaagccaaatatattacttgatattacactgattcaataagatatatatactttttttgaacaatatatacttgaattagtgaatcaatatcttcttttaatgtctttatatggagattttcatctctacatagctatcttttttttctttttgtttcaagaaaaggtaacaaaaaattatcaatttaatgtctcataaatcagggcatgcttaggcaataatgcaaagtttattaatgttaatgagccatatatatatttatatatatatataaaatatattaaccaattttcaagccacattcctttccaaaaaaaaaattgcaacaacgacacatccaaacaaagttcgttaaaaataaattaatcaaaaagaaaaatatatttttttttaataaattaaatgttgatttggaaccaaggccttcgccttgtgcatttatccctgaaattaattatcaatttgtgtagttttaattattattattattttattgaaaatatgtatgtaggctatagcttataacatttaatattgttgcatgctcttttattttttttcttaggaaacttatagtttttgttatattttaaagtaaatgcttattttgagtaattaataaatatagtacgctaaaattaaacgtgaaaataattttacaatatagaacatctaattttatatatagatataaatatatatatttattaaaaggtaataatttcttaattactttcaactagctataaatatatttaataactttattaccacatgattatgaaataaattaatatttttttttttgttcttctagaagaaaaaaaatattcattaatagatcaatcgtacatagtatttataaagaatattcattaatttgttacacttacgaaacatgattatacgatcgtataaagtgtacatttttcatacgttgactcgatatcttatctaccgaataataaatatgttcccaatcatttgatacgttgactcgataccgagtaataattaatatatttttaattaaacttcaaacacatgttataaatatatttttaatcaaactttaacaaacatattgacttaatatatgtatctatgtagtatttagcgccttatggcgcaacaatcaaattcaatgaaaaaaagaggctacatattaggtagttatatcaaaatgtacacatctttgctccaaaaaaacattttgttctaagattttctcaatttaatttcaaattcatcactagatgaagatcaaaactataaaggaaagtatatgtatatataaatatataatatttataaatcttgtcagatgtcattttaaatctaccttattattaagtggattatttgtatatgcatattcgaataattaacaattcttcaaaggagaagtgatgaagatcaaattttcctagaattttttttcttggcaaccaaacgttatagaagaaagaaaaaaccccatgaaattaataactaacaaagagaagacatagaataggaactaaaaatgtaactaaataatgatggtaatttactatgtaatatttttcattagtcacttcactgacttattctgttatgagtacataaaaaagaacacacaaaaaaatatcaaaagaacaaataaacaaaagaaaaactcacctttaaactcgaattgtattcctttgaggactagagattttttttttggttttaagtgatggctaaacaggattttgttttagaattgactaatacatgtgtgtttggatattagggagaagtgaagaagaagcccctagagaagtgatatttatatagtgattatacccttaagaaaaagtttataggattattgaacttttacttttttgttttaataattaaaatttaggaaatacaagtgggaaatttccatttgatttcccttttaaagttttcttcattcatattaataaacgtgtcaaggttaaaagaaatactgagagagagagaaagagagaaatatatggactttctttggaaattataaattttattcaagaaaaaaaaaatatagagagagagagagttgatacaccagaagcaacacgttatcaccatgcaaaaatgaaaaatctgaaaattaatgtgcatttaatatcagactagaaagaaatcttaaaaaaaataattgttataatttattataactgaaaaaataaaaccagcttaacttagtgtatataatactgtgttttagcacatggttttcaccaccatggtcttctaattttggtagttttaattaaattctgagaaaggagcaaaaagaagaaaaataataccaaagtcatctaaaaaagattcaataacagttacaaaataatattacatatatttttatatatttttcttaaacttatacctcattcgtgttatttcttaaactttatttcgtagtttttatatatttgcattccaggattttgatcaattattattattattattattatagaatatgtgagctaaattttatatatgtttacataataatttttaacaaatgacaagaagaatgtatatacaacaattttaaaatatattctaaaatttcattgcaaaaaaaaaaaaacaattttaaaatatataaaaatatataaaattaattaattatctactttttaagatggtaacattgtagcatgtagatatattgttgtaaaagaacaattacgctaaaagttaatcacacttttttttggttaattcaaacatggttcataaacttttaatatctttctcctaaataaagagaaacaacaacaaaaataatattatacagaatgtaacatctaactaactatgaggtaattatttaaatttagaagtgaaatcggctgaatattaaagaatccataatcaagctagtcctgatgatgagtagatagaataaacttattccaaaactatataaattttgatacttttttcaaaatctctttttctcaagaaacatatgtaatttttttagaatatatatagtttggaatagtaaaataattaataattttaacatattgttaatgaatattttttaaaaagtaatcgtatacttcttcccatgcaaacgaagtttataaacttgaatatactttttccgaagtaaaaagtaaaaaaacaacaagaatgttgcgataaatgtttttttttttttttttagagtgttgaatgttgcgataaatgttaattaatgaaataatgaatatacaataaacaaatattttagcatgaaaactaattttgtaaataaatatttagcatgcaaggaaatatcgtaaataaaaagtgaagtaactatacttattttagtacaaatgacatttacaaacttaaacttttctcgagttaagaagggaaaaataacaaagtaatacaataaatgttaatgatcaaattatgagggtatacttattaacaaagtaaaccgatataatagaaataaattcataacaaatgagtttcaatgaatgggactaggacgcatcatattgtctaattttttagacttgtaatacttatttaaatattctttgcaggctaaaagtttaacttccaagatcttctaaatttagtaatttaatatgtttatcccatgcccaaaataacttattttaacccttacacaacatatgataactatagagggaccttttgagactctaattgctcaagctacttatttgagttttttttttcttcttctaaagtttctaaatttttaaaatggtaaatgtgtgtgaacattgtaatatgttaaatgttattgtaaactaattaatatttgctaaaatcatggtatactaatacaaatgacatttataaacttgaatttattttgtttagataattaaaatgaacaaaaacgcaataatgatattgttacaatagatagctagctaattga

SEQ ID NO: 15619 - DNA, 5722 bp, Cannabis sativa
  modified_base (5686)..(5696): a, c, t, g, unknown or other
attctcatctcttctctattttctttctctaaatactaatattacataatactaatatttcataataattataaaatttttcaactaaaatttgtaactaattattatttagttaccatttctttttttgttgaagatttagttaccatttttatttaatgttgtgactaattacagtgtttaaaatccctaattccgattttttctctcactctcactctcctcccaatcccaatcgataactctctctgcgattcaatctcctcaatcgatttctgtctctctcacagcgccgccatttttattagggtatgtgtttgtgtgatggtactagtaaggttgtaattataacatttatgtttttaggcttaaaaaagacgctcttattattattatcattattctcatttctcagattacacagaaccaaacaacaatggcggaggaggcgattctgggtttcctcaaccacaatactcaaatctccgactccggtcaattcgcagcccagctaggttttgatcacaacgaagttgtcaacgtcatcaagagtctccatggtttcagatatgtcgacgtccaggttcttctcttattcctttactccatttccctacctactcaataatcatctgctcaaatgattgggttgaacttatatggaattgaattcaataaagaagaagaagcttacaatggtaatatgcaggacatcaaaaaagagacatgggtgcttactgacgagggaaaaacgtatgctgctactgcctcacctgaaatgctactcttcctcgccataccacctcagggtatcaccaaagatgaactacaggtccttacttccttgctcttcctcttaatttcaaaactaattcagaaccttgatgattccatgtttcatatagtttctatgcaatgattaaatttttgagtttttcttctctttttatgtgctgtgctgtgctgtgaatttttgttttcattcttgatgtgtggatgcagaaaaagcttgatccagcagtatacaaaataggttgttctcaggcagcgaagaataaatgggtcgagttgggaaagttagtgaccagaaaggtacatacatttccctgtaatcgtagttgtcaatattatgtgtgccgtgtttatgttctcatttggagagtatatttgcacttgttacttttgattgaggacttggggctttctttttcatcgcttttgtacaatgatctgctgaggcttttttatggtcttaatttagtttgattttgtaggtccatatatgataagatgttactttagaatatttcttacatgtatttcccatttacctgctgcaggtccaacaagtagaggacaaggttaaaaatttgctgcttcagatacaagacggaaaagtgcgtaaacttgagctctttgtcataaaatcatattacctgcataacatgttaatgatgtttggacgtttattaacaaatatgccttaaagaataaattttaatccattaaaagggcctcccaactcttctgttttccttgcacccaaatttgagtagctaatctattactgttctctcccaccttgttcgtttagctcactaagtttgctcgttgcataaatttcacctatggtaattggtattatttctgtgcattttattccttgtttttagttttatctatgaattcaccttgttttgataagaataactaaaaattgccattagattttttctttattcaaattattactgatttttcatattgtgaatccaggttgtgagccaagatgacatcaaggctctcaaagcaagaaaacttattgctcaacagtaattttcatctcgatcttcttaaatgcataaaatttatttgctttggaaactcattagttgaaatttttcctcaattgatgcttgtcatgtttcggatataagatgtggatgcactagctgaaatcttgttcaattctgtttctttttgggtttggtgtgtgtgtgtgtgtttgtgtttagtgacaatttctcgttcagtttatgcgcatataacatatatggtagtaaacataattctcttctttaaagtcatgcaatagatatcatttgctcatgtagtaatatttatgtttttttactgtccattgtcaaggatatggaagggctactcagtgagtaagggccctaactatgctccagagagaaagaaggtggccacagatttgactcgagaaaacttacagaggtatgtgtctggctaccatatgtttataataccaaatcttgtttgttcatcattacgtattatataagcatccattctttaatgtctacatgatgacttttgacacactaatattattcttgtaaatgaaattatcttgctgacaggtttctgttttgttcgataattttaggggggattggaaggaattagagtttaaagaatataatttcactgctaaaggtctacctattgatggtggtcatcttcatccattgcttaaggcaaggataaaagtttctttacttttactgtttttctttcccttaaatgttttaaaagtcatgatcctaaatgatccatagttgcattatggatctaggctaatacaatttagcattgagagttacaactacaacaaaggtagaaaatgttgtgctcttgttcaaacaattaattgcttttgattattttttgtttcaggtgagacagcaattgaaggatatctttcgacaaatggggtaattataattattttatgctactacattttacggtgtgtaaacatacaatacacacacataacattatttaacaatattcaagttttccacttaatattgtggctctttgtgctgcctgcaggtttgaggagatgcctacaaacaatttcgttgagagcaggtgatgatcttgcctttcatttcgagggactatgctttgattcttttaatgataaattggcagtttcttaaagtagattgacaacttatagctatagtggatattggtctcttttaagagttagaaatatttaatgcaatttaaggcttacatttgttttttcttttttttttgcagcttctggaatttcgatgcccttttccaaccacaacaacaccctgcacgagattcgcatgatacattcttcctacaaggttattttacttcattgtttaatttttaattaaccctgttgatctggcttcgtactcatagtgtcatttaacttccatcatttagctccttcgactacaaatgaacttccagaagattatgttgagcgagtgaaatgtgttcatgagtctggcggttatggttctagggggtatgatatcgtatgcaatgctcctcatttaagacatatgtattcaaatataaagctagagaggtaatttttcatctttctacaccttaggtatggatatgattggaaaagagcggaagcagacaaaaaccttttgcggacacatactactgctgtttcctcaaggatgctgtatgcgttagcacaggtattgccttcagtttgctaaagaagaaaactatgtgaaagtttttatgattttataatttttaaaattattgttttattattataatgcttatattctctgtcaaggaggctgcaaatgtacttcaacgttctgtatttctctatttcttgactttaaaagtgaaaattccaaatttagtttatcgagaatctttttcatagttcttagtgttgtataacaattttttttttctttttcagcaattgttattcccttacctgtgagttcctttgagaatttttaactgttattttcataattctgagtagtaatcaattttgttgcaacaattgtttggtttttcaataattttattcctttcctgtaatagaaactgttctattgtacattggtcattttaattagctttcttttctcaacattgtcaacagaaaccatttgtccccaaaaagtacttctccatagatcgtgttttcaggaatgaagcagtagatcgaactcaccttgccgagttccaccagatagaaggtaaaataagattatgaattcatggtcagggatgtcatgggcattgttttataattatgccctattattttgaaaactatcacttagagattttaagctctaaaatgacaatagaaagctttgatcttctttatgtaaacgtttggtggtaaacctctctctgcttcttgcggtggtttttgtggactggtcatttcacaattcatatgttagacgttagttggattcaagtttagtctttaaaagaagacctttcagttcattttttgtttttgtttttgttttgttttgtaagtcatttttctttctcaattcatttatttatctcaggcttggtgtgtgatcgggggcttacacttggtgatttgttgggagtattgcacgattttttctcccgcctcggtatgcatataggcgctgtttgattcttttgtatttatatccctatggcgatttgaagattctttttctgtatcttatgttggtgtcaggcatgtcaaagctaaaattcaaacctgcttataatccatataccgaacccagcatggagatcttcaggtgataaatcagtacatctctgtctgataactcttttgcattagatgatctgaaggggaaatgattttgtttttcagttatcacgaaggcttcaaaaagtgggtagaggttgggaattctggtatgtttagacccgagatgttgcttcccatgggactcccggaagatgttcgagttattgcgtggggtctttcacttgagaggtaaaagagtagaccttcatcaccatcatcatcatcattctatataatgcaaaattgaacgtttgctcttgtgacaaattttaaacaggccaacgatgattttgtacgggattgacaacattcgggatctcttcggatccaaggttgaaccatattattttttattattattattattattcaaatatattttaagcatgttgtttgttagtgtttccatattgcaacttgtgtaacttgttttttttttttggttttgtttcttaaattgcagatcgatcttggtcttatcaagaaaaatccgttatgtcgccttggaatttagaaactctgttgtaaaatttttgatttaatattttgtggagcaatcttttatattatgggtgtaaaatgatatttaacgtgagaagaacattttggattttgatcagaattttgtaaaagcaaaatgggttataacttatatgcttaatgtaatgtatggaaaaaaccatatagaatttgattttttttttctttaaaaaaaaaaggttgaccaggtcaacccctgaaccctatcaaaccaaccatttcacaggccgagttcgggtacaattttttgaacttaaaatccaaaaaactcgctcagtgttaaaatccaaaaaactcgctcagtgtttagtcctaatttgagatctttgggtgtggtatgatgataattgcaataaaatttttctgttgcgtacttaatttagcccagtactacaaaccaactaatggtacctgaattaatttaattatgtatatgaaagaggtttcaatagctacgtttttattgtaattatcatggttatatttttttaagccattggattattattaaatggttgtgattaattnnnnnnnnnnntaaaaataaataataaataaattgta

SEQ ID NO: 15620 - DNA, 5433 bp, Cannabis sativa
ctctttggattgcaaaaaaccaagctgatctgcaatctcatgttgaatgcttacttgagaagataatattttctgaatattcaaacgttgcccagaccacgaacaatacacattgatgcaatcaaggacagtgcccacctcatcgagatcggccttgcaaatatatttaggtaatgaaattatcccatgactaaaatgtgattaatgtgcatacattttctttcttcaagagttcatagactttgaattaattgctttcgaaaaaaaaaagacaatataaattaattacaagaatatcatattatattatagttgtaccatttgaaagaggtaacaaagaataatagacaaactaagccacataagccccaatcgttgaacgacagccgtcactactactggttctgcaaaatgactaaatccccattttcatgttttcatgaaagttgccacatgcaaagcccagtacatagaatcagaagaaaattactattcaaaaattggtccacccaaacatccgatcagtaagctatgaaattacttgatatgaatttattgaagctatatattatataacttcaggagataaaacaagaggatacaaatgagagaaatttctccataagacatttcttttaacttatttttagtcatgcagattgtaaggtgcggccttctaaagcgtcttgtaggactttgacagccccattgtagtttaggaagcccatgaaccaaaattcatggttatcaatggagataacctggatatacttttcagagttgttggatctgcttgacgatggattcaccgctttaagctggtgtaatgggataaccacctacttacaaaaatatattggagatcagagaatgcatatatgtaaatgtaaaccttgtacaaacatgttaattagtaattacaaggagaaacaataacaacagctaagaattataagcataaacatgatttgtaaatacatgattcacgttcgaagataagaaatcgaaagaaaatgaaagctgcaaaaatgggtagcagataacttgtgccatatagaaagtaatattagatgcaaatgagggctagcgaaatatttgctatttattaatatatctttcttcctaaaacagaacaccaaaaagatattaaacaaaattaagacccaaatgaaaaggaagaagaatgaatagaaacaaattttatacatcatttgactagtcatccaggattcaatctgaacacgcatcacactcatagctacctgttaatatctaaaagaatataacaggaagcaacttcccaggacaagacttattgtactggtatccacgtgagtctttcttcaaacaacttcaataccagtaaaaaacaacaaaataagtaaaaactagaactttatcctcaactaagtaattctccctataaatctacaacaaccagacaaacacaagatttgatcaaatagctgcaccatacagttttgtaatagctctcaagaatcaggatgatatatcaacatgaaacaacgttatgcagtcacatcacataacattaacttatggaatgttatggggttgaagaatcaaaatgcaaattaatttatgatggctacaattgtaagggaaggtaaagacataccttataatagctccattcagttttgtcaccatttttatatgatagaggagtatcactacaatatgcaagctttgctgtagagacatataaaacacccataactggacctgctgatgtggataggtaacatgcaaaagaattttgaagtagctcctcaggaactgtctcaaatgtttgtctaaagatcttctcataaccgccttcagctaagacctttgttccttgcgcaattcttcccatggcagcatcagcaaaactagggcccgttttcactatagtgaagcaaaatattgtattcaattattaatacatcatatcagaaaagtaatacagcatctttaggtcagtagaagcatgaacaattaacagaaaacacatacagatttgcaggggggtaagtgagatggagaggataagaacaaaatatttcacctatacttacataggtcgaattgttcatcaagatgattttcaactaacagcaagaaaaagtcttaaaaattattaaatcaagaaactcgtttacgtagctaggaaagtttatatagcaatctgaatagacaggtagtatctcaataaatctttattaatgtggtatactaacagaacctgtattcctacctgaactaaatgagaacttatgcaaccaggaaatagaaagaagaaaaaactaccaaacattttttcactgtacgcatcgtttgaataagaactctttccttttatgatccaaaatttgttatcacatcacttccgacatattgttcaaagcaggaagagtgaagaagaggaagaatttcagtcataccagtgaaaggtattgcatttcacccatccattgagtaattaactaaatgggtaacctctaaccaggcatttcagtatgggattattgtcttaaaaaaaaccctaacttccttggtctaatggtttcaaaggaaggtaaaaaaaaattaggctatgtggatatctttggtatgaggaaatgaagatagcaaggaaaaaaagagctacataaggaggcaaaggaaaaaagagaaagagaggatcataccctcgttgggtttggtatgagaaaaatgaaaaataaaaaccaaaatcctctctgttgtttggtgtggcattgtataaaatgacgaaataaaagttttggaggactaaaatatacttaaacttatcaattgaaatcccttccttcttaaaatcattctcatcaaacaaccagtatactccgaatcttttctcctaccttccacatctctttcccaccaaacaaactctcaagaagataaaaagtaaactaagacatgacaaggaatcattacacgcaacttaactaacctattcaataaagaatgaaatcatttctcatataacacgtacacagagcaaccagtacccaacaaagcagtttttgcaccacaccaacgaggcaacgagagaactatatctagaaactgaatttaccaacagaaatcaaaaattccaaaagacttgattgatttacggaacaactttctttagctctaaccaaagctaattattattactcttctattttgattgtattagcaacttttgcccaaatgctcatagccaaaagaaaattctggtcctgactctcatgtaaaatcagaaatcaaatcccaaaccacagatacaagaggaacaataataaagaagcaaattttcagagattaacgaaaaggaaagcttacagtgctgccatgtgtttccagcgaaatcctcagccttcttcgtcgcttcacccaccgtctttccccatctccccagaacatttttcaccgacgcaaccgaatctgatcaaacaaacaatcaaattccacataaagaagtatacatatgtagatatacacgcatataaaacacatttgtgaatagatacgtacctttgaaagacaaggaggaagaaggaggaacaggggaagaagcgacgtagggattggatcgatcaggagaagtcgcggcgctattggtgtaagtagattcagacactaattcggggctccacctgaccgatttcttagaccctgttggagatcggttcgtcgatggatcggcctgattctcagtcggaggcggagcttgatgctgaggttccgatcccatctctacacttgcccagccaccgtcgccgttcggagcatgaagtgagtctttcgaatcggggatcgggtgcggatcttgaatggggttttggagcttcttctccgtctccactgccttaggctcttccatcttaacaaagcttcggatcccggtggggcgcgtgagacggcgcgtaggtttgttagcggggatttattattaatattggtatttaaatcgaaaataaaaattttggagcttttaatatttaatttaagtatttatgctttcggaatgtgacttttttaattttgaaaaaataaaaaataaaactgtgttgaaattggaaatgtcgatgggtttaccgataaggacggcagtggcttccatctcaatctctagcgtggtctcatttttagcgcgaagaagcatccgagaataggggtattatcgtcattacagagagtagtgagccctgtttctgtctttcggctttaagtgttttttttttttttatttggaaaatcttttggctttaagatgaaaatcttttttttattcttctcctcaaaatgaagaaatattataaactccaatggatatgaaaggaaacaacaaacatgtctttttttattttggacaagagaaaacaaacatgttgttgtctcaaattgcaaagtttggcattatgatttttattttacttttagattttctttttttctcaatttggaggataattttccatgtaatttttaatttatcattacgttgcatgaatatttaaaaaaaataaaatgaatgattcattcagcacaatctaaaccagaaattacaaaggatttgacaagtatgccataaaagcaggatgagcatctaagggaacatctcaattccaaaaaaaaaatactagcattacagttgcttgatttttatggcggtgcttcaagacttgtaagctttgcaaaattagctatctactttagctttgggattcatcagtctactaccacgcagttgttggcctttattcttggtctaaatatgattgcctgccacaaaaaaaatcttggtttgctggcccaaaaaaaaaggattttccaatctattcgagaccatgtgtagaacaaactctttaattggaaatcttgttctttctcttcgagcggtaaggaggtgtttatcaagtctgtcacccaatcaatctctacctattccatgagcattgtttaattgactaagttcgtaggtttcactacaaaatattttacttttagtcacaacaaaacttgtaattaaaagtaaaaaaattataactaattataaattgttagtcttacgttgtaactaaaaaattcgtggttaaaagtatttgtcacaaaaatcacaatttgttgtaattaaatgtgtttttaatcacaatacttgttatgactaaaactaaattatagataatttgtatctaaatactaatatagtcccaagtaacttttatgttgggactaaaagtcatatttaatcataaaaaaattttgttgtgactaaaaaattatcactagtctttttttatagtagttttatgctcaattttggtagaatgttggtgttaacccctttaggctgtgttgcacctctctctgcttttttgtttttgcagcctcttgttaattcaaaaaaaaaaaaaa

SEQ ID NO: 15621 - DNA, 9179 bp, Cannabis sativa
atgaaatgtaatctttaggattaatgtttcttcagtttggagaaagaaattctggatcgctatcttgaagttgttttaaagggtaacagagatgggttgaaggtaaactcaaagttttagactgtgcatacttactttaccagataaggtttcttaaactgaatttcttgcggcgaacagaaactgaggttacggattgaagatccaccaagaagaaagcacatggtgtacttaggtggtgcagttcttgcaggaattatgaaggtaaatggcttcagtttctgattgaattctcagttcttacaatttattcattccctttaggatcccgcctttaataaacattgttgtggatgataaaattcaggatgcacctgagttttggattagcagggaggattatcaggaagaaggagttggttgtctgagcaagtgtggccaggcatgactactttttgaggtcagttgtctcccacttagctgtagtctatatcaatacttggaagagaaccagttcaatggtaagcaagagaagctgggatttcatgcagtgttcaagtaacctgagaatttgtttaaactaccacgaataaatcgttgagattctgcttgttcatgagccaaatggaaagagcttgacaggttgataacagaagtataattgagcaaaggaacattatagtagtaattagtgtagattattctatgtcagtatcattgacatcatagtagtaatatattcaggtattcttttttagtttgattgcaactggctttgtttgtgaataggccaaaagacataaaatgaatgtttatcaaatttgatggtacaacaagatttattattcaccaaatttgtatccttaaagtacatttttttgccaagtccatttaaagaaaaaaaaaagaagaaaaaaaaggaaggctattagtgaaagagaaaagaaacaacaatccaaacaaagttagagatgtacatcaaaggcatgtttgtggaaatgccacaagaacagtttcaaacgactaaagatattggatctccatagagttccccatagtattcaagttgaacagatgacaggctgctttaactgttaatttcctttaagttagactccattttcaactgaaaaaagctatttttcatttttgaaaacttgatttgggtttgttttctaaactaggctaccaatcaaaaattatgtggaccgtgctgcttgggggtgtgcaatatagaattcctaatatagtattaaaaacctaaaaaggaatatttttataaatacccaaaaatgacaacaatttgcattcaatattattttcaccttagttttcaaaaataaataaaaaatttgtaaaaaaaaaaaaatcagtaaaaatatattaaaaaaaatgcaacttgatgtattgtgtaaaaatcaaccaaaaaacgtattttgcttttaagattagaattgggttggggcttagccagaacaaaagataagaaaaagcccattgtaactcagttgtttaattatggacccatttgggtttggtgggcctaggtcattccatggcccaaattaaacgactacgctttttatttttcttcttacacaagtacacaatcttcttcttcttacaacccttaaacctcactcggtctcatagggctttagacattgacattgtgcgatacacttgaagttgaacctgaattataataataataataattaattaatttaccataacaacaataattcatgcttgttagtgtaagttttctcaatcaatcttcttcctgttcttgctcgatttttcaattttgtatttatttatttatatatgtatgatcttcttcattgtcaatggcagcttcggcatcagcttaattgattttgagtttcagtaatggcttccagagcgatttcaaccaggaaaagattcatttctcagtacttaaatctctctaacccattcatccagaccctatccctatcaccgaaccagcatcttcatactactactacttctacttttcacaattcagatagcggttgtggaaaccctagaagctgcagcgatggagcgaatcattacttgcaacagttacttccgggattaggagattttaggtggagaggaaatggtagatcagagctcgtggctcctttggggatcagatacagatatatgtctctttacattcggaattcatctactgcggcggcgacggcggcggcggataagcaacgagatgttggcagtgataacgaggatgatgaagaattggttagtagccagaagaaaaggaaagaagcatctcctgaagaatgcgatcaagccgtcgaaggtttgactagtgcgaaagctaaagccaaggccaagaagttgcaagaacagaaagcggttacctccattttgcgtcgagtttggactacgattctagggattggtcctgccttaagagctgtggcttctatgagcaagtaagataatttattataagatcacattagatttctctttggaaaatttcaggtgtgaacttttcgtgttacttctcatttagggaggattgggcgaagaagcttgttcattggaaagaggagtttgtagcgactttgcaacattattggctcggctgtaagctcctatgggctgatatgagaatctgttctaggctgctgatgaaacttgctggagggaagagtctttccagaagagaaagacagcagttgactcgaacaacagctgatattttcaggctagttccggttgctgttttcattatagtaccatttatggaatttctgcttccagtgtttcttaaattgttccctaatatgttgccctcaacattccaagacaagatgaaagaacaggtatgactaatggaaaatgaacacttgataaaatcgtgtgatataaattagattttgtaaaaaaaatcacatcttgtaaaaacatcacttgaatcactacaggaatgtatgttctgagtttttcttcactttagtagtttgttcaaatgtataggaagcattgaaaaggaggcttaatgcaaggatggaatatgctaagtttctccaagatactgccaaagaaatggcaaaggaagtccaaaactcaaggagtggagaaataaaaaaaacagccaaagatcttgatgagtttctcagcagagtgagtttggtttgattgctccactttctttaactattttattgatatctatctcttttgtgatatctacgatttcgctgtatttgcagcttagaaagggtggccgagttgcaaatgaggagattttgggctttgctaagttgtttaatgatgagcttaccctagataatatcaacaggttagccttacaaatattcgttgcttttctaaaaataatagaaataagggtttccctgcatagaggattgcaagttatattatttattttgttgctgtcaggccacgactagtgaatatgtgcaaatacatgggaatcagcccgtttggaacagatgcatatttacgatatatgctacgaaaaaggcttcaaaggtaatctgaaattattgttttattggaagttttcaaaatgtgttctactagatctctggcttcttgggaagcaaatattttacaatctgacagactgtttctgctctgaaacctttgctctgggttgtacatgatacagttcctatttagtattcaggcttttatttttcattgttatcttacttcaaagtataactgaatgaacttctgatgattggaaaatatagagtgctctatatgtttgtgactttcaaacgagtttagaagtatcttccttagaaactctgagatccttggaacttatagtaattgaactgagcttgcatcttattcctttcgatgaaagaaactaactgggggttcaattattagagtgtagctcaacatgttttgttgtttattttcttttcctgtcaggattaaagcggatgataaattaatacaagcagaaggtgtggagtcgctgtcagaggctgaacttcgtgaagattgtagagagagaggcatgcttggattgctttcagttgaggaaatgcgccagcaggtttttctttttttcttatgccaagtcctcttacttttttagtggctaacttgggtgaaatgtgtaagcaagtaattgggagggaaaaatattctgatttaactaggacactggactcgaaagatagtgtcgatcattaaatggttaatttgtttatgcagcttcgggattggttggatttgtctcttaatcactctgtgccatcttcacttttaatcctttccaggtaatttaatattacataaaatattgctcaatagtattttggttaaatgtttttgtggatggtgtgtatgatagatatgccttgctttgtggtctcattcagggcattcaccgtatctggaaaggtgaaaccagaggaagctgttcaagctaccttatcttcactgccagatgaggttgtgggaactgttggagttactgaattgccatcagaggattctgtgtcagaaaggaggaggaaattggagtaccttcagatgcaagaagaacttattaaggtgatactttctattcttgtgctccatctaataaaacatgagggttgtcaggacaatccctttctcctctaaatgagatagtttcatgagttgcgttgatattttttttataattaatcacaaaataaatgcgaagtaatgatcaatcagcagccagtcacgtgtctatcttttagctaagctagcatatgattattgggccttcagttaagtctcgccacatattacagctaagtttaggtctatgtttctttgtttgcttgattggttccaaattatttattacagaaggaggaagaaagagaagaagaagaacaagcaagaattaaggaatccaagggtagtcaggaggatgtggctttgaaagagatgactattccaacagcaagagaagcccaagagcaagcgagagcaagatcatcagaaaagcaagaacagctgtgtgaactcagtcgtgcattagctgttttagcttccgcatctgtaagactagatactttaagctctcctctcctttctttttgataatttttttgttgtgttaaatttttacttgtttcatgcagtcggtgagtagagaacgtgaagcgttccttgggcttgtaaataaggaggtacattgctttctttttatcttatagctgaacttttatataatagctgttgtgtgggcctcaggtttatgcatgctaacagctattaaggataatattgatttagcaaataaacgaacagtctgttttcagtcttgatctggtgattatgttgacatttagtagtaataacctgcttattactttgtgctttcagattgaactttataacagcatggtggagaagcagggaatggatggagaaaaggatgttctaaaggcatatatagctgcccgagaagaaagtgagcctgataaggaggtagctcaaggccatgaagcttcatcagcactaattgagagagtaagtaacttatatttgtattattctgctgaaaagattctgttctctcagagtatcaacagttttgaccctgccttccttctttcaggttgatgcaatgcttcaaaatcttgaaaaagaaattgatgacgtggatgctaaaattggtgatcgttggcagctacttgacaggtgagtaattgtggttctcctttatttctaatcaaagatacttataatattgccaattcaaaataattacaattggattttattttacatgcttgggactcgaggcacaatgaaacttttgggattactgtttgaagagcttaaccacattgcttgtacctagtaaattttttttgcatgtttgatgattgtattaactgagcaatagcttcatgacaatccctaactttcttgtcctgtacgcctttcatttattgcgtgcccacgaggtataaggaactaaaattctttatattggattggaagaaactaagtcctaggctttgacttatgaatcctccacctatctactacaaaaacaaggttaaaagggctttgaagaatgccgaagttgacaatgtatggtgaaaagggcaaaactgttaatttgatgaatcctaagggtgacacccacaaatgaactcttctcccagaaactttcatctcggggccttattgtaaaaaagagaaaaaaacacgtgaaatcctctccgcccaaagaacccaggaaatgccaaaacctaggatttcctcaacacctttccacaacaccctaccttttctactaccttctcctcaagcaggaaaatagcaggagagagtacagcaattaggaaattaaggcataaatagacttgtttttcgcaacacatccaagatgttaacattgatatgagatgttttattgggagaagttgacttccaaatactatgagaaggcttagtaaaaagaagataaaagggttataaactaaataatgaaagaaagataaatttcagaggatttctcatagatagttaaattcatatattatttgaatgtgcagggattttgacgggaaagtgactcctgaggaagtggcaggtgcggcaatgtacttgaagaatacattaggaaaggagggtgtccaggaacttataagcagtctttccaaggacagaggtcagtcatttttttcaatttgtcaatcatcattggttatgatataataaaggttttatactattatacaccatgtgattaggccattatccatttggatcctgtgccttaaaaaaataagctttggacttgtgttttgtaaaggtattaaaattagataatatttttgccagtatatttatagtatcgccaaaatcttttgttggattgacttcttggatcttgttatattcaaaaatatatttttttgactaaatatgggtccaaaggcttatttttaaccattctatacaaaacatgggttcaaaagccaatttttaaaacatagggtccaaaggagtgatggtttgagacacattgtcccaactgctataaaatcaaaataaacaagctagaaatcccacaaatcaaccattgattaataacaacttaataatgcactaaatcctcttctgataatataatttctttgacaactttatattacccttttggaattgtgatggtgatagaaattaaagctataatataatgtgaaattacagaggggaagattcttgtagaagatattgtgaagttggggagtcggagtgaagattcgaacacagcctgatggagcaacaatgtagagtaagtagagaccgggtataaatttttgtcggcgcagagttttggttgacaagaccaaccacctttataagaatatttttttacttctgtaaaactcaatgctctcatagataagggaaaaagaaagcgcatgaacatgtttttgttactccctcctcgtccctcttttaacatttatgctttattttggcatgagagatttttggatggatggatggatggagagaattgttattccaagggagaatctctatatagatgatatgtacatatgcatacacatactactaaactcaatacttttattaagtatttattatttctttattgctatttatataaacaatttaaagaataaatatagatatacgtttctataatttacaagtactagatatttgttctatattaactttctattttttccaggtagacaaaaaatacatataataggatttgtggtaatatggtattttgtggtcgcacacgcggttttgttggaagagaacatgtagaattttttagagtatgaattacaaataaatttctctaatgatatttggtattagggaacatggttttaacactaaatgccgttcaaaattgcatttgcagcctctgatttttcaagttcttacttcttgtttgttgatagacatttgtaggtgaaccactaccaaatgacctcataaagatatacctaatattcatatccaaatataattgaatatttgcatgacttggaaacaagaacacccactacggcacatagatatgttggccttttgcttttgcatgtgaatatgtatgatgcaataatgacttttaggttgaaacaatatgttaaaatattatgttgccacacgagaaaaaaaactacatcaagccatagtagttgttaagcaaagttaatctatacacaatttaagtttatttgttacgatatgtataatttcataaattattttttattaataaatgataagtatgaaaatttaataataataagaataattatagaaaagaatattattttattggataatgaaaaccttggatataattatgcaatcattcatcactttaaagtttgttctaaaaacataatgttggacaaacttatcgaatctcaccatttgtttggagctctaaactgatcctaaataataaaaacatgaaattagaacgatctatgcacttttgttttctttttttgtttccccacaagtaaacctatattagtaaaagatcatctatgttattatattaaatgattaaaaattatttgaacattttcgtgttttacacacattcataaattgtaaattgtaatcaccgtagttgactaatttcaacaaaattattagtaggtaatgtattgccaccaaagcacacacatgcctatagtgaaaacttatctatgtttatttggactttcatggcttttagaaaactttggaatatgacaacaaatgacaagccataaaattcataatagaagagactgagtaagcaagatttggggagctaaccccaccaaataagatcaaactatggtacatttttcttcattcattttctggtacataccagtggcctaacataatttttgtacccaaactaaaaaataaatcctcacccctcataaccaattcaatataatcagccgtaaatagttttatttatatataattaatttcaaacaactatcattatagatgtaacagacacaaccacccatctgttttaacaatatactattctttttccttgacaaaaaagaaaatatttttcaaagtataataggttgatatcatattatcatgcacttactataaaaatatataag

SEQ ID NO: 15622 - DNA, 6395 bp, Cannabis sativa
tagtattgttataattattttgtgacatataattttattactacagtatattaatttttaatgatacaatatatcaaatattgttatatatatttaatgatctagtatatttattaatattcatgattcttcccaatttgataaatacactcctcatacttgtaaatagttttagtagttactaataatttaatagaagtcaccctcataaaccgttatttgaaaagaaaaaaaaaacaagatgaaaggactttgcatgactttaataaaaagtattagcaacccattgcatttgtagagtgagaggcccccatacaagaacattgctctgaatgtcagagctaggttcacttttgtcatgtacatcatatttgtatggtgattgttatcaagtacaattaggttctttcctattttttaagttatgggagtcactcaagtctgcactaccagcttaaaagaggatctttctctgtatggtatagtaatattacctttacatgtgcatggttcatggttttgtgctaatcttctaggctatgaatgagaacaaagaaactacagacgttttgatttatgtcacttacgttaagtaattaggtccaagtttagtaataaacaaccaaatctaatattttgttcatttcttgatacaaggtttctctccacagaatgtcctttgatccgtgcttatggggctatccgcttcgatgcaagaactaacatttcatctgagtgggagccttttggatccttttactttatgattcctcaggtagaaaagtcattttcttttatgtgtaggttctaagaaagtagccatgtttcttgttagtatttataaattgctagattagatgccaaatgacaggttgagtttgatgagtttgaagataagtcaatgcttgcttcaactgttgcatgggatgatgctctttcatggccatgggaaaaggcaatcaatgaacttcaagctaggatttctcaggttaagatatttcgctaagttgactttgctgttttgtacatcttgggtagttattccttttaccactaatttatgtggtttctgattaggcaggtctcttctatgattataaagttatcaaggcaagttcctaggacatttgtattcagcagcaaacacaccccaagcaaggaatattgggatcttgctgttaaccgagctttaaagaaaattagtagtgactcagcacttactaaggtcataataattaaaccatgtaccaagcttgcttttaattttgaatattattattatttgtgtttttctagcttaagtttcaatttctttacttaaagtattaattattgagtttgttttgggaactaaggttgttcttgccagaagcagcagagtggtgactactactgatgttgaccctgtaacattactagcttgcttacaggtgatttcatcttctattgcatagcatttatgttcgttatgagttaagatttatcgtatttgggataaacatctgcagggtgaaggtaaaaatgcttatcagttttgtcttcagccacctaatgcaccagcttttattggaaacacggtaagtgtcgttatagatgttttaagcctttcattttctcacctgcgtttacaactcatattatgttattacataatcttaatattacaaaatgcttctgtaggttttatattagtaaagtaacaatctatatactgactcttaagattgaataccaattctatattagttccaagttccaacctgaacattacttcactcacgctctccttcttagcttacttatgacaaaattatctatcttaatgatgctattccacatttggctttagttctcctttactttcattagtgatctttacttagagtttaccatccatgtttcaaataacattttcaaagggtaagaagaagatagaataaagatgtgtttcctatgctgttttgtaattttgtttgtctcggcttaaatgatttccccaatagccagagcaactgtttcgcagaaaatgtctaggtgttgagagtgatgctctggctgcaacttgtgccagaggtggtacaatgactgaagatctgcagatagaacttgacttactttccaggttttctcatttttttaatgtttggtggttgttttattagttcactaatctgtaataatatttttctatttaagttatataatctgaaagcaatttggatgatgtacttttgtcaataattgcttcattatgcagtcccaaatatcaccttgagttttctatcgtgcgtgaaagcataagacaaaagttagaggtaagttacttggctacctttgtatctaaaaattatttatagcaagagatgtttttttttttttttctgttgacttgaatatggaataaactacttcctatctttctttctttttctatttttctgttcatattaaggttatgataaaattgtctatttgttggtagagagagggatgctttttaatggagttgtaaagactctttaacccttttggattcttttttggcttgaattgaatgaaaagtccagcattgtgtaactttgaattttgaaagtttgcatgaaacttgaataataaaatttatgcaatagccatcttaaaatatattttctatgcttgtacacaatgccctgtttatgacaagaaattagtatctgcaaatacactttagcaacttttgtgattttaatgatgttgtgcaaagcttgtttgttttctcttttgctaaaaatagcaaccttcagataggctgacttgaacatgactttgcatgtaagatctctagtaatgggcacttaagttggactatttacatttttcagaaatgttatatttttgttttaattgtgttttgtaggatgtttgcaattctgtgatagttgaacctaagaaagcagtgagaaaactcccaagagttcaacatctatatgccaaactagttggcaagttaagaagagaagatgatgaagtaagaatcttaatctacattttcaaattatactattttcctcctcaatacatgcaacttggatttattgtataaatctatacttcattttactagaaaaaactcttcttctgcacaatattaattgttaactcataactggtgacatgaaaagttctatttcttttcagtttcaaattttatcctctcttcacccaactccagctgtgtgtggatttccaacagaggatgcccgacttttaattgctgaaactggtattttcatagatcaccatatctctttattgtataaagtaataaaaccttattccctttttccatttcttcacttgagtttgtattttcatatccaagacacacaaatttttgaagagttgtgtccctaaaacaatatcattatgcttgggcacaagcctataactttgttgtacgcacaaattttcactttgttttcactttcatttataataataaatctgtagcttagatgtgcttacatctccttgatgttcttgtaaaattcttattatgtctttttatgagagagagatgtgttccaaatttagatgacacttgtcacccaatcattggactaacttttatgactgcacatcttgttcagaagtatttgacagaggaatgtatgctggccctgttggttggattggaggaggagagagtgaatttgctgttggcattaggtcagctttggttgaaaaggtaaacttgagatgcaagtctttggagtattagtgtcactcatattttagagccgacaaaaaatgaatctccattgttgtgatgatcaaaaatcttcagcatttagttgtcattctgtatgattttccatacactttttgctaacttctctgaattttagggtgttggtgcattgatctatgctggaacaggtattgtggaaggtagtgatccatcacaagagtggaaagagttagatctcaaagtttctcaggtaatcaaagtcgttacctgatttatatgtatcaattgttcatgttcaaagtacttgctcattgcaagtattgtattgtaagaatagtgctaaaagcccattttatgtgttttatttgtgctatagtacaccaagttgcttaaacttgaagtttctctaagagaaaaggttactagttttgaggactactggttatgaaaggttagtacttctttatattatttatatctatagctaatgcataataagcatcacttatcactttttattctgcaattagtgatccctgaaattcacatttaaacaatggtccaatgagcaggtagcatggcacttgtatttacaacaacattgattggtattattttctccagttataaaatataaatctgcctccactggaggctagctgaagtgattggtgtattagtgtatgtgtatgggagaggaaagaggctccattacattgtacaaagaaaaaagaaagttttctgttagaaaaaaatctgctgtaattttattcttaataattaatgcagcaaaaatgaatttccttttatggttctgcagtgcttcttcctaacatcacatgatttactgtgttaaaacatctaatgctggtactttctttcttgtttatctattttattactttgttttggaaatagtactgtgtaaataagtgttttccttggcagacctgaattaactggttatggaggaatgtctataaatggccagtcttttttggattgaaatgtgactctccttattcttttctaccttttaataataaagaaggcattccttattgttacagagtctacctattgttcttttaagatgtcaatcaaacagagtttcctagatattctgatgacaaaatttcaatgtatgtgtaaaatatagttaatgaattgtttattttattcaatagattaacatgtatttatataccaaactagagatactaattaagaaactagagagaagatagaaaactaagtaattacaattatttttaatttttacaactaatatactctaatactccccctcaagatggagcataaatagtaatcatgtccagtttgttacaaagataatcaacccacaacccattcaaagcttttgtgaaaatatctcttaattgttctttagtcttcacatatcctgtgcagatcaaacctcgttgagttttcacgaacaaaatgacaatcaattttattgtgcttagttcgcttgtgaaacacaagatttgaggcaatataaagatcaatgtaattatgacaccataattttgctagaactgaagtcttaaatccgacttcagtcaacaggtgataaatccacatatctcacagagagactgttccatagttttatgttatgattctgcactagatctagacacaacattttacttcttactctttcaagagatcagattttccccaaaaatgacacaataacttgaagtagatcttctatctaccttggagcctgcccaatctgtatcagagaaacacttattctgagtgtgtccatgatccttgtaaacaatacctcgtcccggtactccgttcaagtagcacaaaatttgttgtaaagttttccaatgatgaattgatggaaatgacataaactgactaacaaaactaactgaaaataaaatatctagatgagtcatagttagataattcaacttttctaccaatctgtgatatttctcagaatcttcaaatagtttccccatcatgtgtaagatgcacactaaattcattggagtactacaaggtttggctcctaatttcctgtctcggttaacaaatcaagtacatacttcctttaagatagaaaaataccttgtttactctaagtgacttcaactcctaagaaagagcacctctaaatccttcgtgtgaaactgggtatgaatgaaagatttaagggatgagatgcctctagtatcatttacagtaataatgacgtcatccacatacacaattaacaagatgataccggcagttgatctcttatagaacacaaaataatctaacttacttttcaacaaaccaaatttgtcaacctgactaaatttatcaaaccaagcacgaggactttatttaaaaccacataaagacttgcgaagacgaaaaactcaccctaactccacctgagcaacaaacccaagaggttgctccatatacacttttttcctcaagatctccatgaagaaaagtatttgtaatatcaagctgatgcaaaggtcaattatgagtagctgccatggaaatgaacagttgaatatatgtaagtttagaaacaagagaaaaagtatcacaatagtccactctatagttttgagcataacccttggcaacaagacgagcctttaagcaagcaattgttcca

SEQ ID NO: 15623 - DNA, 4008 bp, Cannabis sativa
tgaaaaataaaaaaaaaataattttatattattatgtaatggatttatctaataaaaatttctatatttctcaagaaaaaaaaaaagcaaaagaaaattccaatttttcttaaaaaattagtaagaatttctatgcatgtgggatccactcaaaagattggatatgcgctgtgataccaacttttcaagtccatcatcaaatattataacataattattattattaatttttcttttccaaaagtgataataatataaattatcatttgcaacatctcaaaattgaatgtagttgttaactaagaaaggaatcttatctttagttttataataataataagaataaaagaattgatatttaaataccatgcaataagtttggactgtgtttacaaagatcaagaaagtttaatatatatcttgaatttaagtcaaattatgtacttaatatatgatattttattgtgtatgaattaaggttagatatctgatttaatataatttttttttcttaatccgatttaatttaatcagtaattaaggttaaatggtgtttcggttctttttgttaaacggtctgcgaatagtatagctcatttcttggctaaagctttctattctgttgctgatcgtatcttcagaagttgtgatgtttcttctgaattccaaagtgtaatcttacatgattgtaattaataaattgataatttattttaaaatataaaatcagtaattaaatttaaaatattatcatataatggatccagagtcgaattagatcttaaaatttaatgcaatcattgattttttaattaaatatttaattacacacttatggttaatgtataatattttattctgtatgtatgttaatgttttcttaataactattgtttaatttaagctgataaattctatcattttatttatgtttagaccatctcatagattaatgagtatcaaaattaactcaaaaaataaactaaacataaaatattaaatattttttaatgtaattatacaccaaaatagcaaaaaagcacccacaaatattttttcatacaattaggtcccctaacaaaagtaattttactaagaggatgctacatgaaaaaaattgatctttttgtaagaataatttaataataaataaaaaaaatttatcttaatcaaacgaaatatattatctatgagcttttaggatttgctatcttctctttaactcaattttggatgctaaaacagattgtggtgcatcaatatatctatttaaaaagaatgtattgtagaatttttctaaaattatttttaagtaaatataatatttatattattatttagaataaaattattaaccttatataaataattttataaattatataatttattaaaaaaataatatactattttaatactaaacatttaattcttttaccatatgtaacaaattaaaaataaataattcttaaatagaggttttatagtatatacatattatgcagttttcaatgaacaagttatgaatcatttagatattttgtaatatcctcacttttagtgtaaaaattatcacaaaatatactataagacaagttttattttcttattagagtaatttactacataaataactaagtttaactttcagttacaaaataaaagtatatactcgaaattcaatttgctatcctaatcgccatctgggtatttcccagattcttgcaagaagttaacaatgctgcccaaatagcttcatcgagctcgaaagggatcaagtttataacattctcagcctcatcaaagtgtcccgaacgactaagaagatcaacaaagcaagtgtagtgttgaagagagggattaattccataatttttgatcatcgaatcgaaagaaaactcttcctctgttgactaaaccaacatggccacaagcatagagcaaaccgacaaaagaaacttcattctccccaacaatcttatagtgtcgcctttttgaccacaacgagcatagccagaaatcatagctgtccaagaagctgcttcttcaaccaatccacatttcgcggtttgttgaggaaagtaaaacttgagcaagtatgctaagtttccaaaaaccatcaaacaacaatttcgatcttttacttgttttttgtttccttcaagcaaaccataacatatcccaaaatcaaaaaaatatttaaagtaatgaaactgtggtcatttcaattaaataaatagatatagacatggtaagagtcccaacccaagtcacttagattggaaaaacttgcctggaaagaaggagaaacgaaacttaaagatctttccaaacattaaagtcagtagctgaactgttatagtttacaatgctatcttggcatcctaacaagtaggtagaacgcattggatccatgtttattatagcatgagcagttccactagggctcgccgcaagagcaacctcatctgcaccgataatcacctcagcataaccttcttttgcttcattgttctccaactgcaaaattatacacaaaaatacattcttacaaggccccgaaagaagagttttcattttcgagctcctaaaaggtagtaataaggccgcttaccctgaattttgttttagctccccatatgacaaatgtttcattacaagagtagtgtctgtgatttcctcgtaagccaccgggtcgaatctctccaacatgaacagacacacaacttacagcaccacctacacaaatagcaaaatcagaaaacaattttccgaaattcgaaacacacctaatagatagggtactttttcagttttcacaaactgaagaccccatttaagtttgtagaaatagtctttttttattggtaaaataaccatgtatgattgcacaagtgaagcgaccaaatattacactgtgcgaccataaaacaaccattacaatcgctttgcaatcatagatttatactgtgtgaccaacaaatttcaatggtattttactattacaaattgttagtttggctaatttcccatttcgatatacccatttaaaattttaatatgctcattaaatttcaatggtagattagcacattctcttaatcctataagtataacccccaccctaccccccacacacacacacaaatttgatttgttttaagttacagaaatagcaaaatcagaaaacaaatttccaaaaatcaaaatagaactcctactatataataacttccaaagaaaaataatttcaatatactcatttaaaattgtaaaatatgctcattaaatttccaatagtgagagacaatacatttgaaaatatttcaatgggattagcacatttctcttcatcctataaaacccccccaacaaaactttctttctttcaaccaattttccaaaaaccaaaaacaatttcaatatatactcatttaaaattgtaatataagctcattaaatttcaatcttcatcctacaaatcaaacccgtcacaatgattagcacatttctcttaatcctataaaacccccccacaaatttgttttcttttaaccaatttcctttcccaaaaaccaaaatacatttcaaaatactcacttaaaattgtaatattagctcattaaacttcaaaagtaaataagcacatttctcttaatcctataaaaccccttaacaaatttgctttcttttaaccaattttccaaaaaccaacatacaatttcaatataacccatttagaattgtaatataagctcattaaatttccaatagttagggataatacaatttagaaaatatttgaaaggtagattagcacatttctcttaatcctataaaaccccttaacaaatttgctttcttttaaccaattttccaaaaaccaaaatacaatttcaatatatacccatttagaattgtattataagctcattaaatttccaatagttagggataatatcataatacatttgaaaaaaattcaaaggtagattagcacatttctct

SEQ ID NO: 15624 - DNA, 2372 bp, Cannabis sativa
caaaaacaaaaccgtgagggcttatattgaagtagtctacttgatatcggtgttaggacctgtgtcgaaattcttcttaataaagatcccaagttctacatcagaaaaataagcaagagttgtcttgaatatatgtgcagattgaggcctaacaaatccctatcgagcaaattcttctctacttgtctctttgatttcttgtcttgctgaaattttgtgttcttgaattctgtttttgatctcattagtgtgattgtttaatcacaacagtgttaaaataatttctattggcagagagtcaatttctgctgcagccacttcaaaattcattcaaggaagtttagaattggtgtatggcaaggattcaaatgttataactgaaggtacatttgctggaatccaagctctttcgggtactggagcatgtcgcctctttgctgagttccagaagcgattttaccccgaatcacgaatgtacttatccaatccaacttggtctaagtaagtccctctgtaacataacatgtcttccaatatttcttgtatttgatacattatcagtagaatgatcatatgcatttgtacagccaccaaaatatttggagagatgctcatgttcctcaaagaacattcaattactatgatccagatactaaaggtttgaactttgctgcacttatggatgatatcaaggtatgaagaatctaaattaatgccatgatttgagatagagtacatagaagctccctacattgaaacttaagacatttacaaaccttttttctgtagaacgcgcctgaaaaatcatttttcttactccatccttgcgcgcataatccaaccggggttgaccctactgaggaacaatggagagaaatctcttatctgtttaaggtactcaatttaaaaaggttctttagccaaaatctctgaacatgcattaatctataactcaatgaatttcaggtaaaaaaccatttccccttctttgatatggcttatcaaggttttgcaagtggggatcttgacaatgatgccaaagctattcggatttttcatgaagatggacatttgattggttgtgctcaatcttatgcaaagaatatgggattgtatgcacatagagttggttgtctcaggcaagtaatttctattaaactttgtttgcattgttaaaagttctatcatttgatgtatcttatgtttccacttaatgtttgagtcttttttagtgttctttgttccaatgcaaagcaagcaattgcagtcaaaagccaactacagcaaattgccagagcaatgtacagcagtcctcctattcatggcctattactagtctcaacaatcttaggcgattcggatataaaatcactatggatcaaagagttaaaggtagaaaattataataacttctaactactttccttgcacttgctgtgattttcaaaaaaaatatacacttttctttccataccaggtcatggcagatcgcataaaaaagaaacggtctgcactacgcgatagccttgaaaagttaggctctcctttcaactgggaacacattacaaaccaggtaacaacaacaattcaatcatgttggaccgaaaactcattttaactcccacattagtatatgatattgtctgttcttctgatgtggaacttgggttgataccccgaacaaaccatgaaacaacttaacatgtatgtaaaaaactacaggttggaatgttctgcttttctggtttgtcacctgatcaagttgatcagctagctagagaatttcatgtatacatgactcgggacggtcgcatcaggtaagattgttgtactgatatctgcattagctttgctctttgattatgttgtgtatgtatggatggtgaatatggtgatgttgttggcagcatggctggtgtgacctcaggcaatgtgaattacttggcaaatgctatacatcaagtcacatgttgtgatcaagaatccatgaatagtgtctataatattctttaatcactcattgaagtgcttggcaaaatggtctctactcactttgcccagtaatcttctttggataattctttgtaaaatagttttttctgtttggaaaaagctattttgcaaaagttaaagacattttgcaaattaacatttagaaaaatgtcaatctttaccctgtataatatataccaagtgagtcacttttgtcactaccaatcaaagtatttcgggattggaaaagttataactcaattttttttatatgacgattcacattatatttatagtaatcatctcacttgttttttttttttttaatatattaaactgaaaataaatttcaaagcctatttagaatttttgtgctcatt

SEQ ID NO: 15625 - DNA, 4701 bp, Cannabis sativa
  modified_base (51)..(54): a, c, t, g, unknown or other
aagaaaaagaggaatattgattacaattaatagtaataaataaaagatttnnnnatccacataattattaatatttataacaaatattatgtagttacaattttaatttggtcggagttttttctgttataattcaaaaaggaagaaatattataaatatactatgagtcgacctaatcaatatttatacaacccaaataacaaaacaaaattacctcttactctaattttgaagccgcacattattcgcacaagagaattagagccaacatgcaatataaggaggaccaaaacaatgaatcaacgctgacagactaagaaacaccattaattttagtgaatttacctgagaagaataaaaatatcaaaccaaaaatcatccattactgattgatggaagattctgcataaaaaattggtttgaaacataaactcaaccctgaaaattctttcaaatatccataaaactaatcctcccaaatttaatttacagattaataagatgtagacctgtaaaaaatagatctcaagttcccgatcaatccaaatcatgtataatccaattttttctaattatttcactaacgttgttttttcagaatttcaatcttagatttgtgtaatttcaatcgcgacaaataaactaaattcacattcatctcgtgtaataaatttggcaaattctccttttgattttattgtttctatgtggttacattacagacagttgtgtctccattttattgatgcctcaataattgatgtatcaataataatgcactgataagatgttgacagtgaaaactcgtcaaccaaattgtggtcagaaaattaaaaattagatgtaagatctagaaatttaaaaacttaaagaaaagtatagaatagctatggagaaagattaaagtgtatatttctttaggttaagtgttacaataatttttttaccccttctcacatctgaaagaatggtatttataggctctaatgactttgggtacaatagtggtcccaaggaacatggtgacatccatgacctgcaagctacaggttataagtggtggtattgcaccttgtacctttgtctggtgttaggtggtctcaagttgaatgagtagtagctattgtgtaaccatggttgggttgtcaggcattgcagatgtggtgcctcctctacttgtacttccttgccttcaaaatttgcagaaaacgtgattgtacaaaccttgcatgcatgccttgtccttgtgattgtactcttgttgccctcttctccaatacttcagaaaattttactaagtatagttatgttgttatgaaatcaaatttccatgtgcatggtcatggccaagtgacattatgaagtttatgtccagttacatacatgaaatgcatgtcgagtgccatgcatgaggatcatgccaagtgacctcttggttagcatggttgagtgacatcttggctagcacgaccgagtgacttcttgtctagcatggtcgagtgacattggtgctagcatggccgagtgacatacttggaatcatggtcgagtgacttcctaaagtgtatggccaagtgactttctaggaagcatggtcgagtgacttcctaaagtacatggctgagtgagtttctaggaagcacgcctcagttactttcttgtaagcacggctgagtgacttcctagagtgcatggccgagtgacattcgacttggaagcatgactgagtgacttcctcaagttcatggacaagtgaatttctaggaagcatgtccgagttagatacatggccgagtgacttcctaagttgcacggctgagtgacttcttggcaagtgttatcttaatttttgtcatccttatgtggaagtgcttacatggacaaaatcagtaccacgtggcagtacaactcacccccgagaagaccaagtcaataccttagtaaacggggaccctagcactcaaacgggcatcaaatgatagaccagcttcctcacagaagctgaccagccctatgtctggccatcctctgaacattaccatggccggccagcctgctccctataggggcctgaccggccggggaaagacctccagggttctttgtgcaattctacatgtagactacatgatttgggctacgaactaaaagcccaacagaatagctaaataatatctatgtttaaagaaattttggtcttttgtagttaattaattaaatatacaaatatctaaggtttcaagttggaaattaggattttaggcttcctatataaagaccttaactctaacgtaaaaaacctaagtctttaagcctgatactatcctccaagtgacgaaattctaagtctaataactcctataaataaccgtcatcctatactttttaatagggacaaaacccaaagaacaaaggacgagcaatgggagaaagagagaattatatctatcattcattctgtaaaataatttattgtattttgtatacaacttatcaatctctaaataagatgggctcctgaagagttaatttcaaaagtacgttaaaaatcctcctgtcatttattattattttttgataaatcagagaagtttgtattgcatcaaatatctttttacaatgtattcaccattggttctaaaaaaaaccaatatgtttacaacatttcaatccaccttttatcttgcctactaactttttttcgtcaaaaacaatctacttctatttttgacatcattcttcactctttttacaattgtatcaactgtataacactttgaattccaccagctttcattttggttttgccataattggtagactaatgctgcaatggcagcaaccatcactttccttcggctctttgagagctttgaacgggccagccacctgaagagatgtggaatgctacctgctcttgtactccatgctagccaatgtttgatttctgttagacattttaagctaaaagtacactcaaaaaataagtgttaagttgattcctcaaacatctcacatactacacattttgcatccatcacaacattaaactttttcactctagtctttgtttggagacggtttagcaccgaaagccatagaatgaaactatgcttcagaaaaattaagtctattccaaacatattttccaatagcagctgtgttccaagttataatcttcctaaatccgagccccccttctttttttggcttgcacatttctccccatgcgacataacctgggcctgcatattctgaattgcctttccaaacgaatgcccgacacacaacattaactcttttcaagagttttttagatagaatcatgatctgcgcccaataagtgtgaatggaaatcaatacagaattaatcaaggtaactatacctgcaaatgagatgtttcttgagctccaaatgctgattcttttcgtcatcttttctaccaacacttcagtttcaacacttgaaagtctactagtagcaatgggaatgccaaggtatctaaatggcatcttgctccttgtgaaacccgaagcatttaacactctctgaatttcaaaatcatccatcccactaacgtaaaaagctaatttggaatcacttatcatttattattattattattaattattgcccatttaattcttgagtatattatcaataaaaaaaaacttatttattagttaacgaaaatctgcgttaatacttgttgtgactaaaactaaattagtgacatgacttgtatttaaatattatgttttagtcacatataactttttgttgtaactaaaagtcaattttagtcacaaaaaatttatattgtgactagattaccactaaagggagtttttttttttttttttgcacagtgaatatgacttgtatctaaatactatgttttatttttattctattttagtcacagtgaagctttgagttggattgcaactcattcctgggacaaggtgttagaaatggatagtttagtgtgtgtccaagtagtccaaagtaatgtgtttatgtcctcgcagtttgatcttattgttcaagatgttaggaatttacttttggctttatattttgttgagttatgttttgttaaacgatctgcaaacaagttggctcattgcttgacaagcgactcttgtttctctataggttgtgtgcttcagttaaatgattgttcctttgaagtgtaaactattgttttgaatgagtttattatttaataaattccctgatttattaaaaaataaaaaggattttttttttgcaatgtgaatatccaaagcgattaatttataattcaagaagaaataattaagtcataatcatataatataactagaaaataaacggcacttcgcgtgtggttatattttgttttattgataattaagttataaaaatatattaaagttgatattttttttaatagtatgagtaattattttactacattttttcataatttttatacataaaaataaattaatatggtaaaaaaatttatcatacaatttcttatctaaaaaagaaagcaataaaaagatattttcaaacgttatagtaaaataaaaaaaaaaatagaggttagaaaattttcatacaaaatagagatctaaaaaaatcaattgataaatctatagaaaactcatcatatgattttaaaactgttgtcattcaaagccgatgtcat

SEQ ID NO: 15626 - DNA, 9341 bp, Cannabis sativa
aacttataaaaaaacacagtaaaaaagtaaaaactaccgcctggcagtatttttgtaaaaaaatgacaaaagttagtctaccatgtaaatttccctttggatattagataggtgagtggaggttagagacatgatttgtaacgttttaactctcatccccacaaatctgaaaagttgggcagcagtgtgcctcttttttccccgctgtgttggggggcttttagaaagtcttgatttacaactaacctccaaatataatactctcatagggtgtaagatattgtttagagtttgaattagagaattgcttaaggggaacttggtttagcctacttaaatgtaaagtctttttaatataccattcaactaaaaagaggatacttttctttttctcctaaaaatacttacatttcaaaaaaaacctctctaactctctcactctaaatcttgttgtctccaccccaaagccctaaaatttaagagctcaatcacctcgaaactctcaaaatcctttcccatctggagttctcaactcgctcatttttttgtttttttttttagttttgacgatgtcacgaaacgtcactaaatgtcgctatattacgaaacatcgctaaatgtttctaattcacagcatcgttaaacacatcgctaaatattgcaaagtcacactcaaatttttacgataattagcgatgtttaacgataaactgtgtatttttagtctcatatcacaaatacatcgctaatattatcgctaaatatacaaatacaaaatatcgcgaatcatcactaaatttcattcctaatctcaaatttaatctatcattacaaatacatcgctaaatatcgtaaaatattacaaaaaactggataactaaaagaaaaaaaatgcaaaaaacaaaaaaggccgtgacagaagacaataaatgttatatgcataattgaaatttatcaaaaacaatgacaataaaaaaacacatctcaatcgtgtatgaacctaaggatattcttccctaagtttaagattcaaagtgttctacacaaaatgttgtatctctaccctaaattgtgtattgaataatttaatgtctctaatctcttaaagtggtgtatgtcagctcccaattattgttttaattgtaagcataaaatttaaacttcctctagaatatatataaagatatgatattatggtaacaaaaatgtttacgaaaaaatgattaaatggattccagagcagctagatgcttgctctctctacaaaattagcagcacgagtagtacgtttatatgaattagataagatgttattatacacatttggatatagcaaataagtaacattctgttatgtagacttggttggtggtaaaatgtgtggtaacacctcctcatcctccttgtatcagagcattttatcaaaatcatgatcaaatttccctttcttttcaactcattatatatacgtgatccggagctaaaagtagtagcggttctccttgagatccggagcatccttgcagagtatcgatcggacttccatgatcgatcttggcggctctagatctttttcctgtagtgcattccctaacaattgctgcatctgagaggcaaaggtgtcgtccaggatctgaacacaaatcaacctaacggatcatttatttgaacatgattgccaaatctcaatatatctaaacaaagcagcaccgtatgacaggaaaatctaagctaataaagatatcaggtccccatgcaggaattccacaagggatttaactgtgataatatactttctacctccaaacacacaatatggtcctaaagctacaaaaggttgtgcaatgtaacaaaaaataaatcatcaaatatcagactttcaatcaagcaaaatcagctcaatgattatatctcagacaccaaaagtagcaaaacaaagtggataaatcaggagaaatatagctaggaatttttcaagccttctacttacagacacagcgattcgtgatcccttgtaccatgacctattctctttcctgttctccaagaagcttagaacatcctaagacaacaacaataaaccccaaataagatgaagcaaaattatgggccagggccagattgagcaaatttacaagtaacatacttgtcccattcgatcccagtaacctcgacagatagcaatgaacacaagagtctcaaagacagagtgaaggtgggttattgtattagtaagctggtctttcaaaggttgcattctatttcgaacatctgattctaccgcactttcctttgaatcttggagaatttttttcagctttgtcgcactctgcaacttagcctgaaaacaatgaagagcaaaatattaaaggcgaatgagttttcaatagaatagtctcctaaatgcaagattgcgagctacaacaatttatgaagataatgcaatgagatcaaaagtctcaagtaaaatctcgaacacagcttcatgtataaatactcatttgtatttatgttctcttttatgtatcaaaagtaaatacacaaaaccattctctacttttctctcatttttcaggtactcttggtgatttagtcctttgttgccccattttgtcatttacttgtacagattgcctatctgctccacctgcattttccttttcatttttccaaaaatttaaactagccctgccgttttacagaaacatagtttctataattcctcaatgccgtgcgacaaaatagctttttcattcgccatgaactaggcagtcacaatatcaaatcatcttccttttaatttccgagtagtttacatataggtataatgtaataaaaataaatcacaatgaaaaatgcaccatgtgcagagtggtacccacattttccaccagtttttctacaaccgcttgaagataatttctgaacttcgccctcagcatgactgttacttcactaagacgttctccaggaacagcatttccaccatcagggatgcaagatccccacgatttgaattgaacttctatcttaggccgcaggacgtcaagcatcctttttagtgaattcaacaaaatgcccagctgaaatacaagatatattcaaatttcattataatgtgcaagcctacaaggagccaagaagtaatgagaagttacacaaacctcatcggggaccacataggcactagcagatctcttggtaagtttttgcatatacttgaggccaaatttcttaggtgccaagttttccttcaatggtgctaatacatctgcatactgcttatctaaagcttccactactgccttctcaatgtcagcaacagcctttggtggaaagaaaattaaatatgtcaaataatacatattatgagtttgttaagttcaaatagaacagcaaacaattgatttcagaaaacagaaaagcttaaaactacatggaaattttgataagattatgaacagaaaaaccaggtactaacaataagaagatgaatttattatttctgtcttctaggcttacacattacaacatttcttttatatttagtcaagggagagctgggatgactacataagaatgtcttttcatgaatttagcatttattgggaataatatatatgctgtactttgaaacgaatcaaataatatataaccattgactaccacaaatgaacgacccaaatagtatataaactgtatcataagttcataaccgattcagcccattgcctcctacatgtctactggtatttacatcaaagctggtcatcacttaagttatccgtgccagtaaagacaatagttgtaagggcccagcttggatgttgacatgattaaagaacactttatgttggattcaaataagagtatttcacatatgattcgtgcaaactaaagttaaggctcaatgccaacttcaaggaaaacaaaaagagagaaaaagcaaacaagaaaagttgaggagttaatatgattaatgaagatgaagcttcttatttgatttgtgtctttattttgtcaaattttgcaattcaaaatttgtacatgtaataaaaatgtactatgcattttgtacaacatttggtactaaattatgacccaggtattctaatctcggtttcatcatgcacttttcgggaaaggcttggttattacaagctacaactatttgatatggataaaccaaccatattttctaaacaaagaattaatcagccaatctttcaattacatgattagaatatatacttatttgaaagtgattgacaggccatactgcgattttctatgatgaaaaaaaaggcccatcatgcatacattacagaaatttaagtctaaattaaacaagaagtcacatacttgctctagaacaagagtgtactctggccatcgacatataatgatctcgtaatcactcagagtctccttcaatttatcatacatctcatcaacaaatggagttgtagagtgttgtgttttaactcctgaccattttacctgaaagttcatgattacttctattgagcatggaaaaaatgtataaaataagattgcttaaaaatcttgttctctgataaaagaaaaatacttggtaatttggaaatgatatcctcgaacctccaatggacaagcacaagaatattcatggataagtgatgcccaaaactaaacataccttatctaatctgcacgtttcaagcaaagactgtcgcttgtcctgaatccacaccatgatataaaggtggaacaattcttttgcatcaactccaccttttacaggactggaagagcagaaaatagatcataagcataaaaaattgtaagaacaattgtctattctattttgtttatggctgctgccgtattttgacaatagaaactagaacaaaaatatcattacttgatgttccagtttgcaaggtccctctgtaaatctgctgttgcaataacaagttctgctacaggaggtgaagggcctgttggggggcaagcaatgaggaaagctcgcaatctactgcacagttcagtgctgtatattgatgaagatagatttggaagatctatgaaactgttccccccgggaaaaaaaaaaaaaaaaagagacaatcagagcattttaatcttatgtcagagtaccacacaaatggccataagaaacaattcagataagcaaaatggagcacaatgatgttggtacatgatgataaaagttgttcccttttgattgcagtttaggagagaaaaagtatgatggtaaaatggaacacgatggtgtttggtatgatgataaaagtcgttcctttaagattgcagttcagatctttaaaaaaaagagattgcagttcagatgacattgaaaacttgttgtaaatgtgacagacccaagcacataaattgcagcaagattacagagtgatttgattaacaatcccaggcaatttgagagacctggttctctcctagagctatgcaaaatacacagtaagaattggcctgtccaacacatactctctcctctcttttatttttacaactttctaaataaattgacttctggatcttctgacaactacaattagattgattctaggacaattataaccagattctaagacattccacaattatcccatttccaaaagaacccagcactaccactttcctaagcgtaggtgtagtaaattaggggcatatcaaaaatcgaaatgtaccactttcatattcatgaagaatgtaacaaaagaatggtctatgttatgaaaaccacagcaaatgaaaaatagaggaaactcgttttaccgtacaaactcgtaaactcacatgataactaatgggaaaaatccatcagcaatagtaagggattggttggtggtgggtggtttataactacttgggcacccttctcccataggctagtcttttgggagtgagtctaacaaagaatgattatacttctccttaattactatagaatgaaagacaaaatgaaaaatttcaaaagtattatagattagacttttcaccatttagataatgatttaagaaaatataccttggaagtatatgttgattatgaatctcaatatcagtacgaatttcattcctaatatttatgcacaaacacttcatcctctggtaagcagtagtcatagttaaggtatccatcaaagtgtcatcactgttattgctgatatattcatcagtctctgtcaagtgccttcttgatctcttctttgcagcaacctagcacatcacacacttagaaaagccaatatgtaccaacttacacgatcacaattagagaaattcctaacctggaaatagtggcataatgtattttgtgactcaggggacaagatatcatgaagaagagtgtaaagctttatggcaggctccagtgcaggtgcagcacgcccacatgcaggtttaaagacctccacaatacccgagagtactgactcatccaatgatttgtagttctcaaaaactagagctagcacttgttcaatttgatccttggtttctcccaagatccggttctacatgtataaataaatacatatatcagcaatttttcacatgtgttagaagtgatttgggaataaaacatgagcaaaaaatgtcataagaacagaatatggatgagaaaagttcaacacaaaggattcaataaagccatatcaacaatacaaaacgaaatcataaaatgattgatacatacttcttgatgactcaatgtgctcctgctatggcctttcataagaactggcattagcaaatcataaaccaatttgaggcaatcctcagttggtgttgcaacgtccatgacataagagaggtatctgttgccattgaatattagacaacaatcataatgtagagcatgaaaaagaaaataaatctactactgcataaccacattgcaatacctgagcttcgtatatatatcagaaacaccataataagaagaaaactccctcaaaatccatttccaaggaccatgcaataatagattcctttggcgaaactgttgaactttcatagcgacctccaataccaggtcataagcaactgtttcagcaacagagccgcactgcccaccagtaaaagcaaatcaaatcaaaaaactttgtaacacattctaaagtacaaaaggcttccttgctcccaaaatgcaagcaattattcttcttcaagaacaatgcattgcaaaaacttattatctattttcttttagcaacaataatctctttttccttgggtacattgcactttacaaggcacactgtccaaatgtcttcaacaaccatgcatttattccttcatatagatagtttaacatgtttctaattccatccaaaacattaaaaaaattgaacaaatacgaaactaatatatctccacaaatccaagtctacaatatttacttgaacacacatacacacacataatgtggtgcattgatgtcaaaaaacaatagacattaggggaaaacaaaataaaagtgtggcaaacaaatttaaaggttccacagaataacttactttaagatgactactatcatcagaactcattgagtagtgtatacaaatctgtagctttccaacaaactcatgttctggttcacggtaaatagaccaccaccgtactttgtcagactgcatttccatttaaataagaatcatcaaccagaattattaccaggaattcaacctggcagctaaaaagataaagataatattactggatcatcagcaattgtcgccacttgaacaagtgcacggccaaaatgtttccccttggaatcttggatttcaacaattagatcatctcccaagctatctggtaagctgtagagtggtcagcgcctttctcaaacgattcaacaaacaaaaagaatacactgagaaagggaacatacaaaacatgagtttcaccagatccaggctgcattctcattgcatcttcttcaggtgagcttttcagtcttaataaacaagagtatgtttctgctgccaagtatgagcaagataaaaattctcaactaactcatgtgaaaaataaagctcttggaataagcaaaaagtttatgtaataatggaggatagtacagatcagagcattgtactattatagcatacaaaatgtaaaatatggtgattgaattgtgtattgtattccatagaatattatatatttatataaaaagctagagcatagatgttaatcatgcccagcttgttacaaaaataatcaacccacactccgttaaaatcttttgtaaaaatatctcctaattgtattattatagcatacaaaatgtaaaatatggtgattgaattgtgtattgtattccatagaatattatatatttatataaaaagctggagcatagatgttaatcatgcccagcttgttacaaaaataatcaacccacgctccattaaaatcttttgtaaaaatatctcctaattgttctctggtcttcacatatcctgtggagatcagaccttgttgaattttctcacgaacaaaatgacaatcaatcttaatgtacttaatttgctcatggaacacgggatttgagacattatgaagagtaacacgattatcacaccacaattttgctggaatagaaatcttaaacccaaatccaatgaaaagttgataaatccatattacctcacacagattgtgccatagctctatattctgatttagcactagatctagacacaacattttgtttcttaatcttccaagagattagattgcccccaacaaatacacaatatcctgaagtagatcgtctatctaccttggagcctacccaatctacatcaaagaaacactcaatctgggtatgtccatgattcttgtaaactataccatgtcctagtgctccttttaaaaatttgctctaatgctgcccaacgatgaattgttggagaagacataaactgactaactacactaactgggaatgcaatagctagacgagtcacggttagataattcaactattccaaataatctgcgatatttttcaggatcttcaaatggttccccatcacgagtaagatgcacaactggattcattggagcgttacaagattttgctcccaatttttctgcccagttaacaaatcaagcacatactttctttgagacagaaaaatgccatgtttactccaagtaacttcaacacccaagaaatacttgaacacccctaaagccttcatgtaaaattgggtatgaatgaaagacttaagggataagatgtcttcagtatcattttcagtaataatgatgttatcaacatacaccactaacaaaat

SEQ ID NO: 15627 - DNA, 7911 bp, Cannabis sativa
tttttttttttttttgttctttcacaaatttcaatactaactaatctgaactgattaccaagatagcatatgatatagttatgatgttggtagtaaaaaagaaaagtgctatattagtgaaagggagccacaaattatgtcattggtataaagttttggtgatattgaagagaaatgtacaacaacaatggagttatttaagtgggccccacaagcactaggcatgatatcagccattgattttggtggtggaccatcaagattcattcaagaatgaatgaatgatggggcactgtcaatattttattgttctcctaatttatgtcaatggctataatagggccacataaaaccaaaatatatagatataaaaatttggggaaaattggaaacttcatctctagaggtgcgttttagtatattctctatttattttgacatttaataacattttttattctatttttttttaattattttgtaagttataattatttaaaattatttttatttttttttaaaaaattaaatagtttataatactaaaaataataaataattatttattatgcatataacaaaaaatagtcaaacgtacaataaaatatttaaaccttatttttaatattataaactgattataattttctaaaatttagaagtgtttttaaataatgtacactaaaaaaaattaaatcgaaaaattcttctaaattcaaaaacagatatggagtgcaccgaaacatttatttagttaagagtccatattagactatctctaatggatggtgtataatttaaactaaatttaactcataaaaatgagacaatattatattaagttcatattttataatagtactccaatacattagacgtaaaattaacttcgttttttataaaaaggcataaaaaatttaataaaagcattaaattttgttgaaagaatataaatatcttattaaatataaaaataaaatataaaaagtaattaactacattaataaatggcaaaaatgtaaataaaaaaagttatatttattgtgatgtagaatttagtccatgctatattttgttctacagttgtcacaatttttagcatgtaataaatttgtattactttatataccactattaggccatctccaaggcacactaaaaacttatatatacaatatagtgtaattttttccacaaaatgctccaactgatccttaaaacctattctattttgatgagagtctacagtgtcgcactaataatagtgggcactgtagatcatgacattcttttttttaataattaaataattcatttatgaagtaaatattttattatactaataaacaatattataataaagagtataaattttagtattgtagttagaattgaaaaaaaattgtgctaaaataatactcttttggtgttaatttaacactaaatttaaattttatcattatacatgcacttttagctagaaaaactttatttgcatcctaaaaacttttaaaaatatatcattttaataatttttattttatataaaatttatatctgtactaacttcttttaacttttttcttttaatttatattttaaaaaaatataatttttcttagaaaaaataaatatatatacatgatttaaaaaaaaattaaaataaaattaaaaaaagtattgcaataaatataaaataatcggactaatattaaaattaatttttaaaaattatttaagtttattttttttttaataataaagtgtagttttattattttatgggttaactatccattgacaatagtgttataggcttacccaaaattataataaagaaaccaaaataccaaaaataatattgtgttttttatttataaggcggtgccaaatgccaatgattgtgaaaggccagccaattagggtgaatgattactataaagtgaaaagggcaattatacaacacaatactatattatgctttttggtctttagcatagttttattatataccataaccataatataacaagttctattgttacatcatgtgtgtcccttgttaatattataaattttgtttcattaaagaaagtgatattaatatttgtttaatttatttgtattggattaaagtaaagtttaacattgtgagtataatttaaaatgtgtaaaatttataggtggttaagaaaagcacattattcttatgggatggcactgtgggactcggcctaatggggaagaaattctttatttaaatagagaacgagatagggacgaggatgtcattctctatcttgatggggactcatttaatatattaattattttttattaatattttatatttttataatagaatgatatattagtgtcattttaaaaaaaaaaaattaaattatatttgcataataaaatgattatttttattttattttattttattacctctaacaaattaataacaataaaaataataaaactaggatctttcaaaagaatcataggtgtagtgaatagtgataatgtatacttactattgtgtctagctctaagctcttttttttttcgaaaaataataataaaatgagaatagactaggtgtatagtttggaggtccccactttagtgcattaaaactacaacaacaactagtctataaaattcatatataaatttttgagttgtactgtgataggataggagtgcctaatgaaaaaagagaggaagaatacttacttataattagtaagttttgtggaagagtttgaagatttggaatttactatattctttagcaattaacattttaagtacttgataattaatatattgagaaagaaaaaaagagcatatcatgtaagctttctttttttcaaaaataaaaaatggaaagcactgatttttttgcaagtgcaatttgatcatcatggggttttggtttaacttcatctacactataatctacactataggctctacataaattaatgtctttttttttttttgggctaaagaaaacattttggatagagttgtaataagttgttccaattatgcaatgcaagtaaaaaaagtcaaaggtttcgtattcagatgtaacaagaaagaaagtaagacatctatcataatcaatagttgaaaattaatgaatagtgtttcattcatatacgtgaaactactatttgtccttagtaaggggcacaaaattcattccctttcaaaatatacaattttctatataaatattttctaataaaaaaaaaacaaaggtaggtaactatgcttttacaaagtattttgttattttgtattttttttttttttttttttgacaaaaacctgaaatccttcaaatataaaaaccaagtagtacaaagattcaggttagattggaaggtagagaaccattccaagtacatttattgtctaatcctaatcctgttttggcatggagatgagctatcttattacaatcccttggtacataaattacagacaggttaggactgaacaacaatgaattcttaatacaattaacaacatcactaagaacagaattattacaataagagttgtaaattttatcgatcacactttgacaatccgaggcaatagccgaaataggaagcttaactgcttgaatccactcaagggctgtaaggattgctttgccttctgccacctcaagggaaactacaccagaacatggagtcattgttattttgtatttttaataatactcatttgatatatatattttataacgaaaataattgtacaaaacaaaccaaagtctaagccactaatctatgagcactaacattagtaagtctaaaaatccaaagtacaacgaaattaggaaaagattcaagaacgggaaaagatgaaggaaaaaaatcaggtggcttatgaatccaccacaccacaaaatcaaaactaagtccgtcgctacaaatatttcaaggactagataaccaaatttgtctagccaaagaatagtaacagaatagatgaagcagataatattcacgacactacaaataatgcaatttaaaccattgccaaaaagcttggagacgatgtcctattggcaacatatttcttcccaacttccataagaaaactttagttcttcatgaattggggccttctagaggaccttctagatctcattgcaagggcttactcttgaggaaaccaaaaatctataggcgtgtttcaccgagaagcttccatcaacaatatcttttcaaattaacatatctttactctcaggagggaggcttttaatgagatgagagggcccacaaaatctcgacacaaacttcgcccatgcactggcacccaccagttgccattcaccaaaagcatagcagacaagaaagctatacaccatcttgaacccatggattgaaagaagctacctccatatcaggtagactttcgatacaaagacaccatatagatctttaattgcgaggtcatcacaatgagggtttcttccacacattgcaaatgcagcccactatctcagcgctcttaaactttttgctctgatacgacttgttggaccccgctacctcaccttctcccacattagtatgatattgtcggctttgggcctaacccctcacggtttttttttgggcaccttcccaaaatgcctcatactaatggataagatggaacaccttacatacccataattctttccattcctagccaatgtgggactttagttgcattcccaataatcttcaaaccgcagcctagccctctttctctacttctcttcttctagcttcaaacaaagccctccatacccgaacctgtacaaccaaataaacaccagaaaaatagtgacagcaaagatctaaaatgatatttgttagttattgaaaagagacccgaaaatagaggcagaaaaataatagcaagatgacaaagagattgatttcggagttcccctcaaaatcaagggtacatctccgtcaagcttccttcgaagatgcttgattcttcactatccatgtcaaaaacgattacaaagagttggagattcctaaccacaattttagtaggtaatctcaagctttttctctcttttcttcttttatttttctggttttattacaaataaatctctctaactctctctgtttttccctcttattttttgaggttgtttcttcatgaaatggctgctgcaacactctttggctgatctgaaaatgccacacgaaatgggcaggttgacccctttatttatagtgttgttgttgattgtgatgtgttgtgttttgagctaagaaaacagttagaaaactgttatgatttttccttgtgttgctgaaagtttgttggagtcttgagaagttgttattaatttcttgtatagtaaagagctaaaagatttaagcctatgaaaacagaaccgactactccaagagttataatggtctgttgagactagtaaaaaatcttactttattttttcttgtaacttgtttaaggcattttcccatgtgacagttagtatggagatttatccaacactctataatggtcccaagacaatcacgagacccaaggtgtattctacagattaatcaaattcccatctcgcacaaggaaacaactatggtatctaataagctccctagaggtcataatttcccgggccacaaaagaagcattggagggtaaagtgagattttaaaaattaactcctaatttacagtatttagcacataaatttttgcaccaaaagaaatcactattagaagccaaacaccatcctaattttgatatcagggcaacattaagatcccataattgtttaaaacctaggctcacattctctttaggacaacatatagactccgagttagtgagagccaagaatctagacctcttagtagccccagtccaccaaaatctcctaactagcttattaagatcatcacaaagtcaattcgagagcaagaaagtgggcatactataaataggaaaactctacaccataaatttgatcaaggtagataagaatactcatttgatacttcatatttgaaaaccatacatatttgttactctaaattcaattttttttttatgtatcataaattcaaataataaaataatatttagtactctaaatttaatttttaattttttatgtatcataaatttaaataataaaattttaccaatttcttaattatatgagctataaattcaaatttaattatttaacaaccgtttagtcatgttattatattaataaaattttatttatcattttctttttgacaaattatttatcaaatatataaaattttaaaagaatattagcgacaaaattatctaaactctatgattagtgacacttaactacataaactaattttttggtattaaaacccttcaatattagctatttacccatttcgttcaaaagactctattaagtgccacggtagacatgtcacattgtacacgtaataaatttttagtgggaaatattggcgacaaaactatctaaactctatgattagtgtcacttaaccacatcaatccaattttttggtggtaaaatcctctaaatctcacttttgttagctctttacctattccattcaaaagactctattaggtattcgacaaatttttagtagaagatattggcgataaaactacctgaactctataattaatgacaattaatcacataaactgattttttagtggtaaaaccctcaaaatctcactttagttatttaccccttttgtccaaaaaattctgttaagtgccatagtagacatgtcacagtgtactcgtagcaaatttttgtggtccacataattttaattgattaaatatttttaaagattataaataaatcaaaaatcaaaaatattttttctttttatttttttcctcttcgtctctttcttttatatatttctccctgcaaccctaatttccacccacactccctctctctttcgttctccttctcgcacagctccggcaagtcacctctgaccgccttcaacccaaacaaaccacaaaaacgacttcccaaccttacaaacacaaccaaccattcagcctctctctaagcctcgagacccaactctcctttgaagtttctctttctcgcctcgacctcgccagatttgattctccctctcccgcaactcctcatcaataccactgcagttggagggattctctgggttcgctggttcatgcctgggttcgttgtggtctggtgggttcatcacaaaagaagaagaaagaacgagggaagggaaatctaatggttccaatcatagagtactcaaaatagcatttgaacgaaagggatatatagctaatagaagtttagtttgtaagattttgccaataaaaaatcaatttatgtggttaagcgttactaattatagaatttaggtagttttgccagtcaatatttcctactaaaaatttaccacgtgtacactgtgatatgtccaccgtggcacctaacagagccttttgaacggaatgcataaataactaacagaagtgagatttaaagaattttaccactaaaaaattagtttatgtggttaagtgtcactaatcatagaatttagatagttttgccggcaatatcctccactaaaaatttgctacgtgtacattgtggtatatccaccgtgacacttaacagagctttttgaacacgagtaatagctaacaaaagtgacatttaaaaaactttactaccaaaaatatgtaattttgtcatcaatatccaaattttaaaaggaaaatttgaaaaaatatgcataaaatactttaattttttttccctaatctaatacattttaaaatttaaaaaatatgaccacttt

SEQ ID NO: 15628 - DNA, 10304 bp, Cannabis sativa
  modified_base (1051)..(1052): a, c, t, g, unknown or other
  modified_base (9968)..(9970): a, c, t, g, unknown or other
ctctctctctctctcttctattcatcactttttttattagttttttttttttttcttttttcttttttctcccttatattttaatgaataaaaaattattttgccattacaaaattatgccccctacatatatgtgctaaatatatctcttaaactttaaacatttataaaaaaaattactattatataacattttgtcaatacctaaaacaaactaaaataaaataaacattataagaattttattttaatctttaatatattctatattttaattttttatcttttgtaattaaattagttggaagtttgaagttttaacttattttttttggaaagtttagattacaaatttaatttttacgataaaatcgatttttcattataaattagttttattgtatttttattattttttttaaaaaaattaattacttttttaatttttgcctaagtaattgcaaaagtttgacaaatgtcttaatttttactaacaaataaaattaatttttcttcaaaaataaaagataaagttaagggtatattttaacaacactaatattacaaggggcacaaaagtatacgtaattgtttagcgggcaaattagttttatttttttaacaagtcttaatttttactaattaattaagttaatggagatgtttttgacaacgctaatattacaggggcacaatcatataaatgacaaagttcgggaaataaaatagtttttttattctattttaattaaaagaaatattaaatatataatatttaaatgaagcatagaaaaaaaaaagttgatgtatggtgtaatataaaagatttatgtaaaataaaaaaaattgataatgtattttaaaagatggagaagagaagctattggaagtgctctaagctcccaacaaattctacactctatcatttacaataactccctaaaatcttagagcatattttattattgttttctgtttcaaaagattatttttaaaaatgagaacaaaaaatagtgtttgaagtttttaaaacacaagtcatgtttggttnntgttttttaaaaacaatattgaccaaaagtgaattatttttaaaacagaaaacaacattttgttgttttcaaaattcttgttttttgtaactttgtattctgaaaaacagtttcaaaaaacaaggccaaacaagccaaattgttttcaaaaaaaatattttctgtttttaaaaacaaaaaatagttttttagttatgatgctaaacatgcacttacttttttgattttatctcacatttatgttacaccatacattagtttctttatttacgaaactatagcatttgtggactcttgccccctgaactattttggttgacaaaaataccctcccaaatataatacttgtaaatttttgcccctttagtccaaaaaatttacagttttgcttggcagctaaaaaaaaaaatattttatagtatttttttattaattaattgttttaaaactttgaaaaataagtaaaaattattttcttgataactttttattgagattgattgagttaaaatttttaatgttggttattaatgttttacttagagtgttttaatttgaatgattgtttatgtttgcatttaagttatgtttttatatgctaggtggtgctagtatgtgcaattcacgtgcctagttctctttcttttattttatttatattttatttgtttatttttattttataaaaatttatataatttaatattttttttttgagaaaattcaatgttattataaattagaggtcatttacaacaacagagaatataggatagggaatttctcctatccaactaatgtcatcatccaaccctaaagagaatctagctagaccatgtgccgcttgattggcagagcgtttaacatgggtaactaaaacctgagggaaaaaggacaaaagacaacgaacatccataataatatcagaaaaacaagacaaatccttagaagtagaatttaaagctgtagagactcgcaaggcatccgtttcaatatgagtaatagcaagttgatgctgcaaagcccaatttagagcatgaaaaagcgctttcgcttccatttcgtccgatctaaagtttccttgagcaacctttgaataggctgcaacaacaacaccattgtgatccctgataatagctccaactcccaattttttctggtcaacatttgtagcagcatctacattaagtttgaagccattatacaatggaggtttccattttgcaacatgttgaattgttgctgaaggtgttgttgcaggttgtttgttgctgcagacagcagcaggtggcacgacattctttgcccgaatgaagtcttcatgaaaacggattgcatagtttattatggcagcatgtaatcgagatgaacccccatgtacaactttattcctatccgtccatatgccccataagatacacaacagcaactcaaaatcttgctgactcaaaatggtcgataaattttgtaaataatcgccattaaacatgttttgagccttagaaagatctagttgaaatgttgaaattttccatatggctttggcatgcttacaaccaaatagagcatgtccaatggattcccaattcgaagcacaaagagagcattctgctgaagttaaaacttttttcttaaagagtgttgctgctgtaggaagtatgttgtggagtactttccaaacgaatattctgatcttcggaggcaagttcagattccagaaatatttccaccagtctctttgattattagaagtagaggaacaatgttgttcttccaaggaactggctagatggaaaccagattgcacagtgtacaatccattggaagtaaagtgccatattaaccgatccatatcagggaaaaaactcagtggtatagttagaattcgatccgaatcgattgggtgaaaatatgtatttagcataggcacattccaaattctttcctcagtgataaaactcgaaactggcagagaggtagatcccaaatagcttactggtttgaattcattaaacccctgaatccatggatcaagcttgctgtctatttgagttccattcccaactttaaaccttaagccttttactaacagctccttgccccaacagatactttgccaagtcaacgatggtgagtggccaatgttggcatccagaaaggtactgttagagaaaaatctatgcttgagaagtcggctcaagagagaatcaggcatataaaaaatcctccatgcttgctttgctagaagagcttggttgaaatgaacaaaagatcgaaaacccatacctccttcgtgtttcgatttacataaggatttccatctcttccaatgaatctttgtaccattttgattgctgctccaccaaaaattagccatcatactctctaattgattgcaaaatttctttgtaagcctgaaacaactcattgcatatgtaggaatagattgcacaacagctttcaataacacttccttccctccaattgagaaaattttttcattccaagaattaagaagtttccagatcctctctttaatgttgctaaaaagctcactcttgtcacgtcccgagtaagaaggcaagcccaaatatcgctcatggcactcagttattggcatttgtaaagtttgagagaaaaaagtctgagctgcttgtgaggtattaggcgagaaagacatcacagacttatcattgtttaaaacttgacccgaagctttgtgatatgtatcaagtgttcttttgatagacctggctgattgctcattggattgacagaataataaactatcatctgcaaagagcaagtgagaaactgaaggagagttccttgtcaatcttaggcctgtcaacgtaccagcttgttcctccgattgtaaaagtcttgaaagtccctccgagcaaatgagaaataagtagggggatagtgggtcaccttgacataaaccccgagaaggatgcacttgtccaacaacttcaccatttagtgagaaagaaaaagagctggtagttatacaccgcataatcaatgaagtccatgcataatcaaatcccatcttaagcatgatagcctgaagatattgccattcaaccctatcgaacgccttactcatgtctaacttgagtgttgaaaaaccaattcttccttgtgtcttatgacgaaggtgatgaatgagttcaaaggctattagaatgttatccgtgattaatctgttagagagaaaagctgattgcatttcagagataacaaaaggcaaaaccttcttgaaccggatgacaatggtctttgagataagtttatatattacattacaaagacttatgggccgatagtctgtcattgaactcgggttagacacctttggaatcaaagtgatgatggatttattgagatctgtcatatctagaccttcattaagcacaccaagaaccagattagaaactgaaggccccacaatattccaataatgttgatagaacattgcggacatgccatcacagcttggactcttatcgggactcatggacttcaaagcatcatacacttcttcacttgtaaatggctggagtaaagaatgattcatatcttgtgttatagtggttggaacaacatttaaaacaactcccagtgatgcatgatcaacacaatcagatgcaaacagagtatcataataatcacaaatggttttggtcatatctgcctttgatgttactgtaataccttgagaattgacaagagatttgatggtatttgtggattttctggaagttgcatgagcatggaaaaatttagtgttctgatccccacattgtaaccaatcaactcttgacctttgatgccaatattgctcctcttgctcaagcaagtcgtccaaaatagactcagacttctgcaactttaacacgtcctgagtggtcgtaactgctgcattatttagcagcgttacctggttttgagcctcaaaaattctttttttgaagcttccaaacttagatgcatgccacttttgtaaagcttctgtacaagaactgagattgtgcatgaaaagattgatacctccatttgaatttgaagaccagcaatcacgaattatagcagcagcctctggttgttcaagccaaaatttttcaaaacagaatcttgttttccttgctggtttttccttagctgagtagatgtacaacacattgacagcaattgcacggtggtctgaagaaaagtaatccaaatgggaagttgtcatgggttggaaaaaggtattccacacatcattagtgaagcaccaatccaagcgttcttttattgcattgacattatgtcttcctttagtccaagtgtagggatctccctcaaaaggcagctgagaaagtgaacaagaatccaacacctcacgaaaatcatctatttgtctttcattcctcaaccctcccccaagtttattttgattagagagaatttcattaaagtctccaatcaccatccacggaagtaagggggcaacatctttaagtctttttaagagtgtccaagttaagtgtcggttttaaactgcaggagcaccataaaaagccgaaaagtgccatttgggaccattagcaacagccatgtaaccatcaaaaacattggaattataatattgcaaggttacatctacatcatctttccatagtaacataagaccaccacctagacctaccctagggacttcaagtccattattgaaatgtaaaagattacgaaaacaggaaatagaattactagctaatttagtttccataataaaaagtacagtgggggtttgctctttaacaagcaaacgtagtttgcggatagcactcgggttccccaatccgcgagcattccaacttatgaacttcatcgctgtccgcgggactggaaaccagcctctgctgcattgtcaaagtcaccaatggaatccatattgtcaatagaaacttgatggcgaggatcctcttcatctgacaaggaagaagttgatgtagttggtagatttgctcggcatcttttcagtgtttgccttaaagaaagaccttcattttgcctctttgattgcacatttggattaacattttcctgaccatgagcagaaatagcagcagtgatggaagagtatgtggttaaggatttggaaggtgacgaagcagtatgattagtggtttttaggatggggattgatgtggaagaaggaggataagtggcaaaaaaattattgttgctaggaacttgtgccattgggttataaatccctgagagatcagaataattatctggattgccaatagttgtaactgtaataggctggtgtgaaacttttttagcaaaagtgttgggaatgatggaggattggtctagatgggatggtacaaaagtgacagattgttgtggttggttcatatttggaattaaaccagtagcatcgtggatagggggtctggctgttatggtattaggattgtggacaactaaatcagtagcatcagcaacattggaatgagaggattcaccaaaaaacaattttcgtggctgaggcaaacctctgagttccaattgtggtattgccgaagtgagacttttcttggccagacgagtcaacaaaggccacacattccctttcgaaaaatccatacgatagcgatcatatgccgaagtaggaagagcagatcctttaataaaaggttgatattcaagatcaggttcgattccattgtccagtttttcaaggtagattaggaatttattgtatggatgtccaataattccacactccatacaatactcaggaagtcgttcatagcgaaaatccacccaaaacttatcccgaacattggataaagagatcattcttcccctttttaaaggcttggaaacatccagtttaactctcaccctcaagaagggaccccaaccttcatttaaagagtcctcaaaaacatcaaggaactctccaattatattcccaagtgctatagccagtgacttagtcttactaagaaagggtaatcgatagatttgcacccaaaaaggagtaaatttgagatcttcagaggtgaagttttgaccaatttctggtgtgtgtaaaactatatggtggttctggaaatgaaatggctcacgatcaaggacccttatcttgtctccttcacagccgaaggtgagcaagaacatatcagaggattcagaaagtttcacagggaatctgccatcccagtgttctgacatttgatttttgcagagtggatagccgtactttcttcttagtgaggattttggcatacaacaccagatcagtagagagagcaggggcgacaacatcagtatcatgaaactcaaacacggattcttcatcttcggtcaaggtgatttttgttttcaacttatttgtgagaggatccattgttggaaagtaaaatttctgggtactaaccacgatcaaaagcagaagaatgaagaaaaaactgacaataaaggaatagtaactgctataaatcaagatagaatgtgcagaaaagatgggaacacattggaataactataaaaccttaaaggacattaactgccacagagcacaaggataggcagacgctctactatttcatatataatttaatatttatatcttaattatagtgcaaattacaaaatatatattttattattatattggagatacaagagtaagggacaaatttctaaagtgttcattatagattgtttgaacactactttctataatttaaattattatgaatttcttaaaatttgcaagatgtcttaaataattacagcgtacacgactacaaaaaaaatagactaaaaaattttcatgcaaaacgaaatagtagttcttacgatagatattactcttaaattttcaagctgtaagtatttcaattttttttgaaaaaaaaaataaaataaatacttaattagagaaaatctgtaatacactccactaaaagacgtgttttggtagacccccttttttgtttaggcatttaggagaaaaatttagtccaaatatctttttatgatcgtagacgttagagttatttatgacttcctgtaaattttcataaaattataaatagtgcacaatgctaaaaataaggttaaaacaattgcttccaatgtgtataagaaaaaacagtcacgcgtgttataaaataattgaaccttatttttaatattgttaactattcaaaaattttaaaaaatttataaataattctaaataattataacgtacataatcatgaagaaaaattaaacgaaaaactcatatatgacaaaatgaataagaaatctaccaaacgctattttagggggcttaaagcttgcaagtaccttgtacgtatatatatatttttttttttgtgagcaaagcaacactaaaataaaaaattattacatcaaaatttatttttctaaaattagaaattaaaattattttttattaaaaaattgaaacataaaaagtaaacataaatcaaaattaatgatacaaatgaaataacataaaactccaacgattatctaatggaagagtaaaatatatattattacttttaataataccttttaacatataaataattgttcacaatcaatattattaagaaatttaaaaggtgtcattaaaacattttctaataacagtctcatcaaataatagcattaaatagtttaatttataaaatatttttttattatcttaatttgtattaaagcattatgttcgtctcgtatcttatatatacttatcaattggaaaaatactaacattaacacaatctatcacacaaaaatttaataaacacaaacacaacttgtataaattttatatcgtgttgacgttgaaattctatattttaatattcctagttttattatttaattaaatgcagaatagtgaaactggtactgaaaatagtttttccgtagttacagaaaataactctgtaactctagaagaacccagaaaaacaaacagtgtataaaagtaaaaacacacaagatttttgtatgtggttccaacaatcctttcagattgttactagtccatggggccacgcccagagataagattcattagatatgtctcaaaaatataaagtaattaacttatgcataaatagactccctcttattatatgtcacaagcttgatgtattccaccttctaaccgaatcttgataaaactttaagagctaaaatcccttcgatctccttgaagagtgcttgcttcctcccgatgcaagacttgaaaagcaatctcccgaaagccttgtaaaaccttctgccgaaggtagccctaatgttcttcttctttgtagacttgaatacagactcaagacaatacaaaatacatataaacagagtaagagtcgaataagctcttctctaccaaataaagacactctttccttaagatatgaatacaattctaagtgtatcaaagagatactaaacctagctgtaataaggtgtatttataatcaatatacaccttattggcagcttacacacggtctgaacaagaccctagcccactagaaaatttcctacaataaatcttcaattagccgaggaattttcatttctgtacctacagaatcgtgagaagtaagtacaactttccttttatagaaaaggaaagttttgctccgattttcttttcaagaaatatgatctaagaaaatgggaaactcacacaagatcagaatataccagctggttagataagaataaattgtttaatcaaaacttaccatttttacctcaattttcataaatagaaaagctagataactttccttccaagtttagatacacaaaatatggacaccaaatttatatacaccagctgaaaatatacaataaataataaaatatttnnntcaattaaatatgccaaaaatggaattaacaatctccccctttggctctatgattgacaaaatattttattatgagaaaacctgcatcaagtgttagaaaccaaagcgaatagctttttaaagataaaggagtatagaaaatactccccttgcatgaaagcactctaacacataaaacatagaactttttttacacgaaaaagcttacaaccgaaaacaaagcaacttttttaatggaaaagtgcacaaaccacaaacaagaaaactccccctaaaacaagggtccagagttgtaacacacaatccaaaaatccaaaaataaatactactcccc

SEQ ID NO: 15629 - DNA, 10110 bp, Cannabis sativa
gtggcttcaccctcagggctgtcagaatcagaagagtcgagcaatgactcttccaaaatagcattcttttgcattggcagaagatagtcattaattacacccattttatgcaactcttcgactgctttgagacaagcatccttcttagcagcttctcttgaggattgtggtgcgctgaaaatagcatgtattggagcattggaaggtaaaattatatgacagactgttccttccagatcatctagaaaaaagaactttggttttgggtcaaaatacctgtaagcacagacaggtggatcaaatattgtcaaataaaattttcaaaagtttttaagtactcaaaattatgacagaactaacaaaataaaaacaatgcattcagcacaagagcatactcatcatgtggaagttttgaacaatattggtgcagtaatgatatgctataactggaacttatggaagcaccagaagaatcaactctgtatactctttcttctaatccaataaacgtctcatttgatgatctgacactgatttcacagttcatatgacgctcatcttgtttgaaattttctatcagatctagctctttctgatcacccctgcaacagcaataattacaaaaattaatttaaagactttttcctaaaaaagaaaaaacaaggaaacaaaccattgtaccaagaacatatgctttgaaaaagcacctgtccaccaaaaatgcatattcagactctgccattcgtgcacgacctcttgattgtataaagctagaaacagtctctgggagatcaaatcgtatcaccaggcagcatgtctgaatatcaagtccttcttcacctactttagttgcaatcaatagattcaactgccaaaaaaatcagccatattgacatatatacatgaaaaagaaggcaaaaaaatttcaacaactacatcaaaaattagtatagcagataaaaaatgatatgttattatgtattctaattttccacttggaattgggatctagcaggtaagatcaatcatgacttcatgatagagaaagtaggccttggggaagatattcttcaagataaattagtataaaagaatctgacgttagcaagaaggcataaagaactacctctccatcccgaaacttctctagaatgatgttcatggtcttgcgagacatacccttcagtccagcattcacccctacaagaaaattacttttccaatatgccaaaaactcaaggctttgcaggatgcatgctaaggatcttgcagtgacaatcctattaacaaaaattatacatttcatatttggttgtaccctgaaaagttaagagaaaaccatattaaataaataaccacagaacattaaatatatccttctttttaataagccataatagaaagacagctagaaaaagtaaatccatccattttttttatgaatactatcaatttcagtatatcattaataatgaagagaagtcatgaataaaatgaactccagtaaacacaaatgttcctattctgacaatacttcagcctgcataaatttttggtacacattgcagacttctaagaaaaatcaactacataattctatgtcagaaaaaattcccctaaacaagctggaaacattatctcttttctgcttagaactagcagatttacctaataaatactacagaaatctagttacgaaaagatatttaaccctttattgattttgggctcaacaccaatagttccaaaaatcatgccaagcccctacttaagaggaaaaaggtcacatgtccatgagtgacctcctcccaaatatattgagagccgtcacttttggcggaggaaaaccatggttacaaacatcaaaaaagaactgtacaagagctcttgatttcaaaaaggaattttaatgtttctcttcccattttgaatgacccactatcttcaaccatctttcacagttcaccctcaataactccaaacactatctcattcttaaatattattatgttgccactttgatgagtgttggaaaatctaaatgttatggtagatcagaagtgaattgcaattgtacattttatagcttactgcttttgtatcatagctgagatatactgtttcccttttacttctagtttccttggtccgtcatgttttatttttgtttccaaagtagaaaatggtgggattaaatcgaatttagagaaagaatactgataatctttctaggttatttataactttcttcatggagtaagatttgtcagagtgatctcacttcatattaaaagaaatgtttgtgcagaacaaatacaaacctgacagaggaaagaatttcaataagttttaaaagcttgcttgagaaaaatggctctttcaatatctccaagcgagatagatcagatccaacatcatctacaataatcacaaatatcctaatcagtaagaataccaaaatacggtcccagttgttcgtatcaaattctttttccagttactaacttagagcctatgtcattcaaaagcaaatacaccaaaagtattacacactacaaaaacaaaatatacaaaataaaaccacactatattgttaaattaccatactaatagaaaaaaatctagaagtaaataacaataaactgattttaatacctctcctacagtcagaatcaaggacatttgcagccttggaaagatataaatcacatgaagaatgatcacgataattatcttctgcctctattagtgtattccgttcagattcatcgcccttcaaaagaatgcgaattgccttgaaagaagggaaaacagaaaattaagtttaaacatgccagcaaccaaagaacatacaggcaaaaataactagttcagactcaactataagagagcataatggttaatatcaaataatacttggttaatttaaacataagagagcatagtaagctgaatgctataaagactactacagaaaagagaactctaaaaaagtaaaattaataaataaatagatcccagcaacaagaacttagcttagaaatataacatagagagagaggggaatgttcttaggtaggagcatcacttttgtccctatcgtaggggcaacactcttgcccttacagtagaggcattttctgttttcaatatttgaggaagttataacccatattcttttatacgacattgtacacaatagttataataggcatgatgccaatttttgaaaaattatgaataatttatgatgccaaaaatagaatttaacaatcggctacacacgtgtttgcgagtgcaacatataattttaaattttatttttgacatcttaaattattcggaatttcttaagactagtgagtgtattataactacaatataatataaaaaatcgggatataatttctctaggtgtcgaaaacagaaaaatctcctacgataggagcaaaagtgatgcacctacctaagaagcttcatatataatatattctatttataaggagtgaatgcaatggggtacacaaaattgcgcctatggtagggtacaatctaatcgaggcacttaaaatatatttttttccaacattttttatgatagtattcattttggttgctataggccatcttcaaattttcaagaaattttgtacaatttaccgtgcccaaatcagagttcaaatagcttgttgcatgtgtgcctttttttttttttttatacgcgtggaaaacaattgtttacactctgatttagacacagtaaattgtttgaactttctaaaaaattgaagagggtctcctacgactacaatgaataccgtcacaaaaaaatggagaaatatcctagaatttcttcaattagaccatgcccatcataggtatcttttgtgtaccctatttaatcactccctatatttatattaggaagaagagcataccctaatttaacttttataagaaaatattaagagaacaaagagattttagtggattataagtgcttgcctgtaatgctccccaaacgccaagacttctcaaggagaatatgatattatcatgtagtctatttagcagtttctttgtgctcttcagactttcaaaattgtctttaattttactaccaagtgttgatatgcactgtattacatcaaaagaaaatgcaaaaagatgtgaagacatttgcaaacactattcctttctaaagataggcatagtgtgagaataacatacctcacgtttcacgctttcaagtttactattataagccatgtaagggttggataacccattggtaggaccataatgatatactttaacttttgcagatgccacaaaactatccaggtcttttttatctttaactgaatatacctttacaataaggttgaaaaggagatgttagatttaagaatttgaacaattcctagaaatgttcttccttgatgtactatggttttttcaataaatttaattcattactgaaaaaaaaaaacaattcctaaaaatcagaatcataatactattatctttcaacacacaccctcacgctggtaaagatattcatcattccctgcacttcaaatcttggtccacgtaatccttttgtcaacacatctgtgacttgtttgtgaggtccaagtaaaaaggtttctgtgatattcaaatttataatgcctaaattttaggaatttatttttctggttttttgatactttattttaggtaatatcttgtgtaaataaaagatttggattaggcatatccactatctcatcatgaattgtaacttctgtttcccctggcctgagtgagtgtgtgaaacatttcaatgaagcagcataaaataagccaactccaaattagttttccattaattaaactaccaaataaatataatttaaattttttttattctctatactcctagactagtcccgcaggacactggtatcaacctagaatttgatgctaggcaaaatcaaaattgggactttgcacctgaccacacattcaaccttcacccttaaccacggacatcaaccccttgaagttaattcttacaaaggaaaataagaatcgtaaaatgtctcaacaacccaccttagcatttagtaattcttcaagactattgatgctttttggtaaatttccttcactggaagcatctgaaagtataaccacatgcacaaaaagataaataacatgaaatgaggatagttggacttgaacataactagaccaagaacaatctagcaaacaatttgatggtaacatttaacaccaaggatcctagatacatattataaagagcataaaagtagacgttcaggttgacttaattattgaaaaacaaataatgcatgagaaaaggcagatattgacggatgtatattggccatatggaaacagtatacaagttaaggttaatgattccctctccaactcatcctccgaaactaatgatgatggaaatgaatctattgcctttaaaacaagctgaacaacaggctcctctattctactttttaaccagagagcccaagaagttgcatgtgatctatagcagcagtaagctgtttccttctatttgaatgcagcccctttttctctcctcagtgcactaaaatatcttggcaacggagaccccatacccagtgaacaccaaatgccttcaaaaataaggaccaatcatatttgagaatgaacaatgtgatggtcccaagacacattgctttgccagaaaagaactcacgaatctgggggcccgttgtttgactcgtttccagcataatagatgttcaagatatagactacgatgggttacaatcaggttggccttgaatataggcaggttagaccccaagtcgaggatcctcaatctgaagaggccccaaaagcaaagtatggttccaacagaatattggttctctcaccaagagtctcaagaccaatgtccataaacaaaaacttaaaagtccaaaaacaaagttagaaataaatttcaagagcttcgcatatagaatatagcatgaaaattcaaataaaaaatggaaaggactcaagacctgatcttgttacaactgtaggagaatattaaattttaggtggctgtttggatctttaaaacaaagaatataaagcatgttcttcccacttagagattgaaatttaaatgtaatctaagttgcccctatctttgtctattttagaagatgatatcttgctaactgttgtaaggatattgattttttgttacaactgtaggagaatattaaattttaggtggctgtttggatctttaaaacaaagaatataaagtatgttcttcccacttagagattgaaatttaaatgtaatctaagttgcccctgtctttgtctattttagaagatgatatcttgctaactgttgtaaggatattgatttttttatctctatctaatacaatccctgtttcttacattctaaacaataaaaagaaaaaaaaaaagtaaaagatgagaggaaacagcaaaaacagatgccttctatgctagtgattgctactaaggataacaggtgcctgtgtgtgtgtgtgtcagaaacagaagatgagatgataaacagatgccttctatgagacaaaatatatatcgaacatcccctgttaaaccctttagaaatcaagtattcacactgtacaagagatgagatgataaatagtgggaagttccgtgtaagataatctaaataagcataatacctttcccaataactggagatgctgtcatgccaaatatacgaggacacttttctgcttctttattatagaaactctgtaaagtaccagatcatctaatatcaaaaaatatacaaaggaccagagagcaaatcaaataatgcataatgttaaatatgcatgaaaagagccccttactctcataattccagcatatgaatggttgcttttgatttgagcatgatgacactcatcaaatatcagcagtgcaatggaatccatcttgatattacagtgagataagcagtgcagtagaatatcaggagtcataacaagaacctgtattaaaattcagcaacaatgtttaagtggcaagaaggagttggcagaatgtgagaaaacttgtgggaaaaaaaaaaaatcttagtcttcggagccaaggtataggcagggtaattttttttttcaagaaaaaaaaaagcatcagctggaccacagaaaattaaggatggtatctagttccatttctttatgtttatttaaaagcttaatgtccaaaaatagataacaacaattaaaaggctctcttcttgcatagatgttaggctagataacaacaattaatgacagttaagaagagggacaaactttaaatttgaaagaaaatgtaaccctgaagtaatccttcttggacaaaaaaattttcgtctcatacccaaaagaaattataacaattgcatcagtacctcatattgcttaatattttttttccaatatgcttgcttagtgctcccacagcagattccaaccttgaaatcaacagactcttctataacctttgcttgctgcaaattatagtgggttcaagttaaaaccatgtaatagtgaaactaaaagaggtaggtttcgaaatagcatattagcctacaccaggtcacaaaaagtagcaataaatatcgtaatagtcccttttcatcatttttcttatcatttactattcttatattataagaaagagtgttgttagtttagcacaaaagcataaaatgttgctgattaccaatgtatataaaggaagaggaaaagaagttgacaaccaagaaaacaaaaaaaaatgagcaaattaagcacgaaatataataaaatgaaagagaagatcacagcatttaaactacttagagctagcaatccaccaaactcaaagtttaaccacctaacaaaggacatccattcatcctcgttcacccaaagattttaaactttctcttacaatgataaagttacgtagactacatttagcaaaactttcacttgtgcttatacgttaataaggtcttttcttattatccaggaatccagacttctataaaaaggccttaaaaactaaataaggtctttctattttttacccaaacactctcaaaagttctttttaattatataaactaaaaacagatcttttatttagttacttcaaatgcaaactatcacaaaatccaatgaaaaacattcactactctttgcctttggtgaatatgaagatccttcccatcttatcccacaatttcaatgacatcccgcacaggggagaagctaagaccatttgctgccattcttacaaagaacacattaggacagataaatcatcacacaatgccatctcttttgcaacaacacatgaatacaaatctccagccaagaaaacatttaaaataatcaatggcccatataatgttatcaacagcaacactgtaaggataaaaaggaagtgacctttgctaatctctcaacacaaatattaagaaacaactgaatgttccaagcaaaaaaattattagaatagataactccaaaagtaatccaacttagagcaaaagtcagatattttatatgaaagggagcaacatttaacctgttgaaccaaagccacggtgggtgcaagaaaaacacaaatgtcattctggggtttctttatctgatttcgtaactcgtacataagcagcacagctatgtgggtcttcccgcaaccagtccctaaatacacaattatgttctcctccattgctttcttgcaaagctctaattgataacttcaataacaaaaataacaaaaaaaaatatatgattaagcatatctcaaagattgcagttttacatacaacaacaatcaaatttctcagtactttatttcccataattgttcagaaactgaaaaaagaaatgacagaaaacccaatatttttttaaaaaaaataaactaagtcagaagcaagcatttcctttacttaaactgataacataataaacatcacaaagcacaagaaagtaacaaaaatccaaaaagcaaaacatactaaactacgagaagagaaaaaaaaaaaaaggagggaaaacaaaaaagaaatcgtactttctagcaatctttctaggatccttggcttggggacgcgattccatctgatcatcagaagcagcaacaacaaccccatcagcagggctcggaggcactttcccagaagacgacgtactagcgtgacagtggtgggtaccaacggagagaggatcggcttcttcaacttcggacattgtcggaaaacacaaaccctttttctctctctctctctctagagtagagtggagtggagaagagagagtgagaaaagcaggtgatccacgcaaagcaggcaagcaaagattgtgggaatgtgaataataataataatgtttggtacgagaataagaatggcgtaataacgggaatggcttaatagaaaagaatagcttcgagaggtgggttttgtccaagttgagaaataaaaagaatgtggggtccacctagtggaaagtcaagactcaagtcaactcactatattagccattcataactcaagtctttttttttttctatttgctagggtactttctgtattttataaaaatacaaaataaatattgtgtttttttagaaataaataataaaaaaaaatattcctgtttttataataagtatatagccttctatattttaaagggattttttcagttttaaccaaaaaaaaaaaataataataatattacaaaaatattttcagttagctaaataaataaatatacatcccaacttaagaaaattatacaaataccacttatacacacctttaacccaggatctatgcttcctgggtaaccattgtgcaactatcgtgcaactacgcagtaacccaacgcaaccgaaacaaaaattcaattagaaagagaaccaccattaattcaggcgacttcacctgggaagacgaccataatcaatcaaaacagaggttgttacaaattcataaaaaaaatgtagaaaaactactacgaaactaaaattcaactagaaattcagtttaatt

SEQ ID NO: 15630 - DNA, 5514 bp, Cannabis sativa
tccttaccaccatactcttgcttctgaggtatcacggatgggtcagcagtgatgtggttgttggcaccactgtcagcaaaccacgcctcactgtcaagaatttctggtgtagcaatgaaggctaaaagattgttgttgttttgaccggttttgttctggtttgaggagtgtggatcagaccccatatagctgtcatcaaaccgattgtaggaaacagcagcacagtggtcgtattttccacacacttggcatgtaggcttggagttgttggttcttcctcgaccacgagatctgcctccatttcctctatggaaatgtctgcctccattgttgttgtttcctctgcctctgcctccttgagtgggttgatgagcatagttggcatgaggatcagtgaagttggtgtgattcttgcttagagatgaacctccttgcagcctctccactttgctattaaaactgagaagtaactcttgaagttcttgccagctggtttttgttcgagcttcaatttgcagaacaatggtgagataattaatattacgtccagaaagaacatttgttaccagttgagcttcaggatatggttctcttgcaaggacaagagaatctgcccaactcttcttttgtctaagatattcgatcatgggagtgcctcctttcttagttgtctgtatgagagttcgagtatcatccattttggattttgagtgtgcaccatagaactgctccagggcacgccacagtcctgctgcacttgttgatcccatcacttcagtggctatggtttcagtcatagaactgtacaaccaccccatgagtaactagtcattgacaatccagttctcaaactcaggattgagagttgtgatagtttcggatccatcttcagtggaacctgtagagacatattcaaagggacaaacattagtaccattcaaaaaaccgtcaagtcgatgacctcttactatagtggagaccattgtcttcaacaaattatagttgttcatgtcaagcttcagagaaaatggctggtttaaggtactgaaatggtgtgggacatggggctgagggttgttggatcctgctcctgtatttgtggagactgcagcagggacaacagggtttcctgcatttgattgcgcctgactattggttgacatcttggctctgataccaagtcaacttttagagatattgtaaattgatttcctcggctcaatttactgttgagatttcgatttctttatatagaaagagagggccaagggccaattacaaacgtgagcaattagctcaaatagaggtggcagaaattaggtaaaagagaatctttttcaaatacaatgattggtaacaaatcataaattctaacggtaaatatcctcctcaatttcagcaatagaggagagtgtgacacatgtccaattattggaccacatctatagcagaaaagatttagggatcttcttctcgattcctttgtgaagagaatagcttctctgcaatgcagagtactataaatcaagtgcattcctctgtttcattttctttaacacagaacatctaaaattgtaattttttttttacatattgttttatatatattttttcatgaaatattatttttttaaaaggaaaaataatatttttatgttactgtaatattatactatgttttttgaaacgtgtaaataatgtttctttttagaacaatcagaaaatagagtatatttttgtaagaaaaaataaaaaataataatccgttaagtaaaaaaaaaattatagatatgtaaaaatgtaattttttgtcatttttgaggatttatgaaataatctctttaaaaataactttgtttaatatgtttgaaaacagaccaacctattcaatgttttaatgattgtaaaatcatttccaaatcccaagtttgtcaactattactatctcgatgaaaacgtggccaaggaacctaactagagctaacaggcagagcatcttgtccattgaatctgtcttaccacatatgcaatgacattcatttttcaattcaaatattaaaataatatgaatcgagtgagggacaacgggtaggtattttgcttttaaaagaaaaaaaaagttactttttatcaaaaataattattaatgtaatatttatgtaaaacatggtagacaacttttgaaattgtcatagcagtattttttgtaatagtcaaattttatatggacaagagaaaaaaaaaatagtaaaattttgggataatatgtatactgataattatagaaggtactctcattggagattatctctacagccttaaaaaaggatgatcaatttagcaagttctttctcaacaacttaatttccacaacctaaggtttatcatataaaacaggagcacatggtttacacatcacataaaccgaaaatcatatgaggactccaacgatgtcaaagaacgcggcaatagttatatttctattgcaaattcaatctgtgtcagactcagaacagtgttgtcaaaaaaacgtaatcgaacaaataataaaccattaaccttatggagaaaatcaaaagactatttggaataacagatgaggtatttcacttcttacttttacaagaccagagtaaagtgacaactgcaccagctatgctcatcgtacaaagtaaatttaccaaaggcagactttgtcttgaatatctgaaaccattttggacatagctctacatcatattatatgacagtatgaatcctcaacaaacttatcccatgctaactgttttgtttatcaaacaagagaagaaagaccaaaactctacaccaaatcgatgacatcgttttgttaaaagaatatatcaagcaggggggaaagaaaatctttgatcttctgtttctgccattgccaactgtatccattttgatgctgaacaatctttggtcgttggcaattgacaacccaatctatccagggcaaccaatgagatgaagtattatctgtcatggaagtctactgatcagatgttttctttcaaggtaagaagttaattttggtaaatttaatgactaggagatggacttaagaagataagttgattttgctataaatgatgaaaccttcacaccctaaaaagaagcttaatcatgaagcgtgctagctatttcttctccctaccaaactttagcagtaagtttcgctatatgcaaaaaattaccccttcaaaacaaagctattaacggataatgaacttgtggcttttttagttccaccactgcaaaactcaggtgagtttcataaatccatgatccaacacttggaactaggagagagttggatagggttaaaagtaacatcatacctgtaagctacaagtatcaaaactgctagattgatgtcgatcacttgagagggatggcaacatcaaggtacttttggagcagccatcctctgggataaacatgaccgtgagcttccaaatgaaggtgccaattcattatcctcgaacaacccataggtgtaccttccatctgactttcatcttcaaccacttgctctaagaaagttgtctcctacaaagtaagcaaaatgacaataaaagtgaatttcagcttgctcatatgtaggaaagctgaagaaaactacaaaattttaatgacattaatcatacttggaatccctccttcactgtgtctaactgccggacaggaattgatgtggggcgtcgccatctctttggatcccacaaaattgtgctgttgaaagcaaatcctgacatatcaacatgaaatcttcgtagtctcttacttttctcattagtatgccatccaacgactcgactcccattgcacactggaccttccaatatggccttgtttttgctttgtgtaagcattgcaactggccaagtcccaaaacgactagaaaacaaatttatcaaaataaacatgtgaaattggaaagatcgataggtaggattaaacagatagtgattatggtctattttcataacaggaaacagaacatatgtagcaattcctgtcagtcaagtcataaaacaaaacataaccgttttttaaacaagaaacagttactctagtagatgtggctgactcaatctaatagtggctacaaatgatcaattatgtttgttttattattattttcattttctttccttcttctttttttcctacaattttcttatctttttttttcaccaaaatccaactttcaaacatagtccaaaagaatgaaaatgttgcaataagcatctatcacattcttagtgtcaagagtaacaatcaaatgtaaaaggggaagaagtgactgacacgaaatgaaaatgtacaacgcacggaagaaaaatgaatgcaggatattctataaattttcagaaaatttacaataatttaaaatgctaaaattcaaataacttattactcacgcatatatatatatatatatatattaaaataagtgtttatgcaattagatgtttgaatgctaatttttgagcatcttaaattatgtgtaatttactgaaaatttgttacacgttctgtaactttactatgcaaaaaaaaacattacgaccttatatgtatccaaaatattaaaagtacatctaaataataattaaaaatcactacccaacaattcttatatatacatgtatgaatggtatcgatggttctatattaaatatgtttgagtaagctttgatgaattgtaacaaatctggattttcttctccttcttgtttatctactaaatctttttgttgttattgttcttggcaggtttcttcgcaacatatttcttcgagttcgaattacacatggtaaatcaaaattcagacatagcaaattgtgcttacaaaatgatgtatgcagggtaaggagatttgacttttatgggggtttcaaaaggattttaccgtgtttgtttacaatttaaaaaattggtccatgattacattagctactttattcgcaaagaaaccccttaccattaacaaagacgagaaattacccaaaacatgccaacgcttgtaattacatataaagggtaaagacatacctaatgtttctcaagctgtagaacaattcaagcgaatatatgttgtcatcatcagcaaaataaacaatgccatccagcctgtgatgctcaatatgctccaaagcagtgttcctctgatgcacacctcggtccttaacttctgttgaattcttagtacacgccaaatgcctatacataacgccagtcttcctcaaaatctcagcggtctccatcgacgccgaattcatctccaccacaatccacagcaatggcggaggcacaagtctcaacacctgccccaacctattcaagaaatacgcctgcaaaggccgattatacgttggagtcaccacaatcagctctttccttggcaaaaaaacaagcccgtcgctcgactcaggctgggcctcggctccaagcctcacgtcagccataaactgctcaggcttcac

SEQ ID NO: 15631 - DNA, 5490 bp, Cannabis sativa
  modified_base (2865)..(2875): a, c, t, g, unknown or other
actaatcagattgtaaagagttttatttagggtataaaacccaacagattgaccctatagaccaacacaattatttctagcgtgcttcgtcctcacttgcacgtttcttgggaaaacttgccaggagattacccatcctgaaattaccccaagttaagcacgcttaataatgaagttctttcgtgatgggctaccgaacaacaagatgggccttgtagatataggtagtaccaataaatccattttaggccctcttcaattgtgcagtcccatacctacacagtctcagaatcattccatttgaccttccccaagcagtatgggattgcacaacttacctagtattttcccttaaagatcacgagactactgactgtcacaatcaacccctattacaaggtctaacgtcctcatcaaccacacttccagctaggtcaaggctctgataccatttgtaacgtccccacttcaagccttcattggacccttacacccacagaatcattgctcttatacacgagtatgtcactcggttgcttcatagaatgatgactgaccctacagaccaacacaagtatttttagcgtgatttgtcctctcgcacgcttcttgagaaaacttcccaggaggtcacccatcctgaaattaccctaagtcaagcacgcttaactatggagttctttcatgatgggctactaaaaaacaagatacactttgttaatataggaagtaccaatcaatccattttaagccctcttcaactgtgcaatcacatacctacacagtctcaaaatcatcccacttaaccttttccagggggttgggggattttgcacacaacttacccggcatttccccttatggatcacaggactactgactgtcacaaacctgatctcgaaccttaaccttgacccagacctagactccaatttagatctagccccagtcctagacccagaaccaggaccctaactcagacttcagagcagaccctaacccagagctcctagaaaacttgaacatatgcaaagagaaagagcaagtgctaaaaaaatacatcctcaaaaaagagatttgaagaacaacatcaatgatcaaatccagggtcgagaagttgttgattatgaagttgtatcctcttgaagataaaaggaattattttcctcttgaacgtattagggtatccttgaatatttttcgtaagttgtatccttaagatggtgatgaagaactcacaccttgatcttccagatctttcaccacacataaggattactgtggggtaatatgttaaaattgtataagtattcttgatttaatctcaagtcaggagcaagaactcttttctttggagtgaccaatgatacgattaacctttttagattttctaaactagacgtatataatagatttaagattataccagtataacgataaaactgacataattataataaagattttattaaaaataaatatttatattttaaatattaaaataataatatttaattatttgaataaatatgtataatcgattctattatagatatttattttgaattagatatttaggtttgagttaaatatctaataaccgattgagagaatatctcaatcacttggatagaatctctcagctactttgagaggatatctcaaccactattaatatctgcaactacttttaaattcaaattaaaataaatatttatctattgaattaattaatcaataaaaaaaatccaatgggactcactttatctaataggcgcctatcactttgtcttaacactgtgattgtggcaccatcattgtcttaaccaaatagtggttgtgtctttgtccagataacactttgtctttttcctaatttattttcatttattacaaaataaataattattaatttgacaattctaaatagactttttgaacatcattatacaactttatccattcccttgatagtgtttcaaggttgcgatctagggaccatggacctataataataagcaccaataaattagattatttattgaatcttttcaactaaataattttatttattaattttatgatcactccactataaatatggaattgagctcttagtaattataaaattatatttactgagtttactgcggtgtccattgatataataaattctagtgattagctctccttgtatcggttcgtaattaattttggtcaaattgtcgttttatcctttacttctttattctttagtactgttaattaactagtgaaagtataatttagattcaatctaaatttgtgcacaacttttcagttccaaaattaacacttaagggaaccaatattcgattcattagaaaagttaggattctgcaatagtaaaacatattcccagccatccacattattacattctcaaagaaaaagttgtaagaatcatcttctctgtgaaaatttaaagagtgaatcaaagaatctaataatatgaacatgagttcatgattatttaggatttaagccgatctactattggtcattcatatgatatgaattaggtctttatagtaaagggcatgcttgataaagatagcttaattacatatcggtccatgtcatatataatcattattgtacataacatctacttagatatcatactacatcaacaatctgaatcgagattacttgcactgaataacagacattaatgaactgcactagtaactttttattaaagattatataactttaatatgttgctgactattttattcatggctaagtgatatttgtacaatacaagtcacaacctcatatatgaataagaaattttccaatatttatataaattattcaatnnnnnnnnnnnataatttaatattcaagcatatatgaaaatgttcaagttttatttataaaaaaatatctttacaagttttttaaagacagaaaccctaacatctctccttctattttacagtcaatttttttcattcaagtaagaacattcaaagcttgaactctaaatttgatgaatctgaatctactcctctgaagacaaagttaaaatagagatgaatgatattgaagaggagattctctatggaaacctgctattttttcttatgttttaggtgttaatacctcactgagtatcctaaaacgctttgctaggagaatttaaaaggattacgggtggataaagtaggatttttttatctcaagtgttctttattattcatgttcatgcacttggaggtttgttctgtggttggtaaacaaaagttcctaactacttttttttatacttttaatgatgaacaaggtagaacaaatctttggaagaatttggaggagtttgcggctgatattgttacacattggattgttcttggtgattttaatgatattttggataacaaaggacgtgttgatcgagctaaaacttaaaaatggtagatcgagtgtgttttagaggtgtgtggagaattgtcacttggaagacataaaatattatggctttttatttacttggaataataagcaggataaagaagatataatttattccaaacttgatcgtatcatggctaatcaagagtggcataataaatacaactcagctgaggtgattctctttcctaaaaaggagttcgatcattgtctggggtgctattagcttatcttgaagttattcttggcaaacccccttttaaatattttagaatgtggcaacaaattgacaaattcttacaatgttggctgtaagagattcaaggaattgagatgtataaagtggttaagaaataaaagagctttaaagttttgataaaagagttgaaccagaatcatacaagcaatgttcaagctagagacaatcaagcttatcgatcattaattgattcttaagaagagcttagaaagattcattatgtggtgattaattgatcaagaaatgcaataagcaaagcacattgctcttctctcttttcttcaccaaaaggccaaattgcattgattaaatgagggagatgaaaataatactatgtttatcgtaagtattagagcaagaaaagtagtaaaccaaatttactctatcatggatataaagggtagatgggtagacaagtcggaagaggtgagttttgcttttttgtcttattttaccaacttactaggcagtaaaatggagaataggaaacatgtaaatattagaattgtttctcttggtctagttgtgtctgacttccattatcatgctttattagcagagtataaaaaggaagatgtgatgaaagaaatttttggcatccatggtagcaaggctcctaagccaaatggttatggatgctatttatttcaacataattagaatgtgagtggtgttagatttagtgaagctattctttcctttttgcattctgggaatatgctgtaagaaataaataatatggtaatttctctatccctaaaagaaaatattttgcgaacgttagtgactacaggctaattttttgttgtaatattttgtataaagcggcaacaaagatgatttgtacaagattgaggaagcttctatgatttctcaaaaccaaagtagtttcattcatgggagatatattgcctataatgtgatggtttgtcagacactatgataggaataatgcgtggctgaattgtatgattaaacttgatcttccaaaagcctatgacaccatcgaatggaactttatagaaaaaatgttgttttcttttaagttcccttatgaattcattcagttcatgattatgtcatgtttccgtactcgaagatttagcttagtacttaatggaagaatgcatggtttttttgaagctcaaaaaggtttgtggcaaggagattcaatgtccgccctactttttgtacttggaatgaaatacctgtcaagaattatggttaaagtgggttctcgggctgaatttaagttccataagagatgtcgattgagacattccgttgaatcatctttattttgcagatgatgagttgatatttttcaatggagattttagatccaaatcttatgcttcagggtctgaaattattttcttaattttcaagtctccagccaagtgagtcaagtcagcagtgtattattgtggtatggaacaataggagattaagagaatcttaaatgcttctagttttgtgaagaatactttgtcttttctctacttgggaataacctatttgtgctaaaagattgtcagtttcgaattgtgcaagtatattggagaagatggtagcaataattagagtttagagttctcagaaatatgttggaagaattactctaatcaactcggtcctagtttccacatactcttattgggcacaaattatgttgctttcgaaaattattttgaagcaaattaatgctatttgcagagctttcttatggaagggagtcactacaaaaaatatcacttttaccagcacagttc

SEQ ID NO: 15632 - DNA, 12061 bp, Cannabis sativa
  modified_base (26)..(27): a, c, t, g, unknown or other
tacaaacttaaaactttaggtacttnngccgctatttaccctaaaaaaaatcaacttacgaatcaatctgtgtatcgggttacgcgcctaaacagagcaatatttttaaattttatgagttggctgggtcagatccgagtggattaatcgagtccgaatcaactccgaccaaaatgttcaattctaatctaagccaccaaaagagtggaaacaacatgatctttttttcttcacaaactaaaaaataaaacctagctaaccaaccgtttttcttaccgttatagtgtgtctctttgtctctctgtgtataaatatacagattttggcgccaaaaagaaagcaaagaaacatgctcgaagcgaagagcttgagaaaggcggtggttccatccactcttatccccaatccatctcccgctaatctccaatcctctcgtctcgccctccatgtattcccctaaccctaaccctaaccctaaccctaacatcgtatctcactcccccctgctttaatgcttttcattccttcctcaggtctcccatgacgtttcctcatgtttcgtttacatcgcttccgattgccatatttacaagctccaggtactttaacctttcaattttcttgctttttctactttctatactctggaaatttgatttcaagatactcagattgtcaattgttgtttatttcattgggttcagattccactggacgattctttgctcagtaaaggaaaagaaagccttcttattcctatatacaccgaggtattgtatcatgatttagtgtttgagggttcatttttctcaatctacgtgtagtcttgatataggtgttgtactgcttatatgaactctttaaggttacgaactcttcgttggttaatcgctgcccacatcgttcagaaattcagagtatagtgcttgcagaaagtgagagtaagtcatgtttgaaaaatcgagttagtgacataatgtatgacttttagcgatttaactgaaatgaaatagaagctgttttcctgaatttgtaggcactggatatttacttttgggaagtgtggattcccatggggacctcattgtgtctaaattaggtgttaatggtgaaggtaagaattttcatttatcttatttaatgtaatgatattcttattcttctaattaagagctataagtactcaatagaatgtcaaatatttcttggtggttcttaatgaggtcttccgtgatgattatttttaaattgatcgaccttttctccaatgcctcatctttcaggaattgtctttgcaaaatttacgtttaataacaatctatatctagctccactcaaatgcaaaagcaaatgggtcaaaatatcacaataaagtttacgtcaattgataagaaaagagttgttaaaaaaacgacaagaaaagagaactatgctaagtgatgatatataagcaccccatgcaggtgtatgtgtatacatatatttatatatatatatatattatatgcataagcttgtgtctgttgtttatttctcctataatttagatttacttgatcctgtatgaagtttcacgggaggcagaataggctttgccttctttattattttggtagaatacatttctatgtaggcttgatttatgcacgacttagtcttgcagtatagctaaaatgatagtcgttttttttatggctaaaatggcattcatactaattgagcctgtctttttgtacatttgattcaaattgtgaattgtagtgctaacacattatttggatcatttaattcttcagatgttgataggctaacatacacagtatcacctcgtgattgtggtataagagagagtagttgggctgggctgtgctttagtccaaaccaactgtctatggtatgcagttgctctaatatattaaatcctagatgagctctagtttatagattatgtcttatctatctgtaaaggctaaaaacatattgaccctttgaaatgaacttgttcacatttttgattataatatcaattgtataaataaatagtttcttggatttgtgctggaaatttcttgttcaaatttttattgtaatatcaaaagcataggcaaatccccagactcaagaaccttgggtaaaagtgaatgttaccctctatgcttgactgagcttttatttcaggcagctgtggcacgtggcttttgtaaaactgttgatgtttatgatcaggacatccatgtccgaacttttcgtacgtaagtcatatgaggtttcttcttatggtttcaacttcatacattacttgctgttttttgttgctcctgtttcactttaactggcagtgcacttcagaatcacagaaacagacaattttaagaacaaccatttctaaaaggagaaagctgtcttaagatgattgcatcacatattttcttgttatgaagttgtgctatgaaattcttgctctcactgtcgctgatatggggtttagtaaaaggataaatggattttctgcaatcaaactaatgtgactgaactttatgttagttggcattaaggtgtcgcctcactcgtcaattgtaatttttattttgtgtcatggtcttgatgttcttggaatatgattttttgggatggttctttctttaaaaatggaaaattgatcacttccagaatacatattagttgtgctttcgctatctgtttattagaaagatgaacgttctcctgttttttgtggctagagagagacagagtagagacagagttccatcaaatttttggatcttttaatcaatttttgccactttttcaggctattgtatccatcagccgtgagctttatgcataattcttgtaatgcgagtggaagtaatattttagctgttgctgaaggttgccaggtaaaatgctacattacattgtttctaaatgctggcatgagctttgttatctgtacttgcttattagatttttatttatttgcttcctttggcaaatttactgtagctgacattatgggacttgagaatgaaagcaaatggcggttgcctgcaaaggatttgtggctctgttggtgatatatattatgctctcagcagttcttcaactggtaacattgcaatcggtggagctgaccgtactgtgactatctacgatcctcgcaagttagtggccttaaaccattctacttagcttgcttactggtgatggctagttgattttaagttcagtggctatgtattgttattacattaatttttagatgagaaaaggaccgaacagggtggtcctttttatagctgttggggaaacacagttctgaaccctaagaggatatcatatggaaatgatctttattgtccacttatacaaaaccttagaatggagcaactgaatttttgtttttactttcgataaatttattttttgttatgttgtattaaatacagatggtcagcattatctagatgggttcattgctcaaaatatgaggtcagtactttgctccatatctctttttgtattataatttcctgctatttgtatatgtatactgtctctatagatatcatctccttgattaaactgttttattaagcacagccaggaaattcaaaaatcttttagagattattctttttacatggtgcatgaagctggtcagattctggcattgcttttttgttttattattattattattattattatttttaattgtaaaggtctttcaagtttgtcttcaattattaagttcatgggtgaagagaagcagagtcaggcatatatttgttagttggttgaacttattgggaatgaatgtctaaaatctctttcttgccactctgaagttgtcttttttcactaaaactattgaaattcacaatataagctttctttttgcaactagggataacttgtgtctttggtactgcagataactggacttgctttctcttcaaatgatcctgactacatctatatacaaggagttgattatgaggtattgttgcaagtatttacgtcaatgtcacttggtgcttgatttcttcagcctgtttactcaatttctagctagtagtttagtacctttcacattaataaacaagttttcaccatcagttatttacatgacatgcctgtttttgtgttattataatctttgatgaaattcaggaagcatcatatcccatgcttataatttctctcgcttccacgtgatttttaggacattgattcttacgggtgtttgcaggtactttgtggtgattggaaaacaaacaataagatattctcatttagaggagactcaaactggcttggttttagcaaggtacacactactcatgctgttttgctatatcatatattgtgtagttacatacattttgaatttaacaaacacaataaataggaggttcaagttttcaacatttgaaaacatcaactgttgtattttgaaaacgctgtaagagacaatcccattcccaccccccttaaagctttgcttggattcacttttcttttagtttttgtttggaaattttccttggcctcattcaataaaacaccaatttatttacacaaatcttatggactatttcagtgccacaacagagatgttctgggtggttggtgcgattcggggagcatttttgtggctgatgttgtagcgaaacagagcgagatagattaaggttttgtcaattgatcctccttttaatctactctagtaatctcctttagtgttaaatttacattttgtgctctttcacgtgacaattttacttaaccaaatcttctacacatcatcaacaagttgtcatttgtagatttcattcccaaatcaaactatcaggaacgaaatcatacattagatttttacctagaactaattgactgttagccattatttattttgaaactaggatccctgtctagccaaccctacaaaacactacaactgttaacctttataacccacaaaggagttatcaaattcaaaagccattttcttattacaggcaggcattatttgttgtcagtttgatgaacaaacccatctgactataaatctttctaagtggaccattttcgtatttgagccactactacttgggtaatgggttgggtccatgttatgggctgtttttgagctaaacttgatgttttaaactcctgtcagtgcttccatttttactcctattctaactgaggagattgtaggataagatttcattgacaacaagacattttttttttctgaagatgcccaaacactgtatgctctattctattatgaaattattttttggtgcacttttaccaccgcattagggaccatatatttaactcttgtggtccttaccttatcatagtgtttcaatgtttaataataggtcaatagtcaaaggggctcagggtatatttgttcgggaaaatttgtagtaaatcttgagctgttttggtagactctatcatctattttggtactcagacgaacttttaagtctattgttttttatggttgtatatttcctagttatttagggtcacttataattttttttaaaattgttaaataatttacagtatcgaaaataaagttaaaataattgtttaccacacttaaaaaaaaatagtcacacagttctaataaattgtacacattataaatagtagtgtagcacttttttttgtctctagattataatttagataaatataattgattgaaaaaaaatatattcttttgcttatcttttttggtagagatggatggagagatgaagagagattaaaaaaaggaaaagaaactaattatgtttttatattgtttataatttaattaaaattatttttcttctttctataatcaattaataattttctttaaaaaaattatgaagtgaaccaataatagagttacatgtagcattctatctagtcaaattagcaaaaaagataatgtttggtatttatgtcatgggaaaaaaaaaataaatgacttcaaataagcaagtaaaagtaaagcgagtgaacgaatatggttaccctttaaaaaaaaattatggccctatttggcttaggttttataaattattttttagtttttaaaattaaaaaaagtcattctataggtgttggataaaaaattaaaaagttttttatttaattttattttttttttctttttttttttgaaaaagttaggatttatagtttctaacttttcagaagctattttaaacattaaaataatttacacaattttttaatttatttacaaaagtattttttaaaatgatatccaaacactttgaaaaataattttaattaaaaaaaatatttatataatagttatccaaatagtaaaaataaaacaatttatatttattttatacttttatacgcgaaagtaaaaatttaactaaacgaccatatatgtatgactcttattaaattcaaaggccattttcttttgttatcagtttggtaaagaaacccatcggactgtgcatataataaagtgttcataattgtttgatgggtctatctgagaccagccactgctattttaaagcttcaattcatgttctatagtttgttactgtggaatggggattgtatgattagatttcatttgacattaaaagattatgaaattattatactatgggttgattgaacaagtgtctttttaccgatgtattaactcttttgtggtcctcattaatgtgttcaatttttaatgatatgtcaagggtcaaaactcatggtagggtattaacaaaggactataaaatattttatggggacaacaaacaatgagatttttagtttaaactaacacctcaccaactgccaattgattgggatttaaatgggattgaatacttgatgaagaggctcatttgcatgtgattctaatttagtattttttttctttgcaacaaaataataaaaatggtaaactatatttgtggcatcttaaccatcaaacaaagaaaagaaaaaactgagtcataattattactccaaaagcttaattagttctattgataaattggtttttttgtttttaattagttttagtgattaacattaaaaactaatgctgttaagaaaccaaaattggatagtaatttacacacacatattgaacaatacattgtaatttaatttgaatgtggtaggatttggagtgaaagtggataaggtggattctaaagtggctctcatacttaattcgggataagatggattttatttcaaaactaattggttatgaaaaaggagtaacccattcatcttatataatattttatttgtacacattagtaatgtcgaataaactttaataaaatgtgcaaattgaaaatgaatcatcattactctttccgacgaaaaggtgagaatctcaagtaaccatcttaaatgaagatattgtggctgcccatcacaagaaatgtgtaaaattttgtgcaatgtactttggtttggtaaatgatttctaagatgatgagcataaagaatgaaagaaactaaatggttaaatggttaattagctcctcatctccaaatttcttaaagtatttcaactatttcattagcactagtcttgccattttcacaacttccactgaatgatttttttcacagtcccaccaaaaggagactaggagagaatataaatcagaatcaagagaagtaaagtatcccatcttcaacccggcgtcgagcatcttcctaaacagcttctcagcctcctttgtttatttatttcgtttcaaagacaccactagagaactatagcattcttcttaagaaacaccgcctcccttaacaaccttatttattaatcaatttataggtctcattaagagaagtgtccataaaaaccaagaccacttccaaagatagtgaacttgtatcatatgagaatgtccagattaaggtaaagcaggctactcctacatcactaactaatgttattccagatagaactgagataacagaaggagaagaaaataaagatcagtaggaactaagcatctatcaactagctagagatagaagattttctctctagcggtcaagcaagcaagcatggacctagagactgaacaaatggatgtaaggacaactttcttacatggggaattggaagaggaaatctatatgcaacaatctgatggctttgacaatgggaatctagatgaggtatgcctattcaagaagtctctttatggcctcaagcagcatctagataatggaatttgagatttgacacctatatgtagaatattggatacactaaaactaagtatgactcacgtgtgtatttcagtaataaaacctgcttactactctatgttgatgatatactgacatttagcaaagcaaggtcgaagattgacaaacttaagaggaggctcagtgatgagtttgagatgaaatatttgtaaccacagaaagtattgaataagttcgacatggtgtttggtaaatttaatacacaagtatacgcaatcgaatcaagtaatataatgataaagtagagtatagtttcctcgatgattgattatcaattaccaatcaaataattctctgtttctatttgattaataaaaatattagagaaaagtaaataaaacaaaacaataattaaaattagaaaaataaataatgataaagacaagaattattttgatccccgactattttttattttacttcctaatacaattacccaattttttttcttcctatccaattgacaagttgaattaagtagtttataatctggttaagactaaaactatctatgtgaaaacttcctatattcttatggtaaaaagtttaatcacaaagaaagcattaagcaaaataactcataaaatcatacaaataatctaggtactttcgtcctaaattaatttgcatccataacaatcatagcatattcaaatttttctttttaaaattttgattcgaattcataaataacaattatagatgatcagtcaattattacaaaattaaatgagattgcatgaaattgaaataagcgacgaagatgaaattgaataattatattaatccataaaataaattcaagtggttcacataatattccttaaaagaaaattagctattataagtcattttaaaataataaaaatttaattaaaaatataaaaaatagagatagatgaaaaagaacactatttggagtcctccaatagtgtattctgatcctaaccttccttctatactccaaattggccttcaagttcgaatagaataaaaacttagctccttaccccctttaaatactaaaaaaaaacaaattaccaatgtcgcaacattgcttagaaagccgcagtattccaagcaggttttcaatttttattttctttgttgattcttggtttctcaattttctttctttcaaccaccaagggaatgtcacggcattgccttctaagctgcgacattgacgagcattttcctattttcttcattttcacttcatttttggaaagtacccacttttgactatagaccatgaattttggagccatttttatctcaaaaaggcttgaagagcaccaaaataaccaaaaacggagatctcccaatatttctcctaaaaacaaacaaaaacaaaaactaatcataaatccaaataataaagtgaaaaatacttaaacacacactaaaatagactgtaaaaatgcatagaaataaacataacacatggtcaaatgcaaacaagttgtaacactacttactcaatacttcaagttgtatgcatctcagtcaccaaaaatagatgcaaaaagagccaaggtgagcaagattccttatgcaagttgtgttgggagtcttatgtactctatggtgtgttaaagacctgatttagctcatgctatgagtgtggtcaataggtacattttagaccctgatcctgaatattgggaagcactaaaatggacaatgagatacttgtacgttactctagacactggaattatgttaagtaaagagaaccagtttatggaagaaatcactaattatgtggactcagattttgtagaaaacctagacactagaagaagcctaacatgatttgtgttaactactctcgggggctgcatcagttggaaatctaacctgcaaaaattagtagccttgtcatcaacagaagttgaatacatggctgctacgtacattagccatcaaagaggctatatggcttaagtggttaacaaaggagttaggtttcatatttgaggatatcacaatttattgtgacaatcaaaatactttgcatctcatgaaaaatcaaatatttcatgagagatcaaagtacatcgatatcaagttaaatttcataagggggatattgtgtcatccaagaaggtgcaagtgaagaaaataagcacacatgataatcctacagatattttcgctaaaagtataactagagacaagtttaggcattgtctaaacttgctaagcattcaggacagttaatgtcctcactctttttggatcagggatcaagtgagtctaatcaggtagaattattgggattaaattcacttaacccctgtcaagtcagtagattcatcttaatgcttaccagttgaatctaaagaaaattgttattagctataatagttagctttggcaccaacttaaagagagcctcatcaacacctataaatacatgtgcctcaactctctcaaatgatctccaaggctcatacttcagaattcatagtcaagtttagagaaagagtccaagatcacaatgagtgtgtgtgtggaggaatgtaatggtagtgtcactcttgaagtaatttctttcagtgtaatatatttctttataattgttcactgtgctgagttgtaatcttggatatatctgattgtttactactgattattcttaatcaataaagatacatgattcattcattctcgagctaagttaattctgcctagtttcatctagttccgttttgattttttgatcggttctaatctgaatttttaatcaataaaaactattttggtatatttctaaatatgcctatcaacctgatttgtttcaaggcaaacacatatttgtacttttttttatatcaaaatacaattaaggtgccacatattatcaaagggaaatattattttggaacttgtattttgcaaaaattatcgattgaatcttctgttttgttaaatgataatttggaccttatatttttcaaaataatataaataatactctactcaatttttgtcaaaataaaatttaataataattcgacttgaatgtgttatgccaaactgtgcatctgtttgtactagaatataatttcaagttgactatattaaaaaaataatgaaaactgaattaagattgactatatatttgagactaaaactaaatttaataaataaattttatcaaacatctttcaaataattaaatttaagttttgaaacttcaataactaaaagcaatttggtctatttatataattttattgattaaatatgagttaagggcactaatctatattttgataaaacaaggataccatatgaacattattaaaataaatatagtaccaagtttgtatttcaataaagttgaggctactaattggacatttacctttattttaactctttttttttagtgtatacactacctatgaaagtgattctatcgaattaaaatatctcaaattctcaagtttcttcaatcaatatatatgtggaacatttttcatttatttatatacatataggttagggtaattatatggtaggtcctagtatttttaccctatattataagaaagaaaattgaaccaataagaattgaaagaaaaatgattgcataaagtgtttgtttaatgaggtgtatgagattattacaatattttgtattattttttttattattactttacattatgattgttgcccctaattttgcccaatatatgtggaccaatcagacagggacacgtggatcaag

SEQ ID NO: 15633 - DNA, 6019 bp, Cannabis sativa
gttgaaggttctattcctatggaccttcactctttgttaattgtcgatttggttgattaataaaattgaaactttttcaaaaataaaaaaaaaaaattctgaaagagattgtttgaaactgtaaattatttttacattatttcaaaatttgtgaaatttattttaaataactacaatatataaattgttatgtaaaaaaaattaaaattagaaagtagaaagtagtcgggaaaaataaaaaacatatatcaggtagagtgtggaaagaatcatgaattttcattttaaaactaattggtgatgaataaagtaacttatattttgatataacactcaatatttttacatttaatacatgtggaacaatattatccattaaatgatataattctcctatgaagataaaaaataattgaacaaaaaatcatcctaattttctatatctaattaatttttttaattcattaaaagattaattaatataattgcaaaaaatatagtgtatacttaaaaaatacttaagatcatatataattaatgacaattaattatatcccaacatttttcacaacctccactaaacacaattctaccatttgccggattatttagtgtaatatatgactaattaatttatttagtttggcttacaattatatgtacagtcaaatattttccataagattatgctataagtttaaatatgtaattaatattactttttttataatacgatttctgtcctaattaataccaaacatgtatattatatatatttcaaatccgtaggacctatatataatgatacttttgtcatttatcagctgagtttactttttaagtttggaatttatgggaagaccaagacttcatgatcatcatataagtccaggaatgaaatttaagatttttcaatatgaataatatattcttattcatatataggttgtgaattgagttgtcacattaattaaatttaaaacttaaaaagctattcaccacacatatcattctcaaacacaatcgtaatgaagatcacatatatgaattaatgcatggattaattcagatcacttattgttctatcatgttgtaacattttgtgataaggcacatgacttgtctctatccatattttcttatctcttaattaattatctccctaatcagttgcactaaggtttgttaactaattcctattaataggtaagcataagtcatcccaaattgtaaaacataaaacaactacatataatattagcttgtaattagctagtcatatgatgggatcatcaatgctttgcttcaattcctagagttttgcaataggctcaactagggaactagggataaaataattacaaggttggcttaaaaggattaatcggtctaaaaaaaatttactagactatcttcaaaaacatgcatcatttatgattccaccttaaatagcaagtaaacaatttctcgaatgaattcctccatcattccacttttctatttagcatgtataaacaacactcaaataatcaaaatttaccaagtatggtatcgtattcatttttatggacgatttaaatttaaatcacaatgcaatcttaccaattaattagatccaacaattgcaaaaaatttcttacaatcatgttacatactcctagtattaatatatcattggctcataaagtgacaacttgactcataaaaaccaactaacatagtatttacgagacataaaaacacaaatacaactaaatacatgacaaatatcacgaacaaaaagaaaactaaatataaataaaaaaataagaaagatccccccaaagcttattaaacacattgttctcaatgtgcaaataaattaaaaggaaagaacacttacctgagaccccttccaagtatatcaaaatggtggtggtggcggcgcgtccatgtgaaattttggaaagaaattcaaactagaccatatttaaagtagacatagatttcatacgaggtggctctaaaaaatgtaataggagtacttttttaaactaaaaataaaattggattgcctctcaagaacgctttatttaacatatccaacttgacactcacttttttataaaaactcaacttagatcaagtctaccctgatcatccttgagtgttaatgtatcaaatagggaaaaccttgttttattgttgagaatattacaattatatatccacaatatcatcaaaaccttcaaacttcccacaaaacaagcttttcattcgatgtcgagtaggacgaaattgttctttggtcttcttcttctttcgaccatttattatttgacactcattcaccacctcaattctacaaaaagtaggaatatctattgcttcaaaggcattaaatgtcacctcttcatattgaaactacctggatctttgagcttgggacgtagtttcttttacaagattaggttgcactcctaaacaatttctactgtttcatattcctccaatttttttctttgatagaattttcttcaaaattttttgataagttggtattttctcaagtgcctcagcaaaggggatattgatatgcaacttcttgaatacttctaagaacttgaaaaactacttatcaagattatttttatgaagcctttaaggatatagaatctttggtgtagggtcttcatatttaggtttctccttcttgaaaatgtcttcggtatccttttcttttgttggaatagtgacatgttgatcatctatcttcttttccttgtcttccactttaacctttgactttggattaactggctcgtccaactctttaccacttcttagagtgattacattacatcgttctctaggatttacctcaatagtgctaggcaaagtcccttgattgcgtttagacaaaaattttataatttgacccatttgaatctctaagttactaatggatgatcttgtttcactcataaattggttaattgtgtcagaagatagttcatttttggtcacttgagaaggtggtggtgtttgttgagaattggtggtctttgagcttcataatagtgtctaggattaagcccatatgttggttaagggggtggattttgtgggtatgtttgttgttttcttcagtatcctatgctctaatatatatgttcagttttcctctgttgttccagtgttattttttagttctggttatttttatttttgatgtagtcttgccctgcatgttctcttgttgtgccccaaccctcacatttgctgcatttattatgttgtttctttttccagccagcttccatcctctatttttttggtcttccagctttcaccctttcaataggaggcaagactattacgtctttcacattttatggtacatttaaatcactttggtatcccattgtgtacactgttccttcataacttgctagccagtttttcttggtgtagtaatttaaacaaagcttgtgtagtaacctgttacatgtgcatgttctctatttgagctttattgtctatgattattttattctggttgcctgaaatacatattcaatggttcatttaacctgtgtaatttgaaatcagcatttgttaacatacgaaacatcagtggaataacccaaaaataatattagaaaaatcatgacaaccctcgtattattatatatgtttaagaatttaaagtgctcaaacaacaggttaaaagaattttgagatctatgtttgagcatcatttgtaatttcggatttaaaagaatttgagtggatttaagcttctaacctttttgatctgttgatttttgttattcacgaagcttttgggtgttgatttgatgttgattttaatgtttctattttatgtcgccagaattagtggttgttttccggctgttttggtaatattgttgtgatagttttgtccgtaggtgtggaaaatagaggtctcatttgtgatttacagtatgtactgtataaagaaaaaaaaaagagagtcgggacaatattttcgaaaattttatcgtgtggcagtataaatataaaccttacaaattcaatatttttataaaaaacccttatttaatttttcccacaataacatataatttatactatattcttttttccattttttattttttaagttaggtactcatcactacatgacaaataaaaaattacaattatttttatgaagaaacattaattagattaataataaaacaaaataagctatatacagtaactatgtatcaatttagtgtatctatataattactacattacccctgacattattttggagctgcagaaaagtcaaattaatatatgtcacaaaagtgtgataaataattatatataatgcttctaattggtcagtcttggcgacttacattgtcctccacatattataaaaatctctctctctttatatataattaaaatatctctctttatatattaattataaatatacatataatatagacttgtttcttcacaattttcttacaaattataaatattttattattgctgtattcgttttttgagaatttaataatctcagagctactccatattcatcaactctccttgaagtatattatcagaaacttaatttgtaagaaagtaaatataagagctttaatctcaattaattaacttaatttctgcagttgttttttctgattatttattcttgaatatttttaattatatttttgcaggtgtctaattttatcttcaaagggtctttcatatatctcagctacatgttcattgacagatatttatgtaggtaagcttattatcttcttataaataaataaatttatagaatgggaaaatatcttaatttaacagaatttctttttttttttttcttaaatttatgttctttattatctaattatatatcaaatttactatatatcaaattcagaaattaatttaaaacacaatatacaatatttataataaaaaatatacgtacttactacttaatttattttgactcttaattatttaagaaaataaaaagagaaatatagcttataattattagagaaaaaacatatgagagaatatgattaaggatatatatcataactataatccagtagagtcttatgtctatatgtttgcactttcatgataaactgggttcttaaaaagatggatggatgactgactatctgaattcacattctctccccctttgatttgtttcaaatttgaatagaattcgccgaagccataatgttccttgaatgcttccgtagtccccataaactctactttcgtggtggaaacagcaactacggactgtaattgggccttccagcttatatagttttggtttatcaagaaaatataggaagtggttgatttctagtatctctgttcagtcagcatccacaaatccttttaactctaatcctcattttgctttctcgtaggttagaccataattccaagtgcccttcaagtatctcaataactatttaagggccttcaaatgttcactgctcagatcggacatgaattgacttacaatgcttagagcatgagctatatttggtctggtgctcaccatcacatacattaaacatcataagaccatagcatatggtacatccttcatctcctctttctcctttgaattgttaggacattgttccttcgataaaatgaactatccccctaatggaacggatgtactctttgcatcttccatgttgaacttttggataactttcttgatgaacctagaccgcttcaagctaatggtcccttccttccagttccttgaaacctcgatacaaagtatcttttgaactggcccaagctccttcatctcaaattttctttgaagcttggctttgatacttttaatcatagatctatccttgctcatgatgatcatatcatccacatataacaataagatgacaactgtagattgctttagattcttgaaatacaagcggtgatcatatgctgattgtttaaa

SEQ ID NO: 15634 - DNA, 6907 bp, Cannabis sativa
  modified_base (1215)..(1224): a, c, t, g, unknown or other
  modified_base (1326)..(1326): a, c, t, g, unknown or other
  modified_base (4273)..(4287): a, c, t, g, unknown or other
  modified_base (4860)..(4861): a, c, t, g, unknown or other
  modified_base (6731)..(6747): a, c, t, g, unknown or other
ccatgagcttctacccaataccttgcttccgccatatttacttcttgccatataccattggctggccaatctctgatgtttaaaagcaacccgtttaccagccacggtctctgcttgaggataaagcttttgtcttcctcattatcaaagaagaaaccccatataccatcacgggcacttagagtcttcattttccaatttccttttaaccgccatatcccccctagtatttcttaactttgctcttggacaggctccttcttccaaagatttttgctaacacgcctttcttcacgatgtcatcactaagctcgaagtccgcttccagttccatggacatggaatccaagaactgttgtcgaacagcttccatctcagcatcttcttcattcactccgtcaagagtatcttcgtgagtccccatcagtgggcttgccaccacctctccatctaattaagatcggttccgtcatctccacttcccttgaaccacccgtaggatgattctctgtcgtctcagaacacattcctctaactttctggccacccttctccataaggaataacgaactaaccacgaacaatatcgcgaatgcctctgtagaactaagaaatcttagaaagttgatatctcaacacctcaccatgggagcaaaagttttactattaattcgtactccatattttcttatataagagcttaaattcgtactccatatttttatatttttattacaattgatgagctaaatactctatagttttaatttcttttatctcttttttcaataatagttatacacaatcatataaataataattttaattagagttttttgtgactaaatcctcttaattaaggctgaacccaaacctgcccaccaatctagccaaaattaatattttttttattatatatataatacattaaaaataaaagtatataatatattatataatatagtttggaatttcttagattgacttttttattttaaatttgaaattattgccttttatttttattttaatctaacaaatatagactgtggtgttataactactgaaacttatttaccaggatctacattcaccatcagtatgttttattaacaccctaaatatgagatttctaaaacaatgaaataaacacatataaagtttagaaaactttacattgatagcagggaaataatgtctccttccgctcagatnnnnnnnnnntgttcctttctgtcgcagagtaataataagatctgagcatggatctccttctctccttcgatttggttaaccaccgtcttttgcactatgattgagtacttnacttgctatgtgtgggcatgacagtttatcactaaaggcttgaatattgatggaagaacaacaagaggagttcgaaatcactataaaggagtctctcatctactagttgtctgatagagttagaaaactaggtttagtagtttggttgagattgagttggatgagaatgagagcatcatgttccttttatagtatttcaactagggtttagaatttaattatatggattaaaaaagataaaataatgggcaaaattcaagctagtggtcggacatacatagtgggcctcactagttacaattttgtcactttatttcaaccatttatctttctttcaataatgtcatattttctaatttcaatcttataaatgtcaaaattagttatttaataattataattaattatcaaataaagttatcatttatttataaaattttcctataaatatgtaattgtgtagccattacgggatatagaatgagaaaatagaactttgattcaattagagattggcactatcttgaagagtacatttcgaagatttgtcctatctggaaaaggatccgttacctatcaattggtgcttttattgagagaatttatagtgaaaaattcactgtaataactctcaacaatggaagataaagagattgttcaactgatcaaatttatggagtcttttttcaagcagactttgaattctcaatttgagaagatgacgtttatgcttaagcgccatttcacatatatggatgaacgtcttcgattgataggtaacgggtcctattcgagacagggcaaatctctaaaatacatttttcgagacagtgccaatctctaattgtaccaaagttctattttctcattctatatcccataatagctacacaactacatatttacaagctttcacactatttacaaattactaataagcccttacactattttatagtgtaacaaacttgtggagagagaggttagagagagaacaaccaccattcgtggtgctcatttcgacagacgaaggtcagagattgttgtgttgattctaggcagactacggtccgccattaacgtcgatgaagaactcacaggagggaaaacaaaagagaaaggaagatagaatgtcgtggtggtttagggcggaagacgcacgaaagacgaaagcgagacggagtgagaagccgaagagagagtgggtgagatcattttgatcgttttcatccaaaaaaaagaaagattgatctacttcgatctgatatgatcgcatttaggaatttatttatttttataactttttttattaattttattaaaatttatattttttaaatatatataatatgaattttattttttatttattaaaataatattaatatgagatagactaataatatactaacatgtgtagcaatataagtctagttaatatttaataaataggtagtaatggaattaacaaaaatttaacttatgtagtatataagtgtaccaaattaaaaatatatagtatttatgcaataaataatctttaaaacaactacatgtaaatacttattttttattttgacaaataaatattattttgacaaataaatattactcattattaattatttattagctgtaaacatataagaagttagaactaagaaaatcaggacaagtacatattaaagttgatgtcttttttctttcaaaaagaaagttaatgtctttttttttctttttttttttttttttgcattattaaaaaaaagttgatgtttttttgccaaaaaaaaaagttgatatgtcttctctatatatgtaatcacgttctgtggtgttaaaacgggccacatattaataaactatacatttcataattgaaagctttcaaacaacatatttatcttttatattatatataaaatagttggtagaatagaaatatgaaactcccaaaacaaaaaactctagccttttgcatgattgcatgattgcatgattggtgtttttattgagattaccaatcgttaataagaaaaactagtaattctcactcatttcattctttgtcttttagtccaaatgattacataattttaaactgaacagtaataacaacttactaatgagcctattataacataatctataagaagttaatgcttatttatgagccataactagagcaactctaaagtgtaaaaaaatatgctgcatttgtatattttagtcttattgaactttaataatagtgcataaaaatggtataaatttagcacgtgattttattgtgcgaaaatttaacacaagatataatataaataaacattattttatatcacactaaataaacatatatagtgaattaattaaacaataagataagtgttacagtacacatgctatttatcttaattactactcaatataattttattccatatttttttcttggtaaagaacatgattgtattcttaaatcttcatataagatcttcgaattagagttaactttttttgttattgaacttgaatcaatagcgctgaaaaacacagagagaatatttaaaacaaaagcatgtaattaaaaacttctaataggataatgaaatcttctttagccattgcgtttattctttgtgtcattacaaagcagctctctgcccataacctttgcaaaccaagtaatttttatcaaataaatttcatggccaacatatttcacttacctaatctacattatttattaattattataaaatgtagtgaattgattaatgtaacctccaatcaaaaataataaattgattggggcaggtaacattatttattagttatattatctatatgtttttgttgctgttattatatacattatgggctcgtttggtacgttgtatttgtattgtattgtgttggattgtgttgtattgtattagtattattnnnnnnnnnnnnnnntttggtattgacttgtattaatatattgtattagtattatttaatcagggtctgggcccgggtctgggtctaagtttgggtccgggttcgaattcggatctggggtctgggatcgggtccgggtcgggatcggggtcctgtttcgagtcctgggtcggggtcggggtcggggtctggttccgggtccatgtccgggtccgagttcgggtccgggtttgggttcgggtttgggtccaggtccaagtccgggttcggggtttgggatcgggttcgggtcccggatttgggtccgggtccaaattcgagttcgggtttggggtctgggatcgggtccgagtccgggttcgggattagggtctaggtttggggtttgggtctaggtctcaggtccagattggaaattggtgctgaccccgagttctttgtaaatattataatacaagctaatacagagcatttattatgtattaaataatacaacatacattgtattaaaaattttagtcgtaataattaatacaatacattactttattcaaagatagtgttatttattatttaatacaatagganncttatacggcgtaccaaacgagccatatatgtttattaagtacataatgtatatcacaaatttcatagtatatattttatatccttgtaaccatttttattttagataaatttttaaaattcatctaacttataaattgaaaatgaataaaaagaaaattgaatatatatatatatatatatatatatataaataaagtttaggatggaagaagcttggcaagtcaccttatctccaaaacatttataaaacaaaattgtcattgtgtaattattgaaggctttatatataacttaaaattattcataaaaagtagaatcatcacacccaattaagtatgatctaacgatgatatttgtcttgtatttattctcatttaaatattaattacttttttatataaaaataaaactaataatgacacttagtaataactaatagctaacatgtgttaaaagagaaatgataaaaagtattagtggtgtatagcacttttttatgtgttattatcgctattggtctaattaaatattgtgtcccatataatttaatgtaataatttttagcgagtatccctagccaaatgcaaggcgatatatctaggtactattagtacccaataacaataatctagtatatattatgtgacttctagtaactcactattcatatatattcaagttttgtgggaaagctaaacatttgagtgtattaacaaatacccaatattttaagagctttcactgactttttttagattcatggatgatagttagaaattctatatgttaacaaaacgttgtaagaaaattattatatagagtgtaattaaattggtatattaattattacagaatttctaggtattgaagtaatacatcaaatagtactaaattaataataataaaacccattagattgtgtagtaattattgaaggttaacttgaaacaaccacaaactttatatgcaatattaaacaaaacgtttagtttcaatgataattcaacataatcatagaatttcaaaaaaaaaaatatatatatttaaagacaataaaaataattattagtcaccaataatcataatttatattattagtatacacattaaatcatattaatgacaaggtaaggtgaagagattctaacttcatcacaagtgagtttgcaaacaatatcatgccttgcttattcttacaataattaaaaaaataccaaacaataacttatataccaaaatcatagcaattcaaaggaggagcaaccaatttaatatgagaataacatgtaacttaacaattaaaagttgagagaaaaatatatatacatgactaattagaagttgggataaaaatgataaacttcaccatccttctcttgctttataccttctcacacaatggatgcagccaataaaagaaacatggaattaataacatagatcccaattaatattcataaagctactatcttctaccacaggaaaagattttcctttttttgataaaaagatgaatattaatttctacctaaagtatttaatattgaactaaataacataaaatatggatcaattcatatacctttcatgctcctctctttttattcttgctatcgaataattatttaccaaactaaacaatgggcgaatgatcttatcaagacaattgatagtgatgatgcaaggttttcataaaattgatcgtaattggaggaattttgacaacacctaataaagataagagtataattatttaatgcaaataacgcgagtactcaacctaaaacggtgagtattcaaagaatagacacttagacgtactggaaaatataaataacacaaggaaagtatagtggttcagtcagatnnnnnnnnnnnnnnnnnactgttgcaaggatttctgtcttgtttatttcatattggatcactcatttatatacaaagcaagtgttatttgattatacagaacttgattaatcatcaatccgtttttacattgaatatcaacattaaatcaataaaaacgtaaatataataaatgaag

SEQ ID NO: 15635 - DNA, 1229 bp, Cannabis sativa
attcctcaacgtcaaaaaaattctaacaacaacttcaactaaatgatccataaaccgccagcgctataaaacatcaaaacaatgtgagaatactagatttattagttaagatcttccaataaaaaatgagcagctctaatatcaggaattttaatttgaacgggtttgttatgttattttttattgttctagtttgaataatggggtgtttttacccaatttttttttctttatattatccattttagttagctttttaattttgttgggttttaataaaaagttggagccaatatatcttctgtgaagatcgcacttgtctgcgtaatgtgtggcaatgatcagtgtgtttgaatgaaactattactacttattcatcactcaaagtgatctctccacacttttttcttcataattattttcttgtatcatgatcgtatatatatatcgatcagtctatttgttatatataaatattgattggtcatgtttcatcccacttaggcatgagacatgcatacatccttttctctcaaactagagttgagtacacttctttttctttggctctcctcataattatctcatctataataacatcaatacatagttatggacccaatatatataataataatgcaagtttctttgtcggatatattgaattgtttcaattaacatgtaaatacatacaatgcatatatatatatataaatagtgttatacattatgacaaaattgttgtcattattaagtactaatagttgtcttttggtggcaatctagctaaggtttccaatcccttttagtggtcgtagtgtgattaaaattattgccaatggagtatttccaatattgttctgtgggatgatattgtattatttacaaagaaaattaaggttggtgtttagttagagtgttaaaatttttttatcattataaaatatggaataacaagatctaattttataaataaacatattacatattattataaaaacataaatataaatttacagaaaatctttattgatttatagagaataattcaaatagtgataccaagagaaaattaaatgttatggctatcaaattggttcattattataaatcattatatgaatgaaactcttgttttaaagttttaaaaccacgtacctctaacttgaaatgactatcaacatacaatttaatactatattaaactttaatttatactaaaatattat

SEQ ID NO: 15636 - DNA, 4082 bp, Cannabis sativa
agtactactctcgcccaagcacgcttaactgcggagttctgatgggatccggtgcattagtgcaagtaagatcgcgcccatttcaatttagtgtcacttgacttgttctatgttcacctcttcaacttgcattgcacgccgtgcaacatcgatagggaagactgtgtctgtcttggtcaaaacaatctggtatttggtttgagatctgttgaacaagtattttacatcatcaaactcaaatgcttgcactattttttggaatttgcaaagttcacatgcagaattcgaaggtccagaaaatatgtttttaaatgtataatgtttccagcaaagtaatattctaccaggcatacgtgcatattccattaactcagttgaaaattcaataagtgaaataattattaataataatggtaaccatgagaataatttacaagtcagtctatgtacctttccattaagtcaatgagttcatgatcccttggcttcattccccattttgtatcaataaggagacatacccttctcaaaccaactcttgtggaaacatactccttcacctacaaattcaaaataacaaaagatgcgacgtcaactagcatatcttagatattttagattcactaataaatgaaagccattggtaaattttgaacaaaacaagcagtccactctaagacttgataagtaaatacaataaaatcaagcttttcagatgccttcatggtgtactaagggaagcaagatagacactgacagggcaaattagagtttcttatccaacagccatcaagagtcaagattacacttaattagccaatcattatgtaaatatgcaagaaggaataaaaagttcatttttgtttgtgcactcacaagctcttcccaggcatccttaacttcttcttttgcgtaagcaaacccatagcctggcaaatcaaccaagcacagctttgatcccaggtcgaagaaattaatagtctacagaaaagtcacaattgtcagatgtctgcaattaaaaggcaaggagaccaaagtccaacaccaaagtttctgaaaaggtttacacacctgagtgaggccaggtttgtcagatgtccgcacaacaccccactgtctagtaagggaatttagtagcgatgactttccaacatttgatcttcctaaatatgcaatcataagttactaatgttgtacactaaatattttaattgggtcttaaaatacaaagagaaaacaaacagacgtgaacaaaagaccacttcttaaagctgaagttctgtcaaataaacaaataaaagacagtacctgacaaactatagagtactgaattataatttgaatttcaaacagtcatcataatgttctatttttcttcagaatgttaccacaaccaaactcaaaatgtagccattgacagaataaaactgtaatattttatgagcagtaaagttcatggattgacatcaaaaataaataatcaccaaacactatttaacaaatcgagcaccaagaaaattttgaaatatctacctgcgaaggcaatctctggtaactcaggtggtggaaatgatgatgaagcctttgcagcggcaaaaaatgtcattttgttcctaaatatctgtacaaaatagttagcaccacccacaataatctagcaattcactcgtaatttactgtatggttgaacaactatggcatctattaagtgcatgcaacaacagagataggggatattgtctcaacatgaacatgcacaaaacgacatacagtttcttcaattcgttctctttccaggttagaagagaagggaatgttatccaaaggagccgaaagatcagtgttgtagcctgccctccgcagctcaatcatgcgtctacgacccaaaaactgttaatcaaattatcaaaaccaaaacatatataatgaaaaaacagaataaacaacttaaatagcataatcatcataagaataaggcataactaaattaaatccagagggagcaaacgtcagaaggacgcatacaaattacattatcttccacgtaggaaaggattgacgaactaggttggatggctcgaaattgtgcattctttgaaacttcagccggttcttccataacgtttttcttctcagttttactgtctggaaagcacgcacaaagggaaaaagttgtgagaaataaaaaatgtgacgacatatgatagcatatcacaaaagttaaggtaagttaagttaccacagaagatttttatccaaaacactaaaaatagagcatgtaatgatgtaaagagaaaaaaatactaaaaaaacaatgaactcatatatgatgataaaagatataaatagcagaatgatagtacacggtccaaaacatctagttctaacaaaaagaattgaattagtgaggtacaaaaataccccaaaacaatgcatatgagatatcacatacacattgaactagatatatattacgataaaaacttaccaacattcacaagactattgtccacctccaccagcctcttatttgagatatcatgtggatctatccgaatgacccgttttgacttctttggctgctcatctagaacctccaagtcttcagcttggttcttcttgtctttaccccatttcttggttgaatttgaggaatacatatcttgagactttttcttatcaatcccctttgtccgagctacatgagaaattcgttcattttccactgtgttcttagctttatgagaagaaactttagcttcagaactggtatcctccaacttactagaaacccacattgagcgaggagatacattcttcccctttgctctaacaacctcatctttcccctggctctgccatttctttgacaaaggttttctattaggtctatctacattgccatcaaatactacctccccaccagtttctcggtcagcatagattctctttctagttttatcaaaactagagttcctcacaccaccatcctcatcaaagactttcttccttgttttatcataactaaatttcctcaaaccaccatcatcattgtaacttctcttccttgttttatcagaactaaagttcctcataccaccatcctcattggaggatcccctcctttgtttattagagctaaagtttctcataccaccatcctcattgcggcttcccctccttggtttatcaaaactaaagtttctcataccaccatcctcattgtggcttcccctccttggtttatcagaactaaagttcttcataccaccatcctcattgtcactacgagttctttgagtctttttctttgtatcttttgtactattgaattttaaacccgaaattttgagcttcttagagagcttacttctcgaagctacatcctcaaacatcctatactactgtttcaaaaaagaaaaaatcttagagccctgaaactacaaaactccagagagggaaaaaaacagagtaaaaatcttttggcatacttgatattagcaaaagctaatcattgaatccagtttatgtacataaatataataaatgcagagatactattacttgcatttaattgagcattttttatttcatgatttttcaaataatgagtcaatataaagcttaaagcataaaaccatgccgctcaattgaagtgagcaacttttatgccataacatgcatagaaaatctaaaacatttcaattacacattagttttcttcttcaaaagcaagttttcctatgaaccaaacagatacttaaagaagaaaacacagacgtaatacaaagttaaaagtgagactgtggagagcaagttcgagagcaatacttcataaacaaaggaaacatatgaataagagaggaatggaaatacctgtagcacaacagtaatgtcgtttggtttgacttcgctcagaaatggcttcaaaagcacttcatttgccgccctccataactgttctgttcttgctgccctaagaagacgaagacgccaccgaaaaaaattgagaaaatgggctgatattggttttatgggccaactaactaaacccaacggctctaaagagccactaaataaat

SEQ ID NO: 15637 - DNA, 4644 bp, Cannabis sativa
actaaaaaattatttcgggtactaaaatagaaagaaatgtatcagtatatcccttttaagagtgtgcatatcgaatttccgtaatttatattattcagataatttgttataacagcaaaacaaattcaggtagggtagcaaaactttacaagatttatagttcttccaaaaaaaaaaaaaaaatccatttattgtttttttaggagagactgagtattgattaatgactatacaattttatagtgttattggtactgtggcatgatctgttggctaacatattacggtggcttcaacaaaaaccgccacgtcatttagaatcttattcaacataacaacttcccctgatgccacgtgtcgcctaccaaaaggcgccgctggtaaaaactccaaaaataccaaaaccaaaaccagtcattaggagaacactggttttaagctctggttttccaattggacaaccaacacatctattttcttaatctggtattgattttcttttggcaaccatgatctggtttccacatttccattttaatttttgggattcagataatctggttttaattttgtatccaacaagtatggtattattataatatgctttgggacccatttgacaatttagtacaacttggatttttttttattgctttttaattgtaaattagtctttctacagttctataaatacccctttttcccaactttgttactcactacaatcatttaagttaattgaagaaaaaaaaacttttactttcacagtcattttctgagaagaaaaaaagaagaagaaggagccatgtctagcacaactgggcaggtcattaagtgcaaaggtcagtacttttatttatttatctgtattattcatggtttctcttatttcttcttgtgatcaattgtgatcaattttcattttttttttatttttttatttacttgatgatcaatctaactatcttaatgttgattttgcaatcaaatatatttgtataattagttgcaggaattaatttctgttagctctaatcactgattctgactcactgaaaatctaattagtaattaaaaaaaattaccactttcccttttctagataatacgtcatcctcttttattaatattattattatttttttttttataaaaaaaaagatattgttttttttttcgaatgagaaaagaatgttggagatctacacaaatggcaatcttctattaagttaaagcctagattttgcagaaaattgtcttggtatcatggtactagatgtaatattgcaaatggtatataatttaatattttcacttgttttactttaataaaacatagctaactaattataatagttagacatggtgactcgtagcaatgcttcttttttatattttttaatattaaaatattaataatattgtgtgtggggtgaactatttcagctgctgtggctggggaagcagggaagccactggtaattgaagaagttgaagtggcaccaccacaggctaatgaagttcgtttgaagatcctctttacctctctttgccacactgatgtttatttctgggaagccaaggtaaattaaatatacatacatatatatatacatatatatatatttattggtttttgaattctgaatgacatttagattaaatggtactattcgtattataattcttaatacaatttggttctatttttgcagggtcaaacaccaatgtttcctcggatatttggtcacgaggcaggagggtacgttacaaaaaatctctaaataaaatgccaaagaaattatcaattttcgtacatgttttatttttaatcataatgagtgacttacttaatatttgttatgcagaattgttgagagtgttggtgagggtgtcactgagcttaagccaggtgaccatgttctgcctgtgttcactggggagtgcggggattgccgccactgcaagtcgaccgagagcaacatgtgtgatctcctaaggatcaacactgacagaggtgttatgctcaatgatgggaagacaagattctccaagaatggtcagcccatttaccattttgttgggacctctaccttcagtgagtacactgttgttcattctggatgtgttgccaagatcaaccctgccgccccactcgacaaagtttgcgtccttagctgtggaatttgcacaggttcgaatcaacatatagaacgtatttgaggcagggcccggtcctgctgtctgaccgagtgggccctaggcgcaggcctagtctactttagttcaagatcggccttgattagacaaagcatgttttgatttgagttttgataaatttggtgttttttcgctttgtaggtcttggtgccactttgaatgttgctaagccaacaaagggttctagtgttgccattttcggattgggtgctgttggtcttgctgtaagttattcatatcttgttaaatgttaatttggttttgtttaagggtttgtgagagtgtcatgatactaaatttcctttttcttttaggctgccgaaggagcaaggattgctggcgctgcaaggatcatcggtgttgatttgaactcgaaccgattcgaaggaggtgtgaagttgttaaaggctgtttttttttttaataagttgttaaaggctgttgagtctgcattattatgcataattttcaattgttgattttgttatctattcttattaattgcagccaaaaagtttggagtcaatgagtttgtgaatccgaaagatcataacaaaccagttcaagaggtcattgctgatatgaccgacggaggagtggaccggagtgtggaatgtaccggaagtgtccaggccatgatctctgcctttgaatgtgttcatgatgtaattacttgaccaaacttcaaattcttatactgcattattacattggttattgaaagatttaacaatttgtgttttttgttttcggttagggatggggtgttgctgttctagttggtgtgccaaacaaagatgatgcattcaagacacatccagtgaacttcttaaacgagaggactctaaagggtaccttctacggtaactacaaaccccgctccgatcttcccggtgttgtggaacagtacatgaacaaggtaaacttctttgctttggaatgaattttatatacataacttgaagtggggttgaactaaaattagccagaaattgcttaaactagacttttggggaccataattgtatatggaatttgtgtggcttaggtgagctttaaataactatgaagcaaaagagccttttttcttttaattccttccaaggaaacatatgctatttttggtacatatttttatgtttggttttgatatttgcaggagttggaaatagagaaattcataactcacacagtcccattctctgagatcaacaaggcatttgagtacatgctgaaaggggagtcaatcaggtgcatcatccgcatggaagagtagtgtgttgctcagatcagatgtgttccaatggatcagatgttgagttgtgttaataatcgaagccatcagggagttttatatgttcagctaaaataaataaataaatgtgtttatgcactttcgagtttgtcttgtcacttgtgtcaaaaaaaaaggtactccttttacagtaataatattataaacttttatctttttgttctgttattaccttaaaatttaataaggtgtatgggtttttattttaaaattaattatagagaagtagtttattgatcttatatatgatatttaatttttatatattgtcgtagaattctttaacatccatctcaagattgtggttatttttatgattactaattttgcacgacttgattgcaagtagtttttttggctgacaatggctctttttgactcactatcttcgaattacaatcagttcttttggctcgtctttttagattgtttttttttttggatttggatcggttacttattggagtttagtttgattctaataccaagttaagactatcagacaccatctatttttcaattactatgctattgtttgttttaggtctaagtcttcacgaatttgtttttgaggcaccatcccaaaaggcttcattctaaattagaaaggaccacattgcttccactgagacgattagatatctaaatcttgaacaaccactcaagaatttatttctaactctcttggaaaattgcaaatcgaatttctcgattctaacactcaagatcctctttaagtaagctagatgaatttcttcaacagttagattttgttgaccttgcttttagccaacgaaaatgagtctagtaataagcgataagaaatatgatttatgtataatataagcaactaaataaagaacacaaggttgttaaagaggttcgaccccgttcagttcggtaatagcctactccctttgattcgtattaacttaagagcagagaacacagtgtttcctctcttgaagctctcacaatgaaatctcagagtatgctctcttagatctcttttttgtaattctttcgacccccttaccagtgacaatggatcactatttacatggctacatgcttgagggaaggttttccttttgcttacaatgtctata

SEQ ID NO: 15638 - DNA, 6449 bp, Cannabis sativa
acacacacacactcacttgatttggaactgaatatatggccactgattgcctccttgtcagcttctggacctgcatattaagcctctttggaatactatctttcagtggagtcaaaatatcattgtattgcttctccaatgcttttatgattgctcgttctacattcgccaccgtctagccaatacagaaaaaaaaaattaaaatattatttttttgaacaaaactgaataatattgttattatattattcgtaggcaaaaacaaaacttacattttctaaaaccaaggagtactgaggccaccggttgattacaacttcatattgaatgacaagttctctcatcttctcatacattttctcagcaaatggggaggtggaatggttggttgacactccagaccatggaacctacagtaattaccatttacatcatttttatactacctctcttttactatgctctttggctgagacagtatgaattcttatgtcaataaaaatgctatactgtaaagggcataactaggtattaatttgtagatggataccttttctgctttgcaaagatcaaggaggtgaagttccatatcctgtacccacaccattatataattgtggaaaagatttcttgagtctatacctccctgcactggactgaagcaaacaacaaaataatctcaaaacgcatttacttgtatactactacgcagaagcactctattccacaattctggttacgtcttttcaaatactgaaaatttcacaaacctgatattccacaattcaagattcctttcaaaatcagcagtagccaccagaagctcatttacatgtggctgtggactggatggaggccatgaagctagaaaagctcgaagtcggttagacaactcggtgctgtaaacagcagctgttatgttggtcaggtcaattgagctgaaaagtgcaacatgacagaagtctaatgagattattcacttaaaaaagataccagctagataacatattttgtaagtttgttacttggatacaaaaattttcagtacctgggaagtacatgctggttatggatcttgatgtcagcctgaatttcattaccaatattcgtacagagagtcttcatctttagatatgctgttgagatggtaatggaatccataacaaaaccttcaaagttggttgacataaattcatcggtctctaccatgtgagtacgacacctcttttttgctgctgtctgtaagaaaaatcatttagtttagtctttctatatatgctgcctgaatgaagcataacaatgttactcgacatgtctttatatctagaaatttatggttcagatatctttatgctcgtatccttatttgtcatcgttcaactcatttttctaacattcttattttttgtattttataattggttgagaatttgaatgcaatggaaaaatcaggaaagaaagcaaagtaaacaagtcattttttttctgaatgcatgtaacttccttggtttgtaattctatcctacagctaattttgcatcaacactaaaagtgatcgatatgctctacgttgcgataaccacaaattttatctggtgactatacctgaaaatagtttcgaagcatgttctgtgcttcgtgactaagtatgtcatgaaggaggctgtacacttgtacggcaggagctatagctggtgctgcagattcttggatcggtccatgcaagtcccttattcctgtgggagaatcttcatctaatgatttatagttctcaaaaacatttgctattaaactctcaatttgagtttcacagtctaagagtatgcttctctgcaagaaaataagatggaagaaagtagataaatatatgctattaaacaaacacacttatctgctttagatacataaaaacttgagctattctcaggcatttgcgtagaactatgtatattgagaagcaaaacaatagaaatagtttcaaagtagttggtaacttacagcattttcaatagaaagatacctacaattgatatttcgaaaaggagtttagatattggctttcaagaaaaaccgaagaaaatgattggtaggatattattgatatttcgaaaaggagtttagatattggctttcaagaaaaactgaagaaaatgattggtaggatattcaatttaaggaaaaattctcatggtgctacatctgtgataagtagatgagacaaatactacatattgcttgtctgttgtctttctaacttacagaagatgaatttctattgaacaaaatataaagaaacaaagtttgcatgaggtaatatacgtttgatggatttttagtagtcaggtaaagttggcctttgaagtattacctcttgccttgtcaaacatttatcgctcctggcctttattataggttcaagtagttcatgcactagctctaagcagtcttttgttggggttgccacattcatgacatgtgaaagatacctataaagagaaagtgagtgaatctgtaccgaaaggaaacaaaggaaaaaaattgctcaagtacaattttattagccaaatacctgagttttgtatatgagacagaaactccataatagtctgaaaattcagtcaacaaccacttccaaggtccgtgcagccataaattccttgagtgaaaattctgtgcgcgcatagctgcttccagcaacaaatcataagcaaaagtttctgcaactggtccgctctgttataaaatgaaacaaacatatgaagtttcaagccgatatttgatgcaacatttctcaatagtgatgaaattttgaagaacaacgaagtagttgggtcccctggattttcttagtcattaaaatgaagcatacctttacatgtgtagtctcatcatttgtgatagtactgccaatggaaagctgaatcttcccaatgcattcttgatcatcatggtgtatgggccaccaacgaattctatcattctgcataagaaagacacaaaatacaaatttacatgataacctcgtgtcaattgtaaacttttccaagtaggtgatggtagaagaagataacatacaggattatcagtcaaggatgaaattggaattgtagctcgacccaagactgatttttttgtgtcttggacttccaccagcagagcatctccttgactctctgggaaactgaaattcatcaatgtaagagattttcttcctttcaacacaaatgtatcaagaaactgtatatagagcttttgtagagtactaatctagaacatgtatcgttcaaaaaattctactattacagggcattcatgttttctttttcaatactaaacaagaaaaagaaaatgacatttatggatcgtattgttacttaagctaaaagacaatcaaatttcttcattcatgtttgctttttcaataataaacaagaaaaagaagatgacatttatggatcgtatcgttactcaagctaaaagacaatcaaatttcttcattcgtagaaatagaacctctcagcaagttcactaccaacagaaattttatttcataacatttttttaagatgaaaaacaaagaaaattcctcaatagcatattactgccccagatgagtaaaatgaaaacttacaacacatgataatcaccagttccagggtgcaaacaaatggccgagtctgaatccattttattattttctgtggcgctggtcagttgaaacaagcataattgtggctctgcacaaccataaaaagttaaatgttatgactttgcctagcaaaagttatttccttctccttttttattttggagcatgaagcttttcgttgggaagttgatgtttttttcccctttcttgtttcaagtacaccacaactatattatttctttctttctcctttttattttggggagagcatgaacatttttgttgggaagttcatgtttcttttcccctttcttgtttcaagtaaaccacaattaagatatcgacttcaaaactttgagcaacaataattaaaacaaacatttgcaagctctaaagaacaaaccttgtgatgaaacagacaatgaggcttttttcaaactactcacgccagtttttacaacattttgaacatactccatccctgcatgcatggagattgcaccccactgcgaatatgtcattttaagtttccgccttgttattacacgaatttttttcactgtcatacaccaaaaatcagcattaatttgtataagaaatacttcaggaatcaattcattctcaatttaaacatggttaccatatccatatgtaagagatagaggtgttaaaattttgttcaagattcttagtagtatttatttataaatttgagatctcaccttctactctaatttttcccacaactttctttgcctttggacacttttgttctgcattattggtatgcctgtcttctataggctgtgccccacgaggttgcaacaaataattgtgcagtctatacattgtcaaaaagacaaaaagtccctttagagtttgataaagaactatgaaactaaaacatatctatgattaaatcaaatacgaatgtcaagcatcaggcatagtgcaactaacccaaatgcatttcggagaaccatgcattcactaagaagaaactcaggagcttcagtgcagccacttgcccatgcctggaggcataatcgtatacaagcatcatacgcaatcaaagtttgccaggcatattgactgctgcaatgacataaggcatatccatgttgtcatgagaaagaacatttgagttgcttaaatctctcagtgtaaagtatttgtggcgaaatttcagactaatcaaactctcatgtagctctaagaaaacaattggaaggggccagaaatgatatggggtcccagctgactttccaaatttattaagataaacagagagaaagaaagagaatgcaaggagcgaatagacagatggtgatataccatgatgccgggtaaggaaaaaaaaattaaatacataaattaatatcgaaacatacactacaacaagtacatggaaaagtagataaaaccaacaaagcaaacatagtagaaaattataattggatataaatcgaaccttgtactataataagacgaatggtccatttggtttgccagcaaaacaggattatgcatcttcctctcctctcctggaaaagatttgtctactgatctgcagaattcagtcccgccaaaaaaaaatgaatttaactagatactaaaataagatatcctaaaatatcctagaatttacataatacaagcatgagaaaatgatagaagttcctttggcaatacctttccccaagttcagcagttctcagagaatctgacttgagatgttcatatccttccttattcgcatcaaaaccaactgattctcttgaaggacatgtcccattgtcagattggtcattttctgaaacgaagacttcaggagctcccatttcttgttgattgtccacctcagtactatttcttccatcatcacttggaccataaaatataggaggtgcacttggagttcccaagtcaactgaatctctaagcatactacattccctacttaatgtaccctaaaaatcaacaccagtattatcataagaatactaaacaatgccacctattctttttggttttactattaacacgttaattataacaagtaatcagaaagagaaatttaactaggcctaacaacttcaaatactcaaccaacgcaaacaactcttacttgacaatttctcaagtgaattcgtttctgaagatgatttgcagaacctggggtttcatttttatgaacactagttttcctgaaacccaattctccatctgtaaatcttctcaaattatcaggaacttcaatccggagactttgattcaacaaccctttattcaacgacgacccgttatggccttctaatccaatgttaacatttttcctcatcgaatacgaactaggtttgtaaccaaatatctcttcatcatcaaacaaatgcaccctttgcttcgaatcattgaaacccataagtgcttcttcgtaagaataagtgctatcggaaacagaagaaatgctttcaccgtcattgtcgtcgttttcttcttcgtcgtcgttttggaatgccgggacgaccaatgtactgcggggtacaggcagcaagccagagtggagtttgagtgggggcagagcatgggaagaaggggttaagctaccattgttattaaagatagaaggagatttgggaaatgggtctggggcagttctctctgctagaggagatctcacttttggtcgattatcttcagcttcagcttcagcttctgttccctgtaaaaaagaaaaccagagcaatatcaatacagcaagacagggcaaaacaattttgtcaatttatatatatatata

SEQ ID NO: 15639 - DNA, 4636 bp, Cannabis sativa
atattaccccaaccagtatttttataaaatgccctttaaaataccataataagtgtaatttcctctattcctcaacttatcccagtgcgggcctcacagcttcttctacgggtaaattctcaaatatgggctttaacagcaaggcccaatagaagaaattgagcccaatcagtctcacgcaccagcaaaggaaattgaactgaaaaaaaaaaaaaaaaaccgtaataggcctccgttctctctttccctgcgccgtcgcagcttcttcttgagtcacggttgcccaccggaccaccactcctccactccggcgccgtcgaggtcgaggtccacagttgccgagctttgccactgtaatccgatttcagcaccaattcaagccaaactctgtcattatttgccactcaaatttcagttcaggttttgttgaaattttgataatttttttgtgttattggcctgattttatattaaaaatttatctcggagcttacttgggaattagttggcatgcatgtgaattttgatgataagaaaatcagattttcttgctgaaatttggtggctatgaaatgagtttggagaaacattaggttgtggttgcttggagctaaatgaatttggctactggaatctagtgagattttcttgttcaaattttgaattgattagtgggtagtgctgagatatttttaattcaagaaaatttagaatttgggggcttattgatgttgcggtttggttgttttattgtaagtaccaaatcaggttgtaagcttgtttgtatggtggtgatagtttgaaagtctgcttgtgttttattgaagatcacttagaaaattattagaaaaattgagttgcataattgagattgtgaatgattgagattttggatacacattgattttgggttgatcgaggtggtgtcaaagtaattgcttacttggttactagtcaatactgaattatagaaatcatagacaataaattgtttgaatggaactaatcactcttgttcatgctatcttcattaataatcttaattactttggttatttttttataacaccaatattcattcgaattatacttatactacacacatatatggatttatatagtattttgttctttacatcgtaaggacattatgtaattggcctcaacatggttgggccctgtcccttctggcagattgtggaattcccgctgttggaatctgcttggcctacaacctcagtagcgcgcctcaacataattattttgctctcgagctaaattctccaatattctgatcgactctctgctatggacactgttagtgctaccatgttatacaatttcagaccagtaaagatcccaaccaacgaaattggtagaacccagtttctccaatcagtgtgcaaaccttttctgttaatacccagtattttttgttatcggaaacaccattttcgaagggcattgatcacttcgagtatggaagaaacagaaatggcggatagtaaagatgggttatcaagctttaaatgggtggaggttggtccccatcttacagaagcccagaaagaagctatctctcaactctcaccaaagatgacaaaacgttgcaaggctctaatgaagcagctcatttgcttttctactctccaagctagtttgtctgaattactaggtgcgtgggtaaagattatgaagcctcgccgagctgattggcttgttgttcttaagcaattgaaactcatggaccacccactttatcttgaggttttctcttcttctgtttaattccttatcaatttttccattatttacatttttttttcatgcttgataatggttactctgtttttattagtagtgatagattgaataagtatgtgcttggctttgtttttcagttgatctttgataagttgatattgtggagtttaactttttttaatgaaatcttttgagagagatggaggtagagagattattgaatgtttttttttttttgtatgttattgcgaggttacttacaggagaactagtatgcaaaaagtttaattgagtttttcaaagtttaactttacataaatttgtcatgtcttagaataagaactcacatgtcattgcactagtatattcttaagtatgcttatgtgaattttcttttgtgggttatgtttttattagataatggccttattctttgaaatttctctttttgaattgtgtactgtcatttgaagagatgttttagccacggagttgagttataataactataagaataatataataagctgcaaagtatgccaacttcccatgatgagattggtaaggagaagtttatataaaattggcacttataaagtttgattgagttaagttttaagcattttgaaattttatgctaacatctcaattttattgttcaatacatgcgcgtttaagcagttttaaaatgtccaactatttaatctgactgtcaaaatctatttcttgcacaatttctaggtggccagtctcgcgcttgtagaagattcttttgaagctaatattcgtgattatacaaagataatccatgggcatggaaaacgaaatcaacttatagatgctgaaaagacccttgcaaccatgagaagcagaggctttatatgtgatcaggtaatcttgaccacatttattcacatgtatagcaaggctggtaatcttgagttagctgaagaaacttttgaagaacttaagctgctcggagaaccattggacaaaagatcatatggctcaatgatcatggcctacataagagctggaatgccggagcagggagaggttttactgagagaaatggatgcccaagaaatttatgctggaagggaagtttacaaagcattactaagagcatattcattggctggtgacgcagaaggagctcaaagagtgtttgatgcaattcagctcgctgctatatctcctgaccataagttttgtggactccttataaatgcatatggagtatcaggtcaaagtgaaaaggcacgtgctgctttcgaaaacatgaggagagcaggtctcacacctagtgataaatgcatagcgctggtgatatctgcttatgaaagggagaataagcttcaaaaggcattagagtttttgatagtgttggagagagatggaataattattggaaaagaagcttcagaaacactggtgggatggtttaaaaatcttggagtagtgaaagaggttgatactgtcttgagagaattttctgtaaaagaggcgaattccaaatttcaggctacctaatttcaatcttcaaccacaatcttaaaggcaacatagcatatttgtttcctatttatttatggttcttttgactgccaggaatatagaaaatggtaagtgtagctctgaatgaaacacattgcataccaccattgaatttctcacaatttcttttatcatcagatactaaaatttaacaatctatataccaattcactagaacaggttcacttttgggccgtgggcccatataattgttcaaattattcaggtcacttgtccaactttggctaggtaaaatttatattatgttgcaaaggacaggagtggagtttataggctgggagcgctgcattctattatgtagatttacttacacttatttttcagtgagtttttctttctttttttctttcatgaagcattgactccaagtaacttatcataaagcactggaatgttaagaaccaaaaagtagcttgttgcttgatcaatttcttctggtgatttctgatacctcaacttttatacattcaattatactgctaaactctcaatcttttaaagggaccttcgtgtataatttatagtttagtagttattagttatttatagcaaggaagatgcccatagattgaaaagaaaatagtttcattatctctatatatggatagcatggattttcaacaacaacatgtgttgttcagcctctctactactctgtctaaaattaatagtagaaaggttcatcttcttcatggttgcagctgtgcattgcaagcctctcgacagatcaggaaagataggcatattctttttctcttaccccttcatttcatttttacctgtttcactcagacttaactttttaagtgataataatgatagtaataatagtaagtactgaatagttaacttttgtaaatctgcagcttgttgatgtttacttggatgcttttgccacccaaagacgtctcttattcgtttatttctcagtatattcttgaacttgagaacagacatgattggagcagaaggcaaaatattttcagcagaggattctgatagtgctgaatctgaaggtgctacaagaagaaaaataaagaaaggggccttctatgtctggacaagtaaagtggtatttttttctttttggaggactgtgggaaatgttcttatcatgatttatattcttgtctatatgaaatgtcacattttctgtcagtttatccaggctgcagcagctagctacttcatgttcttcaattcatcatcagcttaggtttgtaaagattttgtactttcgagatgtagctacttcgtccaagatcagttgatctgcattgatcataataattta

SEQ ID NO: 15640 - DNA, 3335 bp, Cannabis sativa
tcgaaattcgtcgattagaagatctccacgaatgcctaaatgagggagagttagtttacactatactctttttcttttgaccaagtttgttaccaaggtttgtattgaggtaattattatggacatttaaaggggagtattatgaaatattatttatggatgtccaaatcaccaaattaattatcaccattaatgtttgattgtattttcctttattacatattaatttaatttctcattcttttagtcaatgcttttgtataaacaactgagaaattctcatttactttctctttctctttcttctttcttctcatctattttattttattttataatatatgttttattttaataattttattttttttttaataatttctgaaaatacatattttaaattactcatgattttgattgtactacataatttaaattaagttatttacatttacaattttcctatttgaagttttattttgatgaactaaaaatttgtgattaattaggtataaattttaaaacatataaataagcttaaaaataaataaataaatatatattttaaaatataaataagtttaaaaaattatcgaaagctggtgggaatgtaaaaaatagaggtatgcataaaaaatctctaaataatttaagttaaatataataattaacaataacaacaacaagtatatataatttaagagatatatatgtaataaaacataataaaaacaagattaaaatattaagctatgatgaattgtatttttgtttgttcttattgtcccatgtgagcacgtgattcttccaagttaatagctcaaatactatttatttagaatccccaagacaaataactatttattctttttttcttcttaaaaaaaaaaaaaaaacaaaataattgatactatattgtgtaatgttatttattgcgatacagggattaaaccataagatcgttgacttagaatttaatgacttaatgcaaagatattttttctctcttgattcttttgcgtcagatgacatgagcttgtatattatatcttactcaattagcatttgtatattatatactaaactatcataaagaagaacaaagaaaaaaatccatcttttgtttttttttttataatgaaaaaaaaaaaaaatccatcttttgtagtgatagacttagtctagtaattctatatttcttttttttttttaaaaaaaagagagatcccaaattaaaatttttctttttaaatatataaaaaaaaaatccatcttttctcttcttttaatttctaaaaaaaaaaaacaataaaactcacctaaatcaaagttacattattacacttgttcaataaacaaaaagcacattattacacatatataattatttaggactatataatttttttatattaattatttatataaatttttttttattaattgtattattaatcttattgttattttttttaatagaagattaatctttattaaataacgacttctgctaccaagtaaggtagcaaatcatttagaacagactctaaattgaaacaacaattaaaatataagatagaagccttagcgaatgaatggatcactacattagttgaccgtttgacaaaatagacataaacattatgtaattagcaagtaagttcttacaatcttgaatgacaagtccagaaatcatgtttaacgaactttgaatagcttgtaccgtgcatagactataattggtttcaacatacacttatcaccaaccacgatctttaatccaactaagtgcctctcgaacaccaatagcctctgccaggaccggtcctactgagccaagggagagtttggtacgaccctttataagtatcacgagacatcacacacaacaatacacaaacaataacttcccccattatcaaacaaagttgcatccacattattcttgatactattagcttgaggtaaagtccagtactcaaatacatcacctgtgtgagagaaagaccatggcgatttcaacttggaactttgagcacgtctctaatgttcaagataacgatttgcaaatacaaccatgtccacatccttcaccaccttcccattccaaactagatcatttcttgtaccccaaatggcccaacacactgctgccaccctgcaatttagattagcaaaccccttgctaaacaccactgcgcaccagttgcttcttgcaggtacttttaatttagcaattgaatgaaaccctagtctctttattttctctgcatctctctattctttattggttattcttctcaaataattgttatggtatcagagttaagtttatgagagtgcatttcttaaatgtaatcacagttttcgtaggcatccgtacaacatttgtatagttagacattctaattttcggtattgatttcttcaaattttggtattgatttattcgtacagttcaacattccagtatcaattttgtatttggaaatttttgcaatgtgtttatttctgcaatggctacaataaaggtgattcctttcaagcgatcgtgtgagattggatgaaaagaattattcgtatttgaattatgttatgaaaaattttctgaaaagaaaaaagatgtggaattatatttttttaagaaaaaagaggaaacatgcagatggtaatgcagatctattagaaaatttgaaaattctcacctagataaataaaactgtcgaacaatctattggtacccaattagcaaagtacaagacaacaaaagaagtttgggaccatcttagattgtattcatagtctaattttgcaaagcaattttaattagaaattgatattagagctattgaacgaaagataggagcattcaagagttctattatgtaatgagagatcttaaggatccattggaactcaccaaattagaagaactacgtgcttttgcaccatatatttctcatagagaggaacaatgattcgttcaatttttaatggctcctcttagtgattttgagggacttcgtggttctatattgcatcattcactgcttccactagtcgattcaatagtaagtgaattgttagcagatgaaattcatcttaagtcttagtcaggaaaaggcattctcttaacaccaaattcttatatttcggcagtccttactacatcatttcctctagaagagaacaaacctcgcacaaaggttagtattaatgagtgttgcttttgtaaatagaaaggtcattagaaagatcaatgtcctaagcttgtgaatcgtgctctgcagcaatgaagatataactccaagcctcctaatatgggtaaccaacca

SEQ ID NO: 15641 - DNA, 9759 bp, Cannabis sativa
tttttttttttttttggattaattagaatcaaattcaaagtgcaacacctaaactaatcaatagagagcgcttttctcatatttcttttctctgctataaacactttttaattgttgacaatagtacacaacgggttatgtccacaaccttttttccattattaattctctttttggacatccttgtagagacagtgagaccccacctagcaaaatcgatcaactttattaaaattttatctagggatgcgatacccccctcatgtaaattaatttacagatcgatatatatgggtgtgtgtagtgtacatcgtacgacttcatgaagccataattatctcattgccgccgaatgattatgatttgacatcataatatatatttaaattctcttcattgatccctctagccatatatacactcacactcacactcactacttttatatttttgctcagcttgtatatgttataagagcacagaacaatttgcaaattgacatatgataatatttaataaattattaggatatgattcctgctcggtagtgtttatagtaatgacccagaaaaatgaaaaaaagttataagcagagagagatcttctgggctacaatatctaaagtggtcctccatatatatatatatatggagtcatgcatgcatgtatgtcagccttctagcttttggtcttcttcttctcacttgatgaccttctttcatggttggcattgaaacgtctccttttatctttcgtaagaataaaatctttgattttttcagagtttggtttgctgacttttcatacatatatatatatatatatttatttataaccaagagaaaaaaagaaaagagaatagatcgatgatgatgaggaccagagactgcatcatgtgtttccaaagttttttttataaacaatatatatagctttgtttgtataaccctcccccccaaaaatatttcttcaacttattttatatgagtttaataattactatttatatatatataaagtatatacgcaatcataagttaattaaacatcattatcataataataaggttttattattcatgtatcgtctgcaaatagcttataattcacgtgataagtttctgttatatatgataattattaaatatgattatatatagctggggaattagaattaacccaggtggatgaaatattttcgatcaatggtaatcattaagtaaaaaatatacattactaatcaatcaatccaataatggcttttgttcagaaaaaaaatccaataatggattcttatttattataaatattaaatatataataataatatatataatattttctttgaccacagtagagtgtcacctatataaactttacacaataatttaaataaagtggttttagatggtgatattagtgtaacttgatagagttatgatatttttgtctatatggcaagtggcatatatatatatatgctccatttaagaacatatatacccaatgatttgtgttagacggtttgattgctcgtcaaaggagttggtaagtactcaactattattagagtggtacatttatggtcatcatcatattctcacacagtcaacattttaatttgaccaaactagcttgtgtggctaataatctatatatttatattattatgctgtttttcattggtttattaaaatggataataataataataataataataataattaaagatggcttaaactaattaaaatcacttatacagaatgataaatagaacaaactgatattacaaatcaaactataaaaagatacacatacatagaaagaatcttagagaatagaagatgttgtttatatgaatgcaacaactattaagaaacatatatattattaaaatgtattaattaattttggtcacatattccgcaaacatggtatacatgattgtgatcataatttcatcatacttatatcgctagtaattaataaacacagaactagctagagagctagctaggtctaccaaattcgttaataatcataaataagaaaaaaaaaaaaaaagttgaatcctcaccaattttgataatcaattgggcattattataaaggactcttcttgaattgtagccaggatctgatacactgctgtcgctatttcgtccactgaactcaacttgcagtcatcttccacctgttcggtaatcatgtaataaaaaccaaattatattttaagtatagggactattttaccctcccaaataaaatattaagaaaattattattaatataaatataatatattgatatataattatttaattagttaccttaacactgattgaatataagataatttgatcttgggttgcgacattaagatgaagtactgtgagtcttaaattatgtaatccagataccattttcagcaactgctttgatcttttcttcgaccttattttcaggcttgcgtgactctccaccattgttacttcaatatcagcaatggccgaccttgacgattctccagccgccatggcttccatcactgagttattttcacactgagtagcggtattcgagctagtagtcgagtactgtgggaaggtgaagaactcagaaaacggcatattaagttcacggtcctctgagctctggttatgatcattattactttgatgatgatctttctgggcaccaagaaattgtacttgttgctctagctccttaacgaaatttatagcccctccaataatcgacgcttggtcaccctgaaatccaaaaacagaagaataaaaaaagactcatcagttttcattttctgtttggaaaagaaaaaaaatcgagagagagagagagattaaaatataagtaccctttggacgtaagagtcgggcattaaagagcgaagcacagagaggtattcgttcatttgtttccttctatttcgctcaacagcaatgtgagtcattctctggttttcaatgtcttctttgttctttctgcttctagaacgtcgtcgttttggtcgagtactagtcaacgttgtctgcgggaagcctgtcaaagcatcgaacggttgaaattcatccgtagtggcagtgttattattattaccgttggttgcatcaggagatggaatattggtggagttggagagatgaagttcgttaaagtgaggtaccatagaggaaggtgaggggttccaatccccataataaggagacgtagtactattttccgtttggttcccgagaaaatcaaatgagggagctgtagcatcagcttgatgatcataaatattaataatattattgttgttagtgtcgtcttcatcttcgtaactgacccagtttcctcctacaccgagcatggtatagagctctttattagaactataactaaaatatgatgggttttgtggaaaaacgacagcctctagtgccattttatatgtgtcgttttgatgagagatgggttttcactgggtagctaaagaaccatatgatgatgatgatgagagatgggaataaattaaatagagagagtttctatatatatagataaaggaaatttcgtttctggtgatatatttgggtggtttatatgagaaatttaaagacaggtttccccaaaacacaaaacagtaactagctactacagttcatgtcacacgtgaaataaagttaaaattattaatattattgccaaagaggaaaaaacatgtacaaaatattttgtgtcaccgtgctttcatcattatttttctctctctcttttaaattaattatcagttaccttttatttatttcaacaaaaaatatatacttgtaaagtataattttgtcaaatttataccctcaatgttaatgaagtgaagatttattatctgcggtatgcttaactaactatgttataatttgcaagaatcatatataacaaaaagggttcttaatataattgtgtttttttgaagatcaatcttcaaaataaaaattaatatttactataactatgttataatttgcaagaatcatatataataaaatttttaaaaaaatgttaactaagattaaaataattatacaacggtaactaattattatataattagtatcttgaataactaaatttcttaaattctggaaattaaaatatttacattgaggaatatagagaaaaagataaatagagaaggaaggagagtagggagtgacgttagaaacttggataatcttggcagtcatcaaaatacactgtaataaaaaagctaacgtcaaaattataaattaaatgcacttaaaagcactaaatgtaaatttttctttttttttttttttttttttatttcttcagttctaagtatacctaatattttttaatgtttccattcaaaaaaaaaaaaaataaaaaaaatttaatgttatatagtgatggaataaactttttttttttttagacattgtatatatttagtatttataatgacaaaaaggtctgtaaaagtgaaatattgtaaaaatattaggtatatgaattaaaataatcaagtataaaggtaaaatattttagcaaaaaaataaaataaaaataaaggtaaaatacaaaaaaatatgtaaaaaggtacaacattttgtattaggtattttagctgctacatactctctaaaaactcaggaagataaagataactccttattggattttttataaattactatggttaatgaatatattctgctaattaagttatgataaaatcattaaaagaaaagtatatatattattaaaatggaaagtatatggtagagaaagtataaataggtgagtatatgtatggagttctattttaaaactaattagtaataaaaagaatagttcatgtattatatatattgtatttagttttcatgtatatgaatgtggactctctaacattctctcacaaagctgttacggatttttgtatattagaatgcaaagtatatagttgagaaaataaaaatatgttagtgtatatatggagttccatatttataaaattaattatcaatacacataataattcatatattttatagtataaatgattgtctttgattcacgatcactcactcacttcctatatatgtagtagtagtgtgaatacaattttcagattaatttgattagttcgaaatacactatcctttgaacctatctaactgataagtcaacattatcttttggaagatactcaaaggttcaaacatttagatttgcgtattttttataacattatatataatgtaatcgatagacatgaggagacacaaccctttgtttttattgctaaaacaatattgagagactaatatttgtgaaaatagacaagcacatttatatatacaacatcaaacataaaatatttctacatatcgaaacggatataagtaatatattgatcgaaacaattttttttaagacctactactaattttttcagttaaaatagattagggaatactaatcagaagttatatttatattccataaatttataaatattatttaaaaaaaaaaaatcaaattaatttttaaaaatctatcttaacattttttaattttttcttaacttcagtaattattttaattttatttttatattttttcttaaaagagatgttcatcaatacaattcctaactggaacaatatagaattagacacaaagaattgtaaaagctctaagacattatgagctgaacctttttatttatatagggaaagattacatagaaagaggctgatgataacagaacgtaacaaactctgttatgacagagtacaagtggaaaaaaacaaactaacggtctgaacaacagaatacaaagtattggaaaagtttgttatttatcatcccccctcaagcgaaagggagtggagcacactttgagcttggatttgagatagagaaagcgatccgtggagagagctttagttaagatatcagctgtttgtcaattgatggcacataccgaacctcaacttctttggccagaatttgatctctcacaaagtggagatcaatctctatgtgcttcgatctagcgtgaaacactgggttggcagcaagagaggcagccccttggttgtcaacccatatgattggggcagcaggaagatgcacttgaagttcactcaaaacagaatgtagccacttgatctcagctgcagtattggctaaggcacgaaacttgctttcggtgctagatcgagcaactacttgttgcttctttgctgaccaagagatgaggttcccacctagaaaaatagcatagcctcctgttaatcttcgatcatccgggctactcgccatcgacatctgagtaggcttgtaaacagagtcttggagctggtcgaatgaggaggccttcatgtattgtacctttgagatatctcaataatctcttgcaagcatcccagtggacagtcgtaggggcatgaataaattgactcaatttattcacaatgaaagcaacatcgggtcgggttaaggtaaggtattgtaaggcccctaatgtgcttcgatagagcgtatgatcatcaaaaggttctccattagtgagagacaaaacatgacatgaacttgtggggctgggacatggtttggtgccatccattttgagcttagttaaaatctgcaatgtacttagattgagagagatagataccagatgtagttctatgtacttctaccctgagaaagtagtgtaatgaacccaaatcttttatatcaaactcatgattgagggctgttataacatcagatatagcattggggttgggaccgattattagtatgtcatctacatacactaacaacactagtagactgtgtccagagcctttaaagaacatacaatgccttgttcaacttgcaaacatgagtgggtttttcaactaattttgacagttgaaatcccttgctgtaaatggtagatttgagcttttgattccaggctcttggagcttgcttgagaccgtacaatgccttgttcaacttgcaaacatgagtgggtttttcaggatcaacaaaacccggtggctgcggcatatacacagtttcttcaagagtgccataaagaaaggcattggaaacatcaagttgtttgatcggccaattaaaggaggctgcaagagttatcaaaatttgaactgtggctggtttgaccactggacgaaatgtctctttgaaatcaattccaggagtttgagagtaccaaacttttgcaacaagacgagacttgtatttgtcaagtgatccatctgcattgagtttaattttatgaacccatttgttgcctactagtgtcatggaaggatggtatgggaccaaggtccaagtattattcttgattaaggcacggttttcagtttgcattgatgcaaaccacttgggatcggccagagcatgctttagatttgatggttctcgaggtaatagagattcgggtaaagggtaggaggtggcatgaaaagcttttggcttggtgattccagacttggatcgtgtttgcatggagtgagtgttttggctgttgttgggatttggggcagtgtttgggtcggattcatttttggtagatggtgtgggatgtatgtgatggtaagaggcagcaggcaaaccagtaacaacaactagtgggttcatatgatgagttgcagaagtagcagccacaccaggaccaatatctgatacttgtggcacactagtagaagggtcttgtgagacaccagtagcagcagctgagtcttgtaacacaccagaatatggtgtattttgtacctcaccagatgtgaaaattgaattagtaggcagtataggtgttgtaaaagttgcagtaggcataggtgaattatgagaaggctgtacctgatgtgaaatggcagatcgaagtccaggaaattcctcctcattaaattcaacattgcgagcaacatagagtctgccacttttatgttgacatagatatcccttgtgagccagagagtagccaagaaagatgcacttatcagacctgaaattcaacttatgagcattatatggtctgagataagggaagcttgcacaaccgaacggtttgaggaatgtgtagtcaggtgctttatgaaataagcactcaaagggagatatatctcctatcatagatgtaggcagcagattaatcacataagttgctgtctgaaatgcattccaccagtaagacaagtcaagtttggtttgagcaagtaatgtcaacccagtttcagtgatgtggtgatgctttctttcagcacgcccattttgttcatgatcatgtgggcaagggtgttgaaagtgaaccccatgttggtatagaaatttggccaaggaccgatattcacctccccaatcagattggacactttcaatgggaaaattaaactgtttttcagcaagtgttttgaactgaagaaaggtaggataggcttgagactttagggtaaggggaaagatccatgtatacctactatagtcatctagaaaatggatataatacctatacccttctttggatgggatgtgagagggaccccataagtccgtgtgtaccaattctaatggttgggatgctctagactcaaagagagagtatggtaacctataactctttccttgtttacatgcctcacaaaattgtaaggctttcaaatttggtgatatatgtaactggtggagaatcttggcaagagttcttggggcagagtgccctagtttcatatgccacaaatttatattagatttttgtaaagtaaaagcctgaacaaggagattgaaagatgaaaaattattctctttattgatagaagagtcattacatgaggtgatagctgatgtagcagctatattattattacaatctgattcttttcctgagctagagctaagagcggattctattgaaggcctaggtgcggatgtagcaagatgacagtgaagattgacttctggtgtgacaaaggatcgatgagacaatgtgtataagccgtttttaactctccccttgagaaaaacagtccctgtgaccttgtccttgacaaaacaacaggtagaatgaaattcaagaaagacatggttatctttagtgagttgaagaacactgataagatttttggtaatatgagggacttttaaaacagattgtaattttaaaggaagacgagaggagggtagagaaatgttatcaacatgggaaatggcaagtttcttgccattgccaacggtgagagcatcaggtcccgagtatgccatttcagaatctaattgttccattccttgtgcaatatgatttgtagccccagtatcggcataccaatcgtaatcatcaaggaattcaggtacagtgttcgaggagtaagcctgaggattgtcatgttcatcaatttcagtcagaaaggccttcgagtctcccatcaaaggagtgacaaaacctttgtcgaatctgtaatggcagacggctgctgtgtgtccaggcttgtgacacacttgacacagcagtcgtgtaattgaaggaggaccacttctttgattttttgcagggacatggttcatgttaccataggctcctcttggttgggaattatagaaccgatgtggtgcaccagaagcatttcttggattgttaatgctgagattggcagtgatcttggaggaaagatcattgacattaaagtgctctcatgggttagtagtaac

SEQ ID NO: 15642 - DNA, 18519 bp, Cannabis sativa
  modified_base (3976)..(3988): a, c, t, g, unknown or other
  modified_base (4232)..(4235): a, c, t, g, unknown or other
  modified_base (17428)..(17430): a, c, t, g, unknown or other
  modified_base (17457)..(17463): a, c, t, g, unknown or other
  modified_base (18462)..(18469): a, c, t, g, unknown or other
ttttgcaaccttaaattattatgaagtaaattattataatgtcaatattacatcttatatgctatttacgtgcggagcacgtaaagctacactagtatatatatatatatatatttatatatattcttgggtctgattaggatccactaattaaatattcattttccatacaattacattatgatatatgtatttgataataattttaaaatataagtgcattctaaaattaaaagaaaattttcagttctacactaattagccaactcatttcatgtgtaccttatcaagcttcttttttttttttatagaacactactataagataagtagtgtcttatactatcattatatcattatgtacctaacattttacaattggttaacaaattttcattgggcaacaattttcgtatacatatgaaacataagtactcataataattaaatgaatagaataaggttataattacaagaaaaacaaaagtacaataattaaatataatagtggactattctatatggtgagaccttaaattcaagggatagtgtaattggtacaattaatagtggaagtattcatatgaattaattatgatgaattgacctttttcattgattaaaaccaacaaaacctagtttaatctttatcatttagtgatcatcacaatcactattgagactaataattgaaatcaaatcataaaagaattggaagaatttcttccatccataatgtttaattattgtctaaccttatgatcaacattatccacatgtgataattaatattaatataatagtcaaaatgagaaagagatgtcattaacaagtaaaaacaaatttgtgattatataactcttagtccaattactaatgtgttgtaattaaaaaaaaagtacaacaaattaacacaaacataaatagctaacttaatttatatttgtgtttaaggatgtttttatagttcaccctctaaaaatggatatattgatgtatcccatcgtatttttgatacttaaatagttataatttcaatttttttttataaaacagtataaggaaattttaaaatgcacctcttgaaaaggggtgcgtcgatgcaccttcatttatttcggtatctagaaaaaaatttagttcgatttttttatgactatatatacgttgtagttatttaagacatcctgtaaaattttgagaaatccaaaaaaattaacacgccaaaaatagtgttcaaagaatctattgcatacgtaacttttttattttatacgcatgtaaaataaatagcttgaacattgaattctatattgtaaattttaaatttctcaaaattttacatatgtcataaataattatagcatacacaactataataaaaaaaaaagttagactaaaaaaatcttctagatgccgaaacagttaagggttgcactggtgcatccattttagtgggatacattgtagaagtactctatataaatatattgtagttatttaaaacatcctatgatttttttaaaattcagaataatatttacaatgtgggaaagtaattcaaataaattatttcgcatgcatataaaagtaaaaatttatgaatgtatagactgcttgaactttatttttgacatgtaaaattgttttgaatttctcaaaattttaatttcagttgttcttatataactataatatatattgacatatcaaaatatattataattaaaactatgttgatatcaaaaatacaaaaatagtacatgaatacacacgattatattttagaaggtgcaccataaaattttattttgtttaatcaaatgaaatactaagaaacaaatgcttacactatgattagtatgcaagattttaaggtggataaaaaaatattaaaaagtatagaaatttataacaatccaacctcacaaaatgttaaaaaaaaatataaaaatttatagtatgatttttggtaattaaataaattttatatttggtgtgcatttatatatatatatatataaaaaaaaaaagctaaaaaaaataaatttttcacactttggaaaaaagatatatagaaatcaaatattatatcattctatatattaaaaaaaatcaaatattatagttttaaaaaatataacacgtattaaatattatcttaattattcatagtttctatgaaacctacaatcttaattcttaatcattcttatttggactcacacataccaaacatagtcttataatgactctttgccacacacttattcaaccaataataattgttcagaaactttgttaaaggaaaacaaccaaattaatatatataatcaaacttattagacaaaaggattaatttaattaattatatattatattattcatgcattgcaaagtatgtattaaaccaacaaacttacaataatatatgttatcctatgtaaataatatttaataataaagtttatacctttacaacatgacctaattagttattgaccaatgaagtaaccttttatgccataccaacacattaattagcaagagttgtatttgtttatatgcattattgtttatgatatgcctattgattatttaaagaaattaattgcacccaaaattaattaattgtttaaggatcatgatgtgttatgatgatgattattactttttctatataattaaaaattaataatagttcaatttgatgttttatgatgtgtcaactcacatcttatgaataaaattaggtttatactaggttttctcaattgttattgatttattatatgtgataaaataaatatggaggagtaatgttttattcatctactaattattaataagtctctttcttagcaaaaagaaaaaaaatattattaataaatctcatgacaaagaacatagaatatggattatggtgttattcaaaataaataaaatattaataaaggagataagattgagtcctataaacaaacttaattagtgtatgaaatcatcacaatttaagatttagtcatatatgataaaattaaattaatattgctggctgagtatagattggagttagtttagttaattttattaaagtaaaaaaattacataaaaaaagtcattatttgatgtgtcaaataagatatatgttcatttttgttttgacacaccactcaattattttttttattgttttatttttttaagaactttaaaccataaatttatgagaaataacttttctaaatattatgttattattaatgcaatcaagtattaaattttatataatttaatgtgatagctttaagagaatatcactatactaactaatcgtaggacataatctttaaaaaatacgagacactacttgtgtccaataacaatattctaaatttattactatccaccatgaaaatatcacctagtattataaatagctaactaagaatataggtcactcgttttcttgctattttttttaagggtaattgttataaattaaagaaaacaatatcaaaagacaaaaataaaaagaattcctgcattcaaaaaaacttactatttatcctaaggacatgctaaaccagactatgggtcgcaacattaatgttgcattaatgttgcaattcacataaaaaagagttgtttacgaaaagctatacagtaaaactttagtatcaaaaaagaaatctctgagatgtgattctgccccacagcatatctataaaaaatgtagatcaatatcaaattaagtaaataacaaaaatataaaaatatcaattataatgtaataattatattggggtgtgcgtaaatcatctaatccaatgacaatcgactgatccaattataaccgaccgccaaacattagatatccaattgtaatcggatcggattggatgttatttttgaatatccaatttgatcgaatcgaatgttggatggggtgtctaaaaatccaatacatccaacnnnnnnnnnnnnnaattagtattttcatttaatttggatgagtaattagattttatattgtacacgataaatatatttatatataaaaattaatattaaaattgtactctttttttcttagtttggatagatccaattcgattcaaaaaaaatactaagtctgaaatattgaataaacccaaattaaatcaataaatatatatataatacatctaacggatagaatcgatccaatctaacatccaatggatgttggnnnnattggatgactgaaattaattggatcagatcggatggtaaaatcaaacatccaatatataattagatcagatctgaatagacctaaaaatattagatgtaatccaataaacacccctaattattatatctataaaatctctattgttgagaacataaccactatatctaatttattcttataccaaaataaaattatgatgacacgtttactataatattcagaatcataataaattaatagaaaaatacaacagaatcaatgaagaataattataatcaatatttgtaatatgttaatttattaaaattgtttagaaattaaataatttatcttgtttgctttatcaagaaacataattacaataattaaattgactaaattatcatttatagttaaactataatatataatagttattttgtaaaatatattttaaaaaataaagttgttattgtatatttaatattaaaaaataaaataaaattcattaccttaatgatattcttaaaaaaaatgatagtgaaagtatttcttttattccatatttaacaaagtagtaaacaaatataaaaaataactaccttattattgattcttattagttgttagtaaacataagctaaaaccttttaagtcctcccctttctgaattgaattggaacaattaaaatacataatacctttttaaattactctttataaataaaaccagtttaatttttaagtgagtaattagtgtattttaattaatccacacacacaaaaaaaaaattacaacaacaaaaaactccttccattttataagctaataattaaaaaacataaaagaaaaaaaagaaaaaaaaacatattttatgtgtttagtttagcctaataaatagtgattaatagttaatacaaaatagtattagcttaaaattgtagtaaaaagaatagttaaagtcgttattagaagtaactaactaaccaacaaaacaaaaaagcttcaatctttgaatgaatggtctctttcttcttcttcttcttcttctccttcttcttcattccttctctctctctctcttctttctctctcaatcaaatccaacccagaaacgaaacttctcacttcatcatcatcatcttcatccttatccattaaatcactacaaaaagaagaaaaacccatttgaatgaaactaaagttgacgcctttatcaccttctcatgtcttcttgtcttctctccaaactccaccatggatttcacggtactcattcttcttcttcttctttttcccaatttaatttctgggttttgattattttgtatgaatgaatgaaaaaaaaacagagatcgagctctttaacagcgggagaacggatctgtgcggcttttttaccattcgttgccattgttgaggttttcatattagccatagtcgattgcttcgattgtcgcaggtctattcccaataagaaatttatttaccattttgaagatctaactcgtcttgctgatgagaccagatgtatgtttgtttgatttgattttgcatttttcagttctgtaaaatccctaattttgggtcataattgatttgggggtttttattgcagtttctgtgaatgaagttgaggctttgtatgaactctttaagaagctgagtagttcaatcattgatgatggttctattcacaaggtataccaaattacactattttcattttcaatctcatttttgctaaactttctttgataatttgaggaaaaaaaatctatagttagctccgaaaagaactattctgtaaatctgttttgtcatcttggagaatttttaatttacagtgttgaaaatgaggttcaaacaattagactaaaagctcttctgaatgtcgaaacgataagtgtatttgaatgactttttcaggaggtgtactgtagaattattcaaatgtttcttcttgtttattactgtttacatacttgaatagtatatcattgattttgagttgaaagtcttatgatgagtgagattggttatgagttttacaagcctttgttatctttgtaggaagagcttcaattggcactgttccaaaccccatatggtgaaaatcttttcctagaccgggtaaaagaatttgttgatattttgaacattaagtcaagaaaatcaaactagcttaattcatacctaagttttgaactgtttttcttttgtgttggtatataggtttttgatctttttgatgaaaagagaaatggtgttattgactttgaagaatttgtacatgcactcagtgtctttcatccctgtgcacctatagatgaaaaaattgattgtaagtgtgttaaaaaagaagaatttctaaccttaaaatgaaatgcaaaacagatttacacacactaacccgattttcgggtacttttgttctcttggcagttgcattccggctatacgatctgagacaaactggattcattgagagagaagaagtaagcatattcttatgcaataatagttagtaaatgtatgtgttcgtctttttaactaattataagattggttagcgatattctcaaaaattattgcatcaaattatatcaatgcgacactttactggtgccttttaacatttcttttataagaatggcctctctttgattcctcttccaggttaagcaaatggtagttgcaataatgatggaatgtgatatgaaattatcagatgatcttcttgaagccattattgataaggcaaagtgtctcaattcaatcacattcacttgttctcatcttcttaacaactcattagttagttagttagtaacaagtttttctcaacatgttattgcagacatttgctgatgctgatgcagataaggatggtaaaatcaacaaagaagaatggaaagcattcgctgttcgaaatcccgcccttttgaagaacatgactcttccttacttgaagtaagtatatgcaaatgcagccacagctaattagctagctacccccatgtttctctacaagccttaccgaaactcgattttcttattatgcagggacatcaccacagcatttccaagcttcatcttcaacactgaggttgaagactgatcatttttttttaccgggatttcgctcggttgaaaccactagtttaaatcggagaaaccttgccattcttccctgtaactgaggctgcattgtgttgccttatcaggtctatttaatcaaattttgtatatgaattcatgtcatattcttagattgtacaacatgtaatttttctttctttttctcttgattttgtgaaaaagaacttgctaatttacctaaggtaattttgtttgatatttgtaaattttactattaggtatggtgattgttctattatgattctaaagacaatctttagtaaatttaagaaaagattagtcattttttttaatgtaagtgtcattatcttataatcctatgattagttatttcagtcttttgcttaaggttttggttttgtcttgtcattgcttttttgaatttaataatatggttgattagtttatataataattatccttaaacacaattattgaatttaaatatatgttttgagtaataattaattggcattatttagggaaggctttgaccatagtgacaaatgtaggcaattgtttaaagaagatgtcattttcacatttgattctcattaaaaataaacaaaaatacttctatttcatttttgttaaataattaattccattttaattttgaaagtaccacataaagagaagataagtttttataccaaaaaatggaattttggagaaataaggcatagaaactcatgaaatatttttaatcttattaacttatgaaacaattattgcgagctctcaaaagctagtgtgccataaaattgtgaccttacaaagaaacaaaaaaaattattaaaaatatgatgtaatagtttttcatttcataattacaaagcactatgtaaatactcatgttgttgatttatagggcagtcagaataacatacttgtatataaaagccataaatttgtgagcgaagacccaataaaagtttaagcagagacgtaacaaaatagtattagagccttgaccaagctgaaaagcagccagagtgaactccatgttaggattttctttcattttattataaacaacttgaaaagcttattttagataattttaccattgagctatatatttatgtaataaattttattctatttgttaatgaatatttttgttttttatatgtataaaaaataaatccattataattatatttaaacaaaaacatttttttctcaccaaattagattcctctaaaaataaagaaacaatgtcttaaaaaaaatatcattaaaaaaataaagaaattaaatactttttacaaaccaatattttattgtcactctcaatctcactcactacccacagttttgatttgtgtaaacagagaaaaaaaaagaagaagaaacagaacaacaatggcggacaaaccaagccgagctcttgtactctacggagatggcttcgctcctctcatccactcatcacatacccatctccattctcttgcctccatagcttcatgtggcttcttaagcctccctaatgctccttcttcaggttcttatctctctttctaatttctcaattcttaagatattcacaatcaatatttgtatatacccatatatatgtttatatacttcttccatggctaaagttatcaactttcattaataatacccttttttgagttttatgacaaatgggtctatttaattagggctcataaattaagtatgaaagttttgatttttatcctttgaatgaagaaatagtgaagttagtgcaaatgggtatgtgtttgtttttgctgatattgtttatactttctgggatttttacttggatttagatttgcagaaaaccaggatgacagaatagttagggaatttggaatattggttgatgcatcatatgaagctcatctcaatttggtgagatcaataatcatttaattataactcttttgattattattctagttttattattgaatatatagcatctttcccaatgacacttaaaggattttgctcttgaattatcattatttatttttctttttgtaaaaaaattaccttgaactatggaatgattgtaaatatgtttttttagttgcttttttttcatttttgcgaacaagttttcgatgtaagagtgattcaggactaatctattgtaatttgagagtttatgcatagatagtactttaacgataaaatttaggattgtatatccgtaattttagagttatgcttaaatatttaaggccatatacttagttctagctagcttaaattagctaaataaacattcatactataattataatcgtggtttgtggtcacatcaattatttccctagttcaatgggaattttcttacaaagaagtaattcggggcgaaattctacatgtgtcatagtttttttaatcttctttttaatagttaagatacttgatttttcagaatgaagatattagccagcccttgattccaaccatatcagaaaggtttttaatctctttggttttcaatcatttcagctttgttccattcaatattcagtacttgatatttatcatcattaaactttaggttcatgggaatgaaagctgccttaatcactagcaattctagtttggaatctttcggttccaaactcggtttcacagtgttgcaattgaaggactttagtaacaaaaacaacaatcactctaaactgctcgaattgcttggatttcaagaaggaaagacggttgatatgagcgaattcgatttagttttcttgcatatcggtgctggtgacaacaaggacaaggcagcttcctatgatttggagttcatcaattccttggtcggaggcataatgaatgtagctcaacttggatccgaaattggttcccggctccatttttccgttgtgttgagctatggtagtgtttcagatgttgatgattcttcaaatctctcaatttcggttaagaaagacgaggaaaaatctgatctttcagtgctatttcctcgtcaaagttacaccatgaaaggcgaaaatcaacgaaagaatgttaggtgagttaaatgcttaatagttttctgttattttctcacaacagaaattatcttgagctaatattttttgttgaacagacaccattctcctatgcttatggctcaatggcaatatgctgtgactcgcaaagatatggcaaagacattttcctttaaagatttcaaagaggtatgtcatgactcatgagattatcactacacaacccaaaatattactcaattcaatacgattataaagggctgttagctgaacttaagaatagttagtaagtaaagctcaaatggctagacatgtaattgtgtttgctcctacgaatttgggggaggattgctatagtttcttggttgtcaagattaacaagtatggtcaattttgtttgcagaacggcggaaatctggtaataccggcggataggtttgtgcatgaggtagccttcaagctgtggaaagctcccaagtatggagcataataataagtcttgtaattaaggcaataatgaagccaagaaagctaactctcatctcatcatgtcacatatgggagttaatgttattcaaagtgattttcaatcttgttttcttttggccaaatcaaacattagtaatgctcaatataataaaagtattcctttatcttaatggtggctaaataaataatgccactcatatttatatttcataatatattttaattatttcattggcaaattatgtttcatattccaacttgacacaacttggcataaagtgaaatttgctaaattaataatgtgaaatattaaattttgtgaaataacttcacttgatttactttatgcaattatgatggtctatgattgttttgtgatcataatggtggtttttgatctcattgtcaaatgactcttttattagtgtcatgccaaattaatttgaaagaaagaagaacaaaaaattgtggtgtaagcttttagggtgcggttggaaagctaataaagaattaggttcttttattttatacgtgtgtgaaataaaatatttgaattttattttcaacatattaaatttttttgaactttttaaaagagtggagaatgttttaaataactacaacttagacgactataaaaataattaaatcaaaaaattttcttagatggcaaaacaaatagagggtgcatcaataaatttcttttaaatatatattgttgaatttttcaaatataattggtgggaaaaaaatcatccattactattaaatataatataagataactcaaaatttagtccatattaaaatattcaattagaatttatagccactagatttattattttttaaagagaaagatcctatcttaatttattatttattattggattatttgcgccaaaattattttatgttttgaatttttatacttaatcctcttaattcttttttttgggcaaaatactcttatatattttttttttttgtaaatttaagataataattgaatattattgttaaatatcaattgattttatttttatgtatatacagtgatcatccaattaatgacacgtcaaatttgtagaaaaaataaatttaaagtgattttgttaaaaaaatttaagtgtataaaaattaaaatataaaaaagttttaccgcttaattatttattagtttagttgagtgtgagagtgagatttgggaaagttcatgcatcttcccatttttggtacccaaaaacagccaccaaaggaaaaaaaacctcattttgctttcaatggcggtgcacaccaacaaccacaactgctctattaataataatctcattttctctttcaattttttttttttaaccccaattttcttgcttgaacagccctttctgcactcgctgctgagttgttaagtgtttaaaggtcagtgctttaacaaggttagtagcgatttttcatcattactctattcaaaatgggtttgttttagatcttgttgattttgtttgtaatgtgatatgagttgtttatattgaaattgagcatctgagttttggggaaatttatgattattggttgttgaatgtgaaattattccaacttgttctttaatttctctgtcaattgtattttgaagattgtttctttgtgtttaaaatgatattgtggcaatgaagtttatgtaaagtgatcaaattgagcatctgggttttgttgggttttgggaaaatttataattattggttgttgaatgtgaaattattcaaacttgttctttaatttctctgtcaattgtattttaaagattgtttatttctctataaaatgatattatggcaatgaagtttatgtaatgtgatcaaaattggcactgtatgtatggagaagagttcttatgaaagttattatttagtaatatgtctttaagtttttcacaattggaaacaaaaatttggattttaggttaaagtgaacaaattttctaggttgacttatgtaaaaccatggccaagaaagaaaggaagtttgaagcttttgttgtattagtggtgagttggtaacttagtgttaggctctaggattactgtatatagtaaataaaatgggtaaatgagtctttgttgcgagggtagtttcgagcgagaaattactgtatgtataggtgagtaagagaataggagggtatgcaatgaattgactaaaactatattttcgtcgaagggatctaagcgctcccatcggtttgtaattggcttttctcagatattcaatataattttccattgtttggctattattctactgttactattgctggttttattggttttattgagcttggattactcggttcttatcacgtacatcttattttgttgtatatacttataataaaggttactagttagttagatgtgttgaaatttttcacaattggaaacaagaatttgaagtttaagttaaaagtgaaacaaatttctaggttgacttatgtaagatcaaactcgatattgtaagcaacaaagaaagaagaaagtttgaagcttttgtttgtcttattttgtttggaacagaaagtttgagaattttgagtggaagagtttctacaatggagttaaaaacagcttatgatattgaacatatgggatctacacgaacaattcagcacgagttttggcctctaagtccgattgattcgaagaaggcgaagtttccttgttgcttggtgtggactcctctcccggttgtctcttggttggcccctttcattggacacactggcatttgcagagaagatggaactgttttagacttttcaggttccaattttgtgaatgttgataattttgcatttggttctgcagccagatatcttcaacttgaccgagaacaggtacattcgtcttatgaaatggctttgttttgcactcacgaacattgtgtcgtttaaatttagcttttttggtattaaatggtttatgaaggcataatctgtttctagaagtagcaagtaggagtgtgttggtgttttcttagttttaaaattttacaaacagaaactcgaactcaatccgaattaagttagaatgaaggcttataatcattgcttaaaactatttctgtatgtgacatataaagtagataatattttggttggcttggtttggtttcgaaattcgaagtactcgatgaatttgactaatgatcttggatcagtacaccaaaccaaatcaaaacatgaaatttataagtttgtttcattattttgtgggctttaatgagttccctagtgcttgccaatatgattgtatgattctatttgcatgtttcagatataacagatttgggttgattttattagtttgtgaacaaggccttctgacaatttgcatgtttcacataacagaatttaacacatactggaagaaggtccaccctgtgatgataacaaaattatcgcatcgggtttatgatgctttttcgatatttcgagtaatacaacctgtcatacataacatacttctatttaagccatttaagttcttagggggaaaaaatgacaccaaaaattattatctagttaagctattttctttaagagcatctaaaatcatgtttactatttctaaaaactgtttttctgatatctgaaatgtcaataatacagtgttgctttcccccgaacatctcgaggcacacatgcatgcacggttacaaacacacagaattcggaagctcgataacttgggatgacgccctagagtcaagtatgcgatactttgagcacaaaagttacaatcttttcacttgcaattgccactcttttgtagccaactgtttgaatcgactttgttacgagggatcgatgaattggaacatgataaacgtggcgggactgatattcttaaaggggaaatgggttgatgggttatcaatcttaaggtcattcttccctttcatggtggttataatatttggtgttgtcatggttggttggccattcttgattggactttctttattttctttacttcttttgggttggtttttcttaggaacttactgtgttaagagcttgcatgaatgttagttcctcacattttggattactttgtagatttttcttgtgacaaactcaactcaagcatagattataatcagggcagggcagggtcggttctaaaatttagtgagttatagcaaaaaaaaaacatattttccgacttctatttagaaaaaattattgtatttttcaaaattagtaaaagaaaattgtgtaattttaaaaggagaaattttctttttggcacaggtctagcacgtctatttcggactcataatatgacttttagaatgataagaaagacaaaaaataatctcattcgtaatgaaattagaataaatatgttttgaaataacataacatatgcaaaataaataaacttgatttttaaagtgttcaagttgaagaataacaaatactaaaagagtattctcatattatagaaaaaaaaaaattaataattcaatagaaaataaatgataaaccaataataaaagtttaactattgataccctagaaatatacactaaaaataaaatttaggtaatagaacttgaaattttctcatatgctcaaatctactccagtttagttttgctcctgaaaaagtaaatcataaaatatatagttatattcatatataaataaataaatatataaattaaaagctaaaataatagataataaaatttacctgaatgaatctttgtgttgcaacttctttagaaaattatttatggttctgtaatcaggtgataattcttgtactttcttcttcaaataatgtattaattttaagcttaacaacacgaaacaaattaaaaaaaaaaaaaacaatattaataaatagtattgagaataaagtttcatttaaaaattaataaacataaaaacttacggtggtttttggagatacaaagatcctaaagtagaatgagcaacaataactccatcatgaccgaagattgtgatttctttacaacctttaaattcatcttctattaaagaatgactatagtaattgtatttggaattgttagatttcgatgatgatgatgatcgtgtactagttaagtaaattttagaaaaagaattgggaaaattaaaagattttttacactgagtagagattggtacagttctcacatgaaattgtatgaccgtcatataatttggaaaacgattcataataagtttactatatggtacatctatagattgacctggatatatagttccaagcttttgaatattttcaaacttttcatacttcaaattattaacattcttgtacagatcttcaatattatggtggctacctttcacaatagtaaggaacacaataatatattcttttttattttgcaaataattagaaattcgtatcattcttccctcttctttcattcttcttcttatgataatttttctctgcatatgataaattagcaaatagattgagtaaatgcaatattttaaaataatagactaattaaaatttttatccctaaattttgacatatattaaataatattcctatacttaggttgttaaaaactcctactgaaatttcattcaatttttttaatgtggcgaatgtttataaactaaattatacctctaaacttttaacatgtaaccaattatgctcataaattaaaatttgaggtggttaaaaattcaaattaccctaataacataataattaatacaaatatgtatataaaattgttaattaaattgtataatcatacgtaccttttttttgttgttgttgatgatgcgatgatcacaaagagaacttggtaatataatgatgatgatatatatatatatatataatatttataattttttattttcttgaacaaaatgatatttatcacactctttcgcgtttaaaccatccacggcccaaattaataactaatatatacttttaagattcctattcctattattattattattattattataatatgatattttaagatatttataatcacattctttttcactaatagcaaattaatatatcttttttttattcaaaaaaaaaaaatatatctttttttttatttatttattaaaaaaaaagatattcacactttttagatatttctttatctaaaaggatataattttaatattttaaatttcaaaataattagttacggttattatttcaaatacaaaaccatttataaaatcataataggaataggaatcttaaaaatgtatattataaatactacttcattataatcaatcaatactaattttttataattaacaaaggtatgttttattaggtagctttggttacttaattattaattttaattattagaatattgaattaatttaatttatttttgtgtgttactacaaattttttttacttttatttagtcacaacaaaacttgtaactaaaagtaaaaaagttgtgactaattattgattaccattcttatgttgtgactaaannntccgtggctaaatgtattagtcacaannnnnnnaatttgttgtgactaaatataattttaatcatattacttgttgtgactaaaagtaaattagtgacaatttgtatctaaatactatgttttagtcttttttgttgtgaccaaaaatcatatttagttataaaaattttatgttattattaaataattgtcactaaagtaactattttttgtaatgtgtagataaatattaatgaagatgggaaagaaggaagatatacaagtgttaattgagaataaatctgagtattatattcagatttcagtgttgatagataatatcactaggagatttaaaattattgaagaaataagtcctaatgcttccaaatatatttcttctcatcacaaatataaatatctcacttttcactttggtaaaacttatttgttttctggatttattccacgtggatcccatttagtaattcaatctcataatggtggaaagctctttctcaattttaataataacatcaaatggtaataattaactactactatatattttaatattataatttaattatatttctcttcttattcattaactttttttaatggtgtttttctccaataataggaagagcaatgtcaacaacaagatcacaaaaatgaggtaaaccaattcattatcattatattattatttgagtaattgatatgttttaatttttatatattaatcactttattttttttagtagtaaaattctttacttttatttgtaaaattaaattaaatatcattgttaaatattgattgactgattatgatatatatatttatgtatatgtgatagtataacctcaaagctaatttaataataattcagttgatatttaatggagaaatttataattaataccttgtgaaaaaaaataaacataaaattattattatacaatatatttttactccctaaatgtaaatcttattttagtttttggtgttatacaatctatatatataaataaaggaaagcataagannnnnnnngtggcatcttttccttccatttctctattttctctattttcttatgtttt

SEQ ID NO: 15643 - DNA, 10081 bp, Cannabis sativa
  modified_base (4661)..(4662): a, c, t, g, unknown or other
  modified_base (4750)..(4752): a, c, t, g, unknown or other
  modified_base (8401)..(8413): a, c, t, g, unknown or other
  modified_base (8529)..(8536): a, c, t, g, unknown or other
tggaggcttgaagcggggacgttacaaatacacacacaagtttctcttttttttttccacataaaatcacaccaaacatagtatttattcaattactaaaatcatatcatgagattaaggattagtagcaagtaagtgtaatataaacaccacaaattagtcacacatgagcattgtgggacaaacacgtacacacacaaacgcacaagtggggatgcatattttcccatggaatggggcccgcggggaccccctaatgggacaaaaatttcccatctaaatggggaacggggtggggatggggatcaatttttgttcccgaatattaaatggggtggggacggggatgaaactctccgccccgatgatgacccgtttaatatatttttctagtatgtcagtatcatttttataaatttttaagttgtgttttggatgataattaatatattgaataataaataacatgtaatatttaattttcatgcagtttaatatttttaatataaattttatttttatgttaggagatgtgctcgccccatcctcgatggaaaatatgcgggaatggggcggggatgaagattaaaatccttaacagggatggagacaggggagcactccccactaattctccgtcccgtgtgcattcttactttttttttttaaaaaaaaaccacacactacaagaaaatcaactttttccggtgcagttcatgaactgcgctagcaaaagttgacttttaccagtacaagtttgatgtttcaccgacaaagatttgtaatttttttccccaaattcagctcgaggaacagctttactggcgaggtcattcgctgacaaaagtgctagaaaccaagcatcgaaaggtgtgaaactttggcaatttattttacttttgttggcgaataaatgcgccggcaaaagtcctgaaaatttttgcggttgaattcccacatagtaaaaacatggtaaaaaaattagatagaaaaagttttgccaacgcactttagctcgccagcaaaactttttaccataaatgaaacgatgcatttcatttaatttttttagaaaaaaacctttgcttgcgagcttaacttcgctgacaaaagtcttgctgaatataaccacgaagacaccccattttccccattttctttcttcttctttcttctatcttcttctccacccatctccgcccatctctactcattttctcccatatttcttattccaaaaatatctattcaccagcaccactctcatctctccctctccatttttttcttaaaaaaaaattcagcccctcgtcggagtgccgctggaatcaccttctacacctaggtaattttaattggaaaatttgacttaacatgcatatattaggtgaaaaataaaaatttaaaccaaagttaacccatattggtagaataggtatactttatgtttctcctcccaaaatactcttccatacactcaaacctattcctcctctttcctttctccttttctcttgactaacttcacaaatcacattttctatcattccccctaaccaagttacattaaaatattgcataaagtaaggattttaattactccaacctactccaagctcacatctaaggtgcattggtggtgggattttttttagaggaagcaggagcaccattacagatttttcttgattattattgttgttgattgttatatttattttataatattgttttgatgtccaatacgttggttttttccattttatgctattttttgtgtgaaaatggttattcttcaagttttctgcatttttttttgtttttaatttttttcgtttaatctaatggtgcccaatagagattcgatggtggtccgatggttagttcagattcgaggttagggatgatatctatataggtctaatggtgtgtctgatatgggcatgatggtttagatggtccgatatatgaccgatggtcggtctgatgtctaattagaatgtggttttagtggtcggtatggtgttgtgtctgatggggtccgatggtgtggtccaattattatttgttgtaattgattagatgtggtctgatattggtccgatatgggcccgatggtgtccaatgtttgactgatttatggttttttttttacgacttttttttatcacttttctgttagacttttgttctaaatttttaatgtgtatggacgacattttcaactattttggcgttcgttatgtaatggtgtttgggagcttgagggtagagattggatttataatcgagctaaaattttgacattcgagattgatatgaacgtaactttctcgggtttggttgatcttttgtacgaagaacttgatattgacaaagtacagtatgacttgaaattggaagtgaattacaagtacatgaaaggcttaatgtatcaccctgaagtcattgtaaatgataagcgtctaaggttatttttatctatgcttgcgaagaagccagatgaatttactcccttgtttttgactttggtgaagaagaatgtctgtatcgatcctagtcccacacctagtactaataaggatactcgtagcgaggttgggagttttagtctagaaacaaatccagaggtggtggccgatgtgttacttaaattaaacactatgatgctgatggctgacattgtagcacaaatgccatttcatgatgattttagtgatggtccagattatgaatggtatgttgaaggaaatgatgatgatacaatgtaatgaaaagtaaatgggggactcaagaggctttccggtcactgcttctatagaattcttgaggttcaaagtccaacagtggtttgctacgtgaaaagaaaaggctgacaagtggacgaagaccctagcaccaaaaatggaggaggacttggcattgcagtttgagaaatctaggtatttgaacattgacatatgtggaccttacatgttgaatgtccaccctggaggatcagttgagactggtgccgtagtggacttgtaggaacaaacttgcacttgcggcttgttccaaatcatgaagtttccttgtcctcatacatgtgctgcagctcaacaataaagtattaacatgtactcactatactcgccatattacaccaccgaatattggagaagcacatatgaatgcacaattatgctaatttgtgacaagaatgattgggaattggttgatgacatatagagcatgacagttggagtgcctgttgagaagcaactagtagggtgaccttattagttttcatggtactaaatcagatacacagcggaagggtttcacattgatgattatcattgtaccatagcctaatggatctctatatgtgtgtacattaaatcaaagcataaaatgataattttagaatatatacctcttgaaaacgatcagggtatcctcaaaacttccaatatgttgtatccttaatccagatggtgaggataatgcaactggagtcacactagtgtctttaaaatcgatacaccacacacaaagaatagtgtgggctattaggataaagtgtataatattgttcttgttaagttctcaacacatgagcaagaacaactgagagaaaaataatttctttcttttactctctctatttcaaaaataggtgtcagatgattgtgtctgatttttcaaatcaggcttctatttagagtagttgaaaactctttaattaaactatatttaattatttaaacaagtaaatatctataaccgaattcaattattgatatttatgagagaatctctccactacttgagagaatatctcaacaactttgaaatatttttaaccatttttcaaattcaaatatttatttgattaaattaattaattaattaactcaaaaagacaaaccatataggattaggtgcctacccttgtcttgtttaggataaggatgatatcttttgtcctgacaacttttttttcaataaatattgtcttgacaaatcttatcttaaatttttttgtcgtttccccatttaataaatttgaaaattgtttattttttataaaaataaataattattattttgccaactcaaaatagattttctgaacgatattatacaactctttatccctacccttgatagtgtttcaaggtggcgactcaggaaccaatgacctataattttaagctccaataaactacattttttattgagtctcatcaaccaaataatttgtttattaattccatgattactccaccaaaaatatgcaattgaactcttagtaattatagaattatatttactgagttttactgtactgtccattgatataattaattctagtgattagtcctccatgtgttggttcaaaattagttttagttaaattatcattttacccttctaattacttctttaccctttagtaccattaattcacaagtggaagtataatttagatcccatctaaatttgtgcataacttttcagttctagaattaacacttaatggtaaccagcattcgatctgttaggaaagtcaggattctataattatagatcatgtttccagccatccacattattagcttcccaaaacagaatttgtaaggagtatcttctttgagaaactttaacgagtgaannaaagaaactaataacatgaataggagttcatgattactcaggatttaggtcgatctactattaatcatcgttatgatatgaattaggnnnttatagtaaacgacatgttagataaagatagtttcattgatatcggtccttgtcatacataacctctattatatacagtaccttcactttggtgtcatactacacccataattcgaattgagatgatttgcaccaaagaacgggcatcagtgaatcgtactagcaaaggtggattaagacacttgtagattttttactttatttgaaacttcctctgtttataatatgtagaaacatggtgagcgacagaagctggatgattgtaaaccgacagtcactaaagtttcgtaggagtgtggacgagtttattggagttgctagaatacaaatatattctactggagttactcgatgtcgtgggcatcctgatcatcaaaatttaaaggatttcattgttcatagtgatgatgaagacactagtgatagtgatgatgaaaataatgtaacccttaatgatgattatgatgacttgtagattttaaaatagtgtaatattttaacccatcattaattatatcaaatacatattcattttattaataaattgattatgattgtaattacttattttactattaataaaaatagcttgcatgtgtagaatgtatggtgtaggtgcaagcaacagtaagaaaaatagagttagaggacagtacaaggggaaaatgtggaagaagaactggctaagcagcctgcaaggtagaaattaaaatttcaatggcatccatagaatggggccctcatagacagctatgggacacaagtttaacaacatggtcaaactctttatttgtaacatattcccatgaataagttcacttgggagagcgttgaaaaagtagacattcagactatctgggacaaactagtagtaacattcaatttttattgtaatacttcaaacaaaattattatacaaaaaaatatatatgactttaatgcttatcttttttgtagaccaaatttgagttcccacttgaaaatcttaaattcgtagaccacagtttgttagcaatgttaaaatggctacgtgattagagatcagactcgaaaaaggtatggaagaagaatattgctggactgggagaggcagaggtgaatatgagacgtccaaaatgggcgacacaggagatgtgggaagaggttatcgcctactggaaagacccaaaacatcaggtagaaattaaaaaatttaaaattgaatttccatcaactaataattttttgtggttttagttgaaaaaaaatttattttgaattacagtcaagaatcgaacaaaatgcaaaaaatcgaaactagttgaagattcaaggtggatggaggtcctagaccattatcggccacatcgtcagcagggtatataattatagatcttattgcccaaaaattaataagttttgaataatatattactaatttctttttttataaaacagtagactaatcctgagacgggagaatttcctagtgtcgtggctacttttgagaagttctaccagaagaacaacaattgatgtaatgaattcacacaacaaagacatgtaagtaattttatatccttagtcatatcgttctatatttaatttctattcaattttaccaatttattaatattttttgtaggcctaaataattgagatatgcaaaactcaactagcgccaagaaatgcccctcatcagtacgatgtagatctcacccagtttcctgcagacctgactgttaagacataggttcttggtgagtgatcacgccacctaaggcattgaccctttgcctagacttagtgtatgggctaaaagaacaactcccagggcaggtccctccaagtaacctactgtcagcgtcgaggaatatgaggtgttgaagcgaagggtgaaagagcaggaagcacgtaatacttattagcaacaaatgatgcaaactcataatcaatacctgaatatgtttcaagaacaattcaggtatttgtttggtatcgttcctagcttcaacatgctcgagatatctccgatttcatcgatatgttctcttggcactggaccttcatcagaagcctcctctcccagtgaaaacgacgatgacaatgatgatgctattgatttatagtgtgacttttatttttactattttttataaactatgacaacgactttttgattagttttataatgtttacttgaatttagtataattataatgtgcagttgaaattatattattttattattatttatgaaattttagttttagttttaatttaaatttaaattatatttatattttataatattaaagaaattactttttttaaaaaaaaaattgccgatgcacttacatgcgatggcaaaacctattaaaagaaatttaaaatgcagaaatatttttttccggcgatatttcacgcgctagaaaaactttcttgcaacctcaaaaattatttggaaatgtttttgccgacgaggttacatgcgtcgacaaaacttttccacgatctagaaaattcccaagaaacgttttgtcggtgacttagcttgccaggaaaactttgccaaaattattcagccgtcgcatcaatgtcgacgacgacttttgcgccggtgacttcacacgccggcacaagtgacgtttactggcgaaataatgttatttgctaacgtaaaccccttttcgatcgtttatttccatcaactattgtcggtggagtacctcgctggtaaaactttctcagcgtttctagttaacttttgtcggggcaaaatctcgccgacaaaaaccaattttcttgtagtgaaagctctccaacctgcccaaaaaaagggcaaaccatgtttagttaaatagacttttgctaataaggcccatggaagtcattgtctataaatagagcaacacccttattgtaaaaaaatctcaaatttcaattcttaagaaaaagggctgtctgtgagaaaattgttactgttatactcatacaacaccttcataatattgaaccctaaattaaaattttttaacatccaaatcacataaaaaattatgggctcatcattatgtatgattttttttttttaatttaagtgtgccataatcattgctataaaaatattttatctagcattttcatgattgtgaaacattttaggatatcagttactgcatttttgtaacattagtaacttaaaacagttaccaagcttttctaattacaagtgtgtaacttgttaggtaagaatttcacatcggcagccaaagatctgatttaattacaactttattttagtcctttttagccatctggttatacacttgtattcttagctttagcaaatactaggctgaactttgtgacacgatacaatacaacgtcacaattcaaaaacaataaaaacaaattaaataaatttgggtaacacatttaatttttatctcaaactcaggttgatggacacattcaacttgaaaaatgacacgattataatacacataagaaagtataagtatttttaatttgttgtattatgtgaagtaaaagaataacttctaaaaaaaaccctacaaaacacttttctttaccaaaaaaaaaataataataataataaattaaaaggatttttttatttttacatttcaaaatagttttttttttnnnnnnnnnnnnntttttacgaaattctacacaaaaactcatatagcaactaacggagtaacctaaatcgcaactaaaatttgtataactacccacctagaaaccactagagcaacccaaaccgtaaannnnnnnnaaaaaataaaaaaaaaacatatggggtaatttcctaaattaaaactataaattttatgagtaataattgtgtttatatatataattgtattaatcgtgctaattttgaatttgtgtcatgacaagtttattaaatgtgttatcgtgtcatatcatataatttattagaaaattgtatcgtgttcactaatgtatcgatgcgaaaagacacaataacatgaattgtcaaccctagcaaataacaaagtattacatttaggacaaattttatgaactacttgttatggtatttttacatattgttcaataatatatatttttacaagaattttcagaaagttaaatatctacttgttgcttaaattattatgcatagaaacaatgataagaagctcttgaatataatataaatatttaaaaaaaaaaagaatgtgtactccaagagaatgtgatgtttcattaattctctactattgaaaatattttggttatatattctcttcctaacaaaaaaacataacttcaaaatcttatttttacaaagaaaaatgatgacatgtcaagggtataaatcttaataaatagaaagtcctcacaagataaataaaaatctgcatcacatataacagtaagataaaaacgagagagaagtatgcataatcgtaacgtgtattatatatacgcgatgggcaagtgttttctccttcgcaccacctatgaaggtcgcaccttcactttgattatatagtccaaagactataatacgcggcaacccatatgagccttcaaattctaagttgtcagtatatgaatggttgatatgcgactaaggaagtcgcaaatgttccatacttaattgtaagcaatcaaactgttctcaatcatttattttttgaatgttagttatttaatttaatacatttaatgtaaaacgatcacttaatgattgattatgtaactaataacatttgttttcttataaagggatgatccacttcataataaacctaaacacaaactttctcctcaaaaatagactaggcaaaccgaactcttgctaaactactatatttttatgtatcttttacttattctttgcatgctcgttgtttacattctgttttattatattttatttgagtaacagctaatttaagtgaatactctttgttattattgtgggtgttcttgtttcacttgaatactcacatgttttggtattgtctattttccttcaaactaattacatgctcatataatatgatatatggaagaaacagtttaggaaataaaacataatctcaaatttaatatacttgtggagacatactttttaggaaaattttcatggggcacctaaatttgataattattttcaaaatgacgttctttttgttgtgttaagtttctgtttatatagttgccgtttttattggtagttttctatttttaacgttttctatattgggctttgtattccagactttttcggcccaattttttaaacaaacctttctttgtacgcgtgcgcgcgtgacgtgaggct

SEQ ID NO: 15644 - DNA, 6825 bp, Cannabis sativa
ccgaagggtaccgggttgaacctgacccgcccgaacaaaaaaaatctttttcattttttgggttgaccgggtcaggtccaggcaagttggccaggatcgggtcaaactcggtcaatatttcagccctactctaggttgtccaacacttgagtttttccatgcattgattcgtacattgtgatcctaagggtactatagcagatcccacctatagcgatatggatagtaattcccttggtatgatacaactaaaagggaagtaggtcatacccgttatcacaagggggctgaacctctataacaaatcctattgtctattacttttcattattatttatgcacacacgtggcaagcattagatctgcacaacctcgctatcggttgatcactttttgaggtcaataatgccctaaaagtaagtatttaatggataatatattagagaacatatgaattacaagtataagataaattaatatataaattatagaaatataattaataaatatctaaaaatttaatattcataaagagtgggcattatcttgtaaggaagtataagagaagatcatataatatgaacaaaatatgtcggtagtgtattaaagtatggaatctttaatatggaattactaagtacggtttactaagcgctatactataatgcgtgtgattttaattccaatcacatatgtggatagaaaattagtaaaggtactatatataatttgattatgcatgaatggaccgatatgaactaacatcttttatcaacgtgtcgtttatcataaaagagttatacatataacaacgacgaccattagtagagcagtcttaatcatgaatattcatgatctcctgtttgtgttcattaagttctttgattcacttgttaaagtttctcaaagaagatgattcttacaacttttgttttggtaacttaataacataagtggctggaaatatgttatacaataatggaatgtaagctttcagaaaggatcaaatatttgttctcctatagtgttaattctgagtgtgctaacagttggatctaaatctataatgggattatagattaactgttcacattgaattaaatgtacataaggaactcaagagataattaaaagggtaaaacggtaatcttaactagctctaattataaactaataattggagggcgaactacttatattgattatatcaatgagctactagaaagaattttgtaaatataattatatattgtcaaagaatgcaattctatttttatagtggagtaataataaacttactaaacttgattattatattgaagagttcaataataatctaatatttattggagattctaaatctaggtccatagtccccatatcacctctacgcaacactgtacaatggaaggtttgatttgaataatgaattgaaaaaaattaaatactatgagaaataattcttgaggataaaatagtaattttgtataaattattatattttttataattatgttaattatgaattgagtaattaaatagaattgacaatttaattttatttgataaaactatatttatatgttaaatataatattattattgaataatattatcaaagagaaaaatattattatagtgtaaaataatatttatttaatccaagtgaaataagagattaatgagaattaattaataaattattatttattgataaataaataataaattttatttaagacaaagttgagaaattaattttgggctttaaaatatggcccacatgtagggctatagcccacacatgtagggtgacatataaaggcccatgaatttgttttgattattttattatttatttaataagataaacgaaataaataattattatctttttaattatttaattaaatattttattggataagatatttaaaattaaaaagaatttttaaaataaagatataaatgaattcagttattcagttatagatattattatatttgaatttgaatttcaaataaagaataataatatatatttattttattggattaatttaaaagattatatatataatatatacataacacgtattctaagaaacacatgagattagaataagaaaattgtacaatacaattttcaaaccctaaaagctttgttgactctctctctctctctacccacaccactttctctctctagagaaagatatatttttctctcatctcagttcacaatgtctcatgaattgagtacacactgtgatagaaaatttgttcatcactttaatcctataagcccactcttattctgagtgttgaggatgatctggaagatcctagtgtgaagtcttcatcaagttcatattgcttttggattggatgaacaatattatatacaaaaataatcgagaatatcctgataggcatcaagtggcaaaattgttttactcatagtttagatttaatttatgtaatcatgttgacattttggggattatagttcatattagtttcatctaaaatattttttataaaaccatcgcttccgctttttactctgatatcgaccataaaaaattaacatcttattctaatgggacctcgagacgctttgactttttcctactacaaatggtctttcaaagaaatgatttaacaccattagatcttgaaagataattatttataaatcaaattctagtagaagctcataaaataaaaataacttagactctcgcctattgggacattgttgaattcttaatttaatcgaataaaagattgctaaaatagtttctattttagaaaaattgacaactctgttcaactagtggtatctttactctcgcctaccgagatattgatatcatttcgttgaaaaccttagaaatatttgagatatgtttattttgtattttttttttccatatcttcattacttgaacaagcaattgatctctatttattcataatcacatctcttgacatggaacaagtttattctacattttgtacccattttctcagagaatttaaagaaataaacatgaagtcagggcacaatagtgaacatcatttgtcaagaatgatgattttatttcagaacgagacatgagacatgtgtcggggttaattgtgaaatcaaaacccttattggttatattatgaaaattttaactctagaatattgtgaatttagcattgactatgtgttgaataattatatggaagacttacaaaattttcttcaagaggttgtgaactatcaagttccacatgaagatgttcctaattctctaatggattctgctggtgcaaacattgaaaataatattgtcattgatgacgatgatgagcataactctgatatttttattgatggggaattataatatatgaataatatagtcatctatatttttatgatgatgaatatcttgaaattaacactattgtgattagtcctattactcttccggactacaagggcaaagatattgcaagtgcaagaaatataataagatatcaattgaattatggagtgtcccttgtgaaattcaaataaactagagttacatgtttcttctataatataaagtgacacattaaaagaaagtgttctaagtttcgagcacgcaagaataaatgtaaggtttctgaatcttttttacagtcatgtgttttagagaatgataaatccatatggattattgattctggacctactaaccatatgtgtacttcattggagtttcttgagaattggaaagatttgaatcctcaagagttaaagcttagagttgggaatggtgcttcggaggcgatccaagctagaggaactactcatcttagatttggcaataaatgtatatttttttggacattgttttatttattacaaattttaacagaaatttaattttagtttccaatttacaattgtaacattttgtattgattttttttagttataatgtatctatttctcttaatggatttcaattatgtgttgtgtgtacggaaaaaatggctttatattctgagacctaatgaatcacttacacttaataacagactcttaaaactaaacaacataaaaagcaaatgatagataatatatgtgttacgtctttgtcatattggctatgacagaatttgtagaccaaccatgggttcataattgagaaatatcacacttgttgacttacctgtctacaaaccatgtttagaaggaaaaatgaagtttactttctctacaaagagaaattattcgactgaaccactagaaatggtctattcagatgtttgtggacctttgaatgtacaagctaagggtggtaatgaatattttgtcattttagttgaggattactctagatatgctcatttttacctaatgcataaaaaatcttaaacatttgagaagtttaaagaatttcatgctttggctcaaaaccaattaggcaaaatattaaaaatattgcgagctgataggggtggagaatatttcgatatgcagttgaaagattagttattttaacttggaagagcatcccatctaacctccccatctacttcacaacaaaatggtgttgtggagatcaaaattgcacacttatagaaatagttaggtttatgcttagctatccagcttttccagtgtccttctagggatatgccttacaaacaataactgtcatttttaatatcgtcccatctaagtttgtttccaagaaacatttagatttatagaatggtcgtatgcctagcttacgtcattatggaatctggggcactgctcatgtcttaagaaagaaagaagaaaagatagaactacaaagtgagatttatatgtttgttggatattcaaaagaaactagtggtggactattttatagtcatcaacataagaacatgattataacaaatgctacttttcaagagcatgattatatcaaaaatcttcaaccatgttgcaaaatagtgttagacaaaatgactttagatctatctcaaagagatgttccttcatcttctactctagtagaggataatcccactccctttgttgaatcaatacaaattgagacaaccaaagaggacattaccacttaatttcttgttcacaaaggcatcgtacctcatcgtagtgggagagttttaagaaaactaccccattatggcttggatggtgaaatcaacatggttgttggtgaaacttgtcatgatgacccattgacctttaaataagaaatatctagtcttgactagaaactatggttagcagccataatccaagaaatgaattccatgaggaaaaatacagtatgggaagttgtagttgcatcaaatcactttagggccatcaggtgtaaatggatctatacaaaggaaagagaagctgatggacaagttgaaacatataaacatagacttatagcaaagggttatacccaaacagaaggtatggactatgaagatacttttagtctgattgccatgatcaaatccatctggatactattatccatagctacttttcttaatggaaagcttgttgaaatcatctatatggaacaactagaaaggttcaaggttctagggcaagaagggaaagtctacaaactcaatagatccatttatggacataaggagacttctcattcttggaatcataggtctgatgagatcatcaaaacctatgactttgaccaaagcattgataaccttgtgtttacagactcaaggtgaatcaagtggtattcttctttttcctttacgttgatgacatcttgatcattgaaaataatgtcaagaagttaacagatgcgaaagaatagctaagcactcaattcgaaatgattgactcgggaaccaaataggcgcgctaagaagatagttgactataggcatcatccaagtaggcgcgctatcaatcatctcaattcatcaagtttgttttggaaggccagttttgctaaagcgtcagcattagagttttgttctcttggaatttgttcgattttgaaataatcaaacttttccacgttcttccgaaccttatttaggtattttgccatttttatgcccttttcctggtattttcctaaaacttgattcacaattaattgcgagtcactgtaacataccagattcttgacttttaacactttagttattctcaaacaagctattaaggcttcatactcacccttgttgtttgaagtgtcaaattgaaatcttaaggcatagtgaaacttaaggccttctggaaaaattagtatcacccctgctcccgagccattttaactggatgctccatgcacatacaactttcaagtatctgcgtctcgcgagataagcggactttcatctggagtcatcccttctattaggaaatctgccaaggcttggcccttgatggatgttcttgggtgataagttatgtcaaactacccttgttcaattgaccattttatcaatcttccagaagcatatggttttgacaaaacttgtcttaggggttgatcagttaacacctttattggatgtgcctggaagtaaggccttattttgcgagatgcatggattaggcatagggcaagtttttcaagaggtggatatctcgactctgcccctgtaaccttttactaatatagtaaaccggttgctagtgctttccctcttctcgcactaatgctgcactaatcgcatttttagagatagccaaatagaggagtaaagtttctacagttattggtttagcaaagactgggggggttgacagatgtctctttatgtttgcgaaggcttcct

SEQ ID NO: 15645 - DNA, 12546 bp, Cannabis sativa
  modified_base (9436)..(9467): a, c, t, g, unknown or other
taataaatctaagaacatgaataaaacccaacagtttctccttttcagctaaccctaaacagttatcgcatagcccttgggttttatgcgatgtacatggagtatgtgcgaaaggaaccttcgatggaggacttcagctacttttatgatataaaaaatgtgggccacaaaaatggcttctattgcttcagcaagtgggccacttctaatattaacggagtagaaggcatggtttccaatatggcagattggaaatctaagtggttctatatattcatagtaccagggattaggacagattttaatcgtcgacccagtacgtcgcactttccaatacttagcttatatttgttaccttatgaagtcgataacagttgtttcctcattgatcgtagatagaccggctcgacctgttctagatctaatccgaaaagaagttgttgaggtccttggtagcctttctgttcaagatcacgattggcgattgctgtacacaactttgaatttgtgagaacataagctaattctagagaatgccagccttcatcgagagacagtgtagaaggacccgtctaagaagcaaaaagagagaatagacaagtgtctatccaaacaaacctctcgaccaacatgagcgatataacataacatatatatagttatcttaatgtttttatcttcacagaaatgactttcttgaagcaagctccagtgcttaactgcaagcccaaagctggaactgcgacgacttctcctatcatccctcagaagaggaggagtgatgtttttgtgactcctgctgctgactcgtctaagaagcagattaggccctctcaggataagggaaagaaggtcatgatcgacccgtctgttagagctcttgactttgtgactcttcaggccaagtttgtgaatgacgagtttgtgttgagggtggaggcgatccctactgaggaattgatgtcgttaggggtggaactggccacatagttcatgactctattctcgagggcatttgtcgcaggttccaaagaggttgatcttttgaaaaagcaaatcactcagcttcaggagatcaacaagaagctaaagcaagacgcgaactccaaggacaaagatctcgagaacctccaaaagtccaaagagcaggtggaacttcaggccaagctctctcagtcaaaggttgaggagttggctctcgacttggatactgagaaggaaaatcgaaagaaacagtatgatcaagttgtttctgactatatatacacaactctatccatggtgccaaactttgacttctccatccttggagcggaagcggttgagatggccgaaggttttcatgctatgtcgcctactcaaactaaggggtacggagggaatctttttcctgaggaggcagagactacgaatacagaagaggtcgctgatgaagccgctagtaaggtcacggatagctctactgcccctattgctccaactgcttaaattatctaagttttttatttctttagttattaaactcttttagcggtacacaggtactcgcattttatacttggacaaatttcagtttgctttctttatattttgaacattatatatcccttcgaggatatttatttatatgtttgcttttcgcggtacacgggtactcacatattttacagacttaatcttaatctgtttttccaattacagcttggtgtaataactttaaaaaatgctaaggcaaaaaaattgaaatgtcgagaaattaataacctttattataacaagaaatcaatagtacaaagtagctttatggtaggctataccccctatattttgaacatttatacaaataaattgactaagtataaatacactgcgagtactattgataataatacttgagactttcaccgttccaagcccttcggatcacagtaccatcaagttctattagtcaataggtctcatggccaattttctcagtgataaggtatggtccttcctaattatcaccaaaaactccatgcgctggatttttcgtgtttggcatgacttttccaaaaaccaaatcccctactcgcagggttcgctctttgatatttgaattgaaatagcgagcagttcgctgctgataggccacattcttcaaatgagcctgatcgtgcttttcctctaaaagatcaagttaaagtaattgattttttgtatttccactaaggttgaatacatcttttcgtagggatcctgtcccaacatcgactagtaccatcgcttcgcacccttaggagagcgagaagggggtttcaccagtcgtggatcagggagttgtattatatgaccataaaacttgtggaagttcttctggtcatacccctttacgctctttcagcttacccttgatgttatgcttaattatcttatttactccttctgtttaaccattgctttgtggataggagactgcggaaaatgcttttttaatgcccaactcatcacacaactggcgcatctccttaccgtcaaactgttttccattatctgagatcaatttataaggtatgtcgaatctgtagatgatggaattgtacacaaactctcgcaatttaacagacgtaatagtcgcaagggcttttgcttcggctcacttggtgaagtaatcgactgcgactacggtgtattttactccgcccttcccttttggtaactcatcaattaggtctatgccccaaatcgcaaaaggccagggacttgttatggagtttagctgacttggtggttggttgacatacacgactatccgctgacatttgtcgcacttcttagcaaagtttgaggcgtctacttgtaatgtcggcccatagtaccctggctgcattatttttaaagcaagggaattacccccggtttggttgccgcagatgccaccatgcacttcgcggagtatgtaatcacactcagtccaatctatgcatttgagcaacggttggctgaagcttctgcgatagagcttatcgtcataaatgacatatcgagcagctcgataccgcaattttctagcctctatcttatctttagggaggattccttttttcaagtaatcctttattggggtcgtccaggtgacctctttgaaggtatctacctccattacctcgttccggctgactgttggatgagttagcacatcaacaggaattacatcgagtaatttggcttctcttgtcgaggccaaacaggccaaagcgtctacatgagagttatgagctcgaggtactttagagacaattactttcttaaatctttgtagcaactcgcaagttaggacgaggtatctagccaaacgacttcctctggccaagtattctccgtttacctgactgacaactatctgggaatcgctaaaggcttgtaaatactcgatcctcatctcaagagcgagtttcaatcatgcgattaactccttaaactcggcttcattgttagatgtgaaaaaattcaaatctaagtgtagcatgtactttaaaattactgaggcttatgcgtattataccacctcctgagccttcgctgttggatgctccatcaacatacaaagtccatccttcattgtttggtacgtcaggatcaattcgctcttctataattgccacctcactgcttggaaattcaagtatgaaatttgcaagggcttgtcccttaatcgcggatttaggtttgtatttgatatcgaactggctcaactccactgaccatttcaacaatctacctgaggcctctggtttcactaaaacttgcctcaaaggatagtttattaaaacttcaatgctatgggcctggaaataaggtcgcaattttctcgacgctattataccagggcaaaagccaatttctccatctgtggataacgagtctcaacgtctaagaggcgcttgctgacatagtacactgggtactgcttcccttggtcttcacggattagtaccgaactaatcacatattgggacactgcgaggtagatggatacgacttctccaagcattggcttggaaagaattgggggctgccccaaatgcaatttgagggcctgaaaagcttcttcacagttcttagtccattgaaacttcttatttccttttaaaatttgaaaaaactctacgcttatcagaggaacgcgatataaagcgattcaaagctgcgacttcacccgtgaggctttggacctcttttggtatggtcggagatcgcatttccaccaaatctttgattttagaaggcttagcctcgattcctcgctggttcaccataaacccaaggaattttcctgatccgaatccaaagacacatttgagatggttgagtcgcattttaaatcatcgtagtatctcgaacattggttgtagatgggtgacatggtccttcgcatgttgagatattatgagcatatcgtcaacatatacttccatagtctcaccaatcaggtctgcgaacatcatgttcactagcctctggtacgttgctccttcgtttatcaaaccaaaaggcattaccttgtaataatacaaacctcagtttgtaataaaataggtatattcctggtctggttcatacatcagaatttggttatatcccgagtatgcatccatgaaactgagaatttcatgacctgcagtagcatcaacgagttggtcaatgctaggtaagggaaaactttccttcggacaagctttattcaaatcaatgaaaacaacgcatgtacgccatgagccattaggcttaggcaccagtacgggattcgctaaccaatttgggtagaatgactcccttacgaagccacatgccaaaaggcgatctacttcctccttcagcgcttagtacctcgccgggtccattttccagcacttttgtcagacacctcgcactttggggtcaatgttcaactggtgacacatgacctgtggagatattccaaccatgtccgagtgtttaaaggcgaaaacatctatgttttgtttgagaaaggtaacgagcttttctcgatgttgaaaagttagtttagaaccaatttaaaaaactttattattatctaaagggtcaataggtacctcaatagtatattccgcaacttgggcggtagtcgtataatcgaggatcctcggatctaaatctggcttttcttcctgtggtatctcctcaattctgaatacttcttgtcgaagaggtggtgcttccaacatgtatatcatgttgattgatttcttttttgcgagttttaatgcagcattgtaacattctcccgagtccgactggacacatcgcacagattctactccagcgggagtagggaacttcatggtatgatggtagatggatgtcacgatcttcatttcctttaggatagggcggtcaattactgcattatatgctgagtactggtcgataacagcaaagtcagccatcgactttgccacgacaggtgcggttcctaaagtgatcgggagcttgatcattccttttaacgcaatggtgtctccggtaaaaatgtaaatactcaaaaccactggtcgcagatccttctcctgcagccccatctacctaaaagcttgaaagttaaggagattcacagaacttccattgtccactaatacgcggtggacgttatctcctccaatattagcaacgatgaccaaagcgtcggcagtgggtgatgaacccacctggcgtcactttccacgaatgtgatgtcatcgcactctttcttgaatagtttttctggccgctcacttaaattatttacattagtgagtgcctctcccttgcctccttggcataccgtccccgtgatattttggaatcccctgcgatgtgaggtcctccaatgattgttaagatgttgcgaggagttctcgaattgctcgcgttgttatttctttctttatcatttgcttggggatgaccttcctcgcttttcttgtacttgccaaacttccctcgtctgatcagttcctcgatttcatcctgcaaaaaccaacattctagagtggtatggccaatatccttgtgatacttacataatttctttgggtctctcttattgtgatttcctttgattgggggaagttttaatagaagactccattcttctcctcaaccgtatagatgtggtcctacgggactgctaattctatatagttcacaaaacgtggacctccttttatctttggagatgactctttctttggaggggatttggccaactttggacttcgctgtctttggggactgcatcttcttgagcttctccctcttgaatttttccctctgggactgtgggatcgtgattgtgatactggaaactcgcgtttatcctttcctttctctagctcggctagagaattttcaatccttttatgcggctttgccatagcgaagaactcgaccaacgattcgggccttcgagcctgcaactctttacagaaatcagttcttggcaggacacttgttatcaacatgcaaactaacaaagactcgggggccttctctacttttgttacttcagcattaaaacatttgaaataatcttgtagtgactcactgacctcttgcttaatattagccagagtagtatagggtggcctatacgtcattgtggcttcgcaatgtgtgagaaaaaggtcgacaaaggtttctcatgtcgatatagatgcttcaagcaattggctgaaccaattgggagcattatcctccagggttgccgcaagaatgcgacatttcacaagttggagtacctggtccacttccataatagtattaaatttctctagatagtttatagggttagtggtacctttatattttagagactcgaacaatcgaaatcccttaggcagtcgagcttgtcacatttctgtggtaagacgagaagtcccatgcaacttgtatatgggctttctctgctgctcgattatctttaacgcttgtaaaagaataccctgatcaataccccctggaagggcagcgttcctttgagtcgttgcgggagcagttgccatagtagctatatttgctgagataacgaccccagtagtcgcagctggtgcattaggcgggttggtgtgggtatttatggcctgatcccccaactgaggatcacgaggctcttcatcactccggggcgtttgagaacgcgccctaaaaactgcgttaaggtgatcatgaagatcacccctatgaacctggtatcttcctcctcgcgatgtttttaccgagcttgacctgatgaacttgctcggggtgcgacattgtgttgacaaagagccaaactcagcgtcattctccttgtttcgcggttgggatctactgcgaggattacgtcgttctggatcttcttcaggttgtacctcacggtcgaggttctgcgtggtctggcccctcgaggttggctgattcaaatcgaacccttcctgacatgtccttcgttccctgccagtacggttagttcgtcatctagaggtggttacctatggattatctgagtgggtagtgggcactcgaggaggacatcaagtcctattccgtctgtcaatttcagcctgcaaggctcgcatttgatcctgtattgcagtgtactaattagtggttaattgaacaatgccttcagataccatggcaagcctgataggccgaaactgccccaccgtggctgctggcgtggacgtttccccaacgtgagcagtagtttctgggaacaaattgagcagcgttatgtttgtccgccccattccgtcgttgatggtgtcgatgggaggtactctatttcctgggagtgggacattcatcgtcccaatattgattgatccattgttgatatctccaatcgtctgatttccagccatagtgattttccttctaaatcaacaaaatatcgcgttcccacagacggcaccaaatgttgttgaaggaatttgtacaacaccaaaattaaattataataataataagtataaagaatgtatgcgagtactcaacccataacaacgagtattcgaattaggaacacaaaacacttaccaaaaactagaaatacaaagaacacaagagaatataatggttcagtcaaatcacggtctacttagtccattgttgcaaggaattctgtcttgttttatttcacgatggatcactcctttatatacaaagcaagtgtactatgatttacacatggattaaattcactatcaatccgttcatacatttaattacagtaattaaactaaaaaacgtaaacataataaatgaagaacagtttctagcttaattcactaaatacaacaacgtatgcgacttctagagtgagagttggttatttagattcttgcataagctcgcaggctttaggatgcatttgagactagtcgtgtctaggatgtctgcgtcctcttgaagtcgcttatacgaacatcatattacaagctgatagaactaagacttgcgagtctatatcggtttatcaaggctgttgggtcaacgggactagctcgcaacatagagaatcgatctctttcggaggaggatcatggggatactcgcatacaccctattagatgtgagtttaaagccgttccttggccttacataatgtgagccatacgaatgcgattagagttggtcatattcgcatcatctcgctgaatctggttcaggcaaggttcatactcgaggggtctctcatcgacatctcagctctgctcgaggaaagtgaatacatgtgtcttttcagtaggagtccggtctcgagtttctaggtgagaaaaatctcactataacaacaaactaagtataatagttaggtaaacccaaacaactaataataaggcatccatcttgttataggagggcatgcacgtggtaccttcactaattagttccagaatctttcagtgagattcatagctccatcgagtcagctctctcggatataagctgacattcaaatgatgttggctgttgaagttcatcttgtcgccaagaactgtgggtttttagatagggcattatgctttagatgtaagaatgaggaggcttacatcatcaacgtcgggaagacatgggaaaggttccagctcgatacacaggctattatcaccatgttcccaacgagacatcccagagcgttacaatttacaatgtctttaatgcacatttaccttgacccggtaaaatcagacctatcacagttgtgtgatttgcaaatattaaccacatttattttagtggtatgtaattaaccccacgatttcaggagataattgttgtaagatatccgtcaactatgtaattaactgccctatgacgtaattataaatagaggcaagttatactgaaaaaaggaggaaaaattcataagaaaaaagaccctaaaactgtatcaaaaatctaataagannnnnnnnnnnnnnnnnnnnnnnnnnnnnnnnaaaaccacgtaaaaacctttgtgttcttactattttttctttactgtttcaattttttgtgcaagtttatcaccatttaggctcaaatctagttaacaaaaatatgtgttaacacaaataaatcgacacatacttgtcatgcttcttctatttctttttattcttggatgattctttcgagtcatcctttctttttgtctttgagccactaggattgtccactttaatcgagattgtgctcgccattactgtacttgtgctgggtttacatcccaagccaattttcaatagcttcatctcgtatctttcttcctctttacgcaaaaatacttgtcctctttcattaactcattaatgtttctcacaaggtgaccctatagatcattccataattcgcctccaatgttgataagtcagttgtaagtcctgcctgaagtactgtgagctgtatactgtcattcatgtttctagcttttgcagcggctgtgctaaagcgacttaaataagccttaagtgattcgcctggttgttgctttatattggttaaggataatgcttcaggccgtcgatctctcgcggcttgaaatttctttttaaagtccttggagagttgttcccaggatgttatagaattatgggtaaatctttcgaaccagctgctcgcagctcctattatggaggttgggaataaaatccaacgtaaattattcgagacattgttggcccgcatgatagtgttaaagttgttcaagtgagtgactgggtctgtggtcccatcgtattgcaaaacatgtgggtttttaaatccctgaggaaactttgaatttaaggcatctggatggaatggctcggcctcttcatctgagtcgtagccaggcaattttccatgttctctatattgaaaatttttaaatttatcttctagttcaattactcgtagtttgatgggatctacttgctgctgatttgcattttggttgagtttatggcgcaaatcagatgcattttggtttagtcacttgcaaagataaggctatcttcgatttaagtgctcgcaaagatcaggctgccttcgctcataattactcacagatcttttcttttagtaactctcagattgataactttgtgaattgcttatactttcttggtcagcataacgttgaaatctacttccttctcctattttcctactcgattgactatgtcctcgagaccttgaacgtctcgaacttgaactttcttcctcttgtatcggtcttctcctgcgaaagaggttagatacacatcctttattcaagtatgtgtatatatcccctctatctactcgagaaggacattgagggtgtcttggaggtagcccactagaccttggttgattcccagggttctctcataactgcgagggattccctagttccttggtcgaggttgcgtctcctcttcattcgtacgagatgcctctggtacattagttcgctcattccctttgtttgcaaatccatgggaacttcgaggaacatctcatcgttgttcttgattatttgtttgattatccagtgggacgtcccttgtatccccaggttgttcttcgtgggaattcccttggtttgtcacatgtctcctggttctggaaccttgaggtctttctcatggtcttcttactgcaggagcaggctggttttaagaaattgttccttgcgccgacttggctattgtagcctctctttcaacctcagcattttgttagttagattcacctaaacattgtcaaagttgcctattctctaacttcaccaatggtacatatcaggttgggtcataagcgtcctcactcctaagcacatacctggcagaattattggcatcttcattccttcttttaggaatttgatcaccatcatcatcgttcctccactaacatggtgttttagtggtatggggtctttgggatgccatgagctcttttccaaggcaacaagttttttcttcagggctatttctatcgttttgattgtcattatccattgaatgtcattagatcaagtttataaggagggatttttctgagttttatcaccaaggctctcaatgaaagcaccaaactgttaacgtagatttttgttaaccaaaataaatagcctttacataataaattttctacaaaaatgtatatataagtaataaatgattagataacactagatatttttacgttgttttgtagttaaaatatacttactccacgagtccttattattagggatatttattgagtacagaacacaatatcacaatttgaataataatattttctttctcaaatttgtcgtcccattttccatgaaatttttccctatttatacgaatataggttggcagttacccttttttgggattgattcaaatataacggttcatgaaacatggacaatccccacgttttatttaatcacatgtggaataatatctaataactactcaaccgttatttactcttatcctttagacaggtattattgacttggaatattgtatctcgcttgatacaagttatcctccttgtctgtcttaataaaaaaaatgctaagtgttgggaagcagtacgtctcgtcgattcccttattggaattaatagtgggagatgatcttctcgctatgtgttatgcgaggcagttatgttgttacatttattctgcttaagtggatgaatatccccttcttgtttgtatattctgaggtaggcatatgtctcgttaatctctgcttaatagttattattcttgtctcgcttaagactatatagtcaataagttttgaatattatctatcaagccattatttaatgataatgaattatttaatatgcatttaatgagataacattaatatatcatttgatttgattcatattccttctataatactcgtgttagcttatagagtatagccaaattttgggtataacaaccagtttgggaatttttcctggaaggcaaaatgacaaaactttctttctcagcaaagggagagcgtgccaaagaaccactaggattagtgcattcagatctttatggac

SEQ ID NO: 15646 - DNA, 4499 bp, Cannabis sativa
  modified_base (30)..(73): a, c, t, g, unknown or other
atgtatttatttacattgttttagaaattnnnnnnnnnnnnnnnnnnnnnnnnnnnnnnnnnnnnnnnnnnnncctggtaaaacatattccaatagatgggtgggaaattaatgaagatgggggtgttgaggttggaaagctgtgtgcgattggacgtctattctcctatcgttcaatgagtcattctttactgaagatgattcttggccgtgtatgggggattttagacaggagtcgtggagttgagattaaactcatcggtaaggactcaatgttctttgtcttttcctttaaatcaactcaagacttgaacagaattttatccaagaatcattggtttctcaacaatggtactctaatcttggaaagaatggatatgattgtcgcaagatttggctccctttccggtacgattgcttaccctttatgtgctttaattgtggtcggttagggcatgaggctcgggtgtgttcgaagccaattcaaacaattgaagatggcactgggaatagaatgccaagctttgggacatggcttaaagttaacgataaattagactccccctcttctttgaaacatgatttcattgatatagacaaaccccatattttgtctaagtttggttccaggaatacaagaattggtcattctatggccttttctggtggcaaagattacacataaatgatagagcaggtggtgccagtgcagtctgatgttagtcttgataatgaaccaagtaacaggaatcttcagcttaaacagaaagagaaagtggtggtggagctcgataatgcaggggttgttcacattgatactgaggctgattttttgggaggttctgggtcttgtaatcgggtaggaaaaattcaggagcagcagggtcaatgttctaataagcgaagaaattcttggagggatgagatgttcgtgggtctttaccatgattccaagcctaatactaccattcaagattccatgattttggggtctattcaggatgctcctttaactactgctctcaatttggttgatgttcctataagttatgataatggtaataatcttcagacccaggaagaaggtatggaaatttagaatgataaagatggtggtatgatttcagggggaatttctagattgtcagatttaatccttgactcattataggaaatagcgaactctaattttctgggtcatcaagcgccatgattgctttattttggaatgtccaaggtctggggaacccttgggcattgaataccctcaattcccacatcaaggattatcatatcgagatgattctcttgtctgaaactcgtttctctagtgttgccatggaatttgttcaggtgaagctggggtatgctggctgttttaccgtggatgctaagggtaaaagtgatggtttggtgctccttgggtctgatactttcaatttccaggtcaagtcctttacggtttcacatattgatgctactgttgaaaactatatggggttcttatggcgtttctctagtttttacggaagtccggatccgagaggacgaacagaaagttataagcttctaaagagactgcaactgatgtttaatggagcttggatttgtggaggtgacttcaatgaaattactaatcatacaaaaaagaaggggcagtcctaaacctgagtgtttgatgtgtaattttcgtacggtgatctcggaatgcttgttgcgtgaaatttaaactaatggtggggagtttacgtgtaatggaagatcatggaatttggtctttgaaaagctggatagaattctttgcaactcggattgtttggataaatttcaagtaaataaagtcactcttttgaattggtggaattcagatcatcgtccattattactttcagctcatactgggaatggttgcaaggccatggaacacagatggggttctcgcttccattttgaacaagcctgggccaagaatgaggaatgccgaaagattatcaaagaaatatgggcgagtaaggagattaatagccatttgcgtactctttctcagcttattaacagtagtggtaaggagctccaagtatggaatgttcaacataaaaaagatcttaatgctcaacccaaggatctcaaggaaaagattgaggtgttgtctaaatcgatttgtcaagatgattggctcacacttcataaattagaacatgatcttaattgtgtggaagaaaagagggagatttattggaaacaaaggagctgtgaactttggttacagcatggggatcaaaaaactaagtactttcattttaaagcctcgcactggcgaaaaaaaaaacactatttctgggctatttaatgagaagcttcaatggtgcacaaaagaagaggatatctctgctattgctatatagtatttttgccatcttaatttattcaaaattcaatcggggatttagcatcaaagccatacttctttgttgtgtcccaatccgtataagccttcctgaaaaaagataccttttggagccttccaagggtgaggatgtaaaaatggctttgtttcaaattcacccattaaaagctcctggcaaagattgtctcccaagccttttctttcaaaaaaaattgggacctggttagccctgatgtgattgcagcctgtttgaaagtcctaaataacaattcagattgtagtacagtcaatgagtctctcatatgtctcatcccaaaagttcacaaaccttcaaagatgttcaaattttgtcccattagtctctattcagtcatttacaaagtaatttcgaagtgtcttgctagccgaatgaagaggagtcttaattctgcaatataagaaaattagagtgcctttattggtggtcatatcattcatgataatgctatctttggatatgagagcctccacaatattagaaaagggagatttagtaatggataaaaaatggcactgaaacttgatatgtcaaaagcttatgacagggtggaatggacttccttgaagcaatgatgtcatgtttggggtatgaagatgcatggatttctaaggtcatgaattgtgttcgctctgtttcattctccattcttattaaggaacaattaggggaaattttaatcctaaaagggatttacgccaaggcgatcccctatcacccttcctctttcttcttttctctgaagggttatcttgtttaatccatgaggctaaaagggcaagaagaatccatggcctgaaatttggtttaatggaacaacgactgtctcatcccctatttgcatatgacagtcttgtttttctataggccagtttggtggaagggcgtgccttacaagaagtgttagtatgttatgctaagttatcaggtcaatatataagtctggataaattagacctgtctgtgggctgcaagataagagaggataaggtggaggagttggctggccaacttggggtaaaattggttaaacatcacactaagtacctgggcatgcctacctttgtcggaaaaaacaaaaaataggtctttggcaaacttagggatcgggttgaggctaaacttcaaggttggaatatgggcctcttttctcaagcgggaaaagaagttttaatcaagcttgtgatccaagcgcttccttgttatgtgatgagctgtttttgaatcactaaagggatcctttatgatattgagagtctggttgctcgcttttggtggggctcttcttcaaaaagacaccagcttcattgggtgaattagagaaaattatgtaagttgaaagaacatggtggcatcgggttccgtgatttagaagactttaatcaagcattcttggaagttaatctctatgcccgagtgtcttttagcccgggtgatgaaagcactttactatcctagtggtaattttgttgaggctaaattgggtcattatgattcagatatatgaaggggcatcttatggggtaaggagctcttggtcaaaggctctcggtggtgtgtgggcgatggtcacactatctgaattaatgaagatccttggattcctagaggatattcttttacccttcgcacaaaggttaggattcctgagggtgtcactcttcatactttgctgaatgaagatggaagttggaaaactaatgagattcttagttggtttcaccaagatgacattccttgggttcttggcactcttcctaatattcatagttcggattcgatgacttggaacctcactcctactggtcagtatacagtggctagtggatataagttgagattcagcaatccagatattgctattttttctctgataattcaactttgaaaacttggtggtcgtttatttggggatctcgtctcactccaaaaatgaagagctttatttggcgagtattcaatcattggataccagtcaaagtggagctatttaggcgcagagtgaccatcgatgttcactgtaactggtgtaaattgtgttgggttttatgccct

SEQ ID NO: 15647 - DNA, 1909 bp, Cannabis sativa
tttgcatgaatatatgtaattatatttaattatgtatgtgtttatgtatcttaataattaattagctggctttagatttatattattacatatatataaatttttcaatagacgacatggacatgtcatccatttgtttttttttttctttttttttaaaaaaaaattatataaaaatcttgccaattaaattgaattggatggtacaaattagtttagataattggatacgaataatgaagaatgggatgcatagtgtgctttgggatgaataaaatattaattattaaaaagttttgttaaattataaactaattagctatatggaaaacattctatacttagttacacctttgacatttccaccatcatcatcattactttgagttgggaaaggtaagaaaagatcttgtttccttaaaaaagcaataaagaaaatctaaggtttgtttggtgctcgtatcagtatcatgtattatattaaatcagtaaattattatgttttggtcattatgtgtatggattacataaaaaaactagatgtataaacccaaattgtaatatttatgagcctaagttgtattatggtaaagttcgaggtcaaggtctaaggttgggactaggggccagagcctggagtcggggttcgagctctagggttgcgactgaggtttgggagtggggctgggttagggtttcgagttcggggtttgggttggaatcggggtttggatcgtgactggaattaggttttagggttagacctggggccaaaattcgaggtcgggtccgatgttggggacaaggtccatggtttggatcggggttggggtccgtggttgggtccaagttggggtttgtggctaggctgaggctagggttgggatccgagatttgggcccggttgcaggaacaattagggtccgtattgatataattataaatatatttttattatttttttttttgaaaataaaacaataaaatactattgcaagggcaccaaacataatataatttaatctaatctattaatataagtcagtatcaaatttaaactcaacacaaaacatagtattgtgtaatgtatgtcaagcataatagtaatgttatatagtacaagtgtataaatgtgtgaacggccagaatctacatattcttgtgagaaatgttatgttgtcacttacatatgaatgagaacatatgaatctcattaattaactcattccactaattggatatgttccaattaatgtggacctaattaagcccaaaaaagacaaagaaagaaaagaaaattactttagctttcattgagatcactaatcgttctctttttaataaatttagttccaaaatccaaattttattactttttcttttgtatataagaaaacacaaaataacaaatcatgaatttcattaatacaaaactaaaatgttttcaaagctcaaacatgttctcattctatcatttcttaacaaacaaaataaatcaagatttgaaagtacaactcaaacatgaaaacagaaatagttccatcaacaaatgtagataaaattaaaaataaccccacatagtgattacaacaaccataacaactccaatatgtacaacaccattattgataagaacaacagccttcgacttgttcccttctgccacatctggactgatggattcttcagaagaggaggaagaggataaagaagacgaagacgaagacgaattagtatctttagaaggtttcaatggtgtgggagaaggtgccaagtgctgctttgtcttcggtttcggaccgaaaattcccagaggcaacaacaccttatcgaccttgtaaatagcaagctgattatcttcataaacagtactagaaatggtagtgttaacaattccagtagatatgtt

SEQ ID NO: 15648 - DNA, 3266 bp, Cannabis sativa
taaaaaccaaaaacacagccaaacaagctcttattttctcttctaattttctatttaatctctttagttttgtatataaatacagtacatcctattctattcaataaaatatacaattgattcatcattttctactagttctaaatcataaaaaaacattatgggttttatttttttgtagtttcaatgaaagttaagagaaatgagagaatctgaaattgagagagggggttgggtggcgccatcgagactggtggtggaggtggcggttttgggtgagctgtgggagtagttttggaagtatagaaaaaattagcatattttagtaatggtgccattatatgggattgatttgaattatggggcgacaatgcattgaaactcaaattctccttttccttattcccatattgattgttaggttatcccttacttttacagtgtttggtgccttgtacgtgcacgtgtgtttatttaaatagtctgattaaaatgtcgagaccgtccccttttcccttctcattagattgatcttgttagagtacataattttttgacaaaatctagttaaagtacatttataggaagcctaaaaggtaggtgtaattcagcccttgatgtttcataggtagagaagtgatgctgcagcatataatatctgttctaactaatgttaactttttatttatagagactatgtagtacagcatagcatggctattctaactaatttttattctctgtcctctctctcatttatatatttatttgtttttctttaaaatataaaagagatggttctgcataaaagtttaatctcattgctacatacttagaaaactttttgactttccaggttacgatgcctagagatgctttacaccaagggggtgttgagcaccgggaggtgcataatgcttatggatactactttcacatggctacatctgatgggcttgtaaagcgaggtgatggtagcgacagaccttttgtgttgtccagggcattttttgctggtagccaaaggtatggtgcagtttggaccggagacaatacagccgattgggatcaccttagggtttcagttcctatgattttgactcttggtcttacaggattgtcattctcaggtcagaaacaactatttaattaggataatcaagcaacaatatttgcttgttaacaccaactgatgttataatgtttatacaggtgctgatgttggtggattctttggcaatcctgagcccgaattattagttcgttggtatcaaataggtgcttactatcctttcttcagagcacatgctcatcatgacacaaaaagacgagaaccttggttgtttgggtaagattttcataatcttttttaattttacagttttcaaccccaaatgcggtgctccttgcttttatttatctaagacagaagatgattcattccaacttttttggagacaaagcaaaactgatacaaagacaactatctaaattaggagttatatatatgtatgactatctgtatgtttgtatatgtacatttctgaaaggaaagacttttattgatgtattgaaagtgatacaagaagagtgagtgagaactcccacttggaccagtagccaaaaaacagaaagctaatgaactgtttacctgtttagtttcatttttgaaatctttatcgtaactaagtggctacccaatgtctaatcttgtcccaaatgctttcaacatttatcattacgaccatattatttttatcattatttgtagttaggatatgtttggagccacataaggctcatctacgtggttagatggatgaatgtgtgtttaagtggttgggttgcccataaattaatcttatcacatgaaaagaaagtataatatttaggattgtcattgagcttttcttagagcatttgcaaatttaaaaataggaagccaaaaatgactccaaagaaagcgtataccaagaagctcgatgggaaaatctaaagaactaaagatgttcaaattcacaagaccctgaataattcactcaatgcgaacacatatttgttaagaataaaagataaactcctaaaacaaaagataaaaaaggtaataacccaaaaaagcaactaaaatatcaaagtactgcatcacacactgaaagaagctgactgaaacccatgtcatcatcactctcttcctttggttcttccttctcctcagcagcgggagcagcagctgctgaagcgccaccattgtgtattgatgaaagcatctatacagaagatgcttcgtcaataataccatgtggccaagttttcatttttaatattaccatattaatggctttcattgtgtgctgtctaagctgtgttctatgtataatttctctgctagtgtgttgtttgaaagtttccagactatgttgacagagctctgctactctgttgatttcaatttaggaagagtgctttttttttttttttttttatttcctggttttgatgtcaaaaatagctcagatttttgcaattgttgagttttggcaaatattgtgctcctatggcttagaaggaactataaaattgttcactttttggattttaatatcagtcttctatgttacagaactgagtgataccctttctgtgtttttatgaaccggtatgtagctgtatattttggtgattgtttgatgtcttccacttttgtatggttgaggtcgacttgtagtactcttgtttccctgcctcttgttttccttggtggattttatatcccatctccaaatattcatgtaaatttattatgctcggtcacttgttaggacataattgtaatatttttttttctttctcttaatacagagaaagaagaacagagcttataagggaggctgtacaaatgcgctacatgttgcttccatatttttacactttatttagggaggcgaacacgagtggcattccagttgctcgtcctttatggatggagtttccttctgatgaagctacttttagcaacgatgaagcgtttatggttggaaacagtcttttggtacaaggcatttacacagaggtaaattagttgagttcttattacttgattttgtattttttctgtacttcatagctttgtttcactttatcctggttctaatgcccacaaatctcaacatcctttaccaatgtgctagctaggcaatgatatccatcttttggtttgcttttcccttgtatatttgcacattgaattccaccgctattccctttgc

SEQ ID NO: 15649 - DNA, 10254 bp, Cannabis sativa
  modified_base (4405)..(4413): a, c, t, g, unknown or other
tgatttaattttttatcaaaataaaacttaataataatccgatctagagatgttatgacaaaactgattaaattttctgtatctattcatgttagaaaattgtctcgagttggttatattaaaaaaaatggtcgaaaattgagctggagatcttatttttactattatgaaaaatataggatccattttgtcattaaataaaatagaatgtccaattggtaatttttacaaaatacaggatctaaaataatatttacccacaaataaatttacaagagccttgaataaatagtatttttaaaaattatatatattaaaagatctttttcttcatttgggcccttaggctaagtaaatcctaggtgtgggtctaatctaccttaacctagggccagccctaagtgtataatattatatatattagagtattgttataagataccagtacatattgcgattagttagcaatattctataaaaaattatattactttaaactataaagaacccagtacttaattgtactaataacaataagacatattaaaagatactagacactaatatattattgttgtttgattccatgaatgaattaataataattattaggtatggcaatagcaagagacttagtagggaaagagaatcatcatgtgattgcagtgattggagatggtgggatgagtggtggacaagcctatgaagcaatgaacaatgcaggttaccttgataccaatctcatcatcatcttaaatgacaacaaacaactctctcttcctactgccactctccatgcccctgcttctcctgttggtgccctaaccaaagccctagctaagcttaactccactacaaagtttcgccagttacgagaagctgctaaggtaaccaaaacttttacaaaaataccattttctttttaactcttaattttacaaattaagaggatattacaatatttgtgggcttttatacaatgtgtgcaaaaatatggattggcaaaaggaattaagagtaactagttaccttatgctattttcgtgtatatatatttaatttttcccataaaaacaactattttgaaagaaaaaataccatatttcaacaaacttttacctaaaaaccataaaaataaaaatctcctccatataaagcaaagattaaatgaaatgctaattttattttcatatttttgaatatacgagaattctacttcttaacaaatatatcttaacccaacaaaaaaagtgaaaattacaccaaattatacaaaattatgagattaagaaatcccataaattcattagaaagtaaagaaaaatcatggaaaactactcccaagtttgaaagaaagggtttttacaacatatactgaaattttaaattttttttacttttttactgtagaccaaatttaaaaaaaaaaaatactgtataaattttatattgtgtcctgtgttaaatttttaatgttattttttagttgttctgttttattattttacggttattttataaaaatacagtatttttgtaaaaaattgttacaataaaattgtaaactcttactcaaaatttaatatttttgtaaaaatgcttaattagttgaagcccaaatataatgcattcatcattttgttgtaatttcacatgtggaaaatgtaacatcttcaacatttttatgtataggacatttccaagcaaataggagggcaagctcatgaaattgcatcaagagttgacacttgtgttagaggcatggtggctggtgcagcaggaacttcactatttgaagagcttggactgtattacattgggccagtagatggtcataatgtggaagatctagtcaacattttgaataatgtcaaagctatgcaaacatcaggacctgttctcatccatgttattactgagaaaggaaaaggctatgctcctgctgaacttgcacatgataaaatgcatggtacaattcatagcacacaagtttgtttttttttttgtttttggtttgtgtaattaaataacaagtttttgttttggttttgtgtactttaggtgttgtgaaattcgaaccgaattcggggaagcagttgaagttgaaatcgagtactcgttcttacactcagtattttgctgagtctttgattgcagaagctgagagagatgacagagttgtggctattcatgctgctatgggaggtggtactggactcaacttattccaagatcgttttccggatagatgtttcgatgttgggatagccgagcaacatgctgttacctttgctgctggcttggctgctgaaggcatgaagcccttttgtactatttactcttcttttctacaaagaggttatgatcaggtaagcacagatatagatatatacatagatacattcaaaaacaagtggtgcccactttagattttgtaatgaaatttcttactttggtgggtgattaggtggttcatgatgtagaccttcaaaaactcccagtgagatttgcaatggacagaggtggtttagtgggtgcagatggtccaactcattgtggtgcctttgacataactttcatggcttgtttaccaaacatggtggtcatggctccttcttgtgagactgagcttatgaacatggtggccacagctgcagccatcgatgaccgacctagctgctttaggtacccgagaggaaatggcattggatcagtgcttccaccaaacaacaaaggaattccattagagattggcaaaggaagggtgttaagagaaggaagcagggtagccattttaggctatggaacaatagttcaaagttgtgtagcagcagccgagcttcttcttcaaacgcttaatatctcgatcaccgttgctgatgcaaggttttgtaagcctcttgatggaaagttgattaagcaactagctcaagaacatgagatattgatcactgtagaagaaggctccattggagggtttagcgctcatgtttcccactacttgagcctcaatggattactagatggcaagcttaaggtaattcacaaactatgattttttcttatcataattatgaaatgattacattatttgaatgatttgattggattgcagtggaggtctatgatgcttcctgatagatacattgaccatggatcacaatcaaaccaaatggaagctgcaggactcacttctaagcacattgcagctactgctttatcactcatagatgaacccaacaagcttcatcttcctaatctccatgtgaatttccggtagaccaagctgcaatttcacacgaaaacctcaaggcaattcgcaatagtgtatgtttaacaccacaaaaattgctaagatgactcactctaggcaatgtagggagagttcacatatgtacatatgctacaacataaacgttgaagaaaataaagaatctccatgccaacaatcaatgcttttgcattggtatgctttctacattgtttttgttcttcctaatattcttctaataatacaatactattattaggccaaagtggtgcacaacaccatcacacgccttagggttaaagattttttataataattattaatttaaaatatatgagaccgatattagcccattgcaggcaacctctaaaataccatcatagaaaaactcactcaaattgccacaatatactaattcagtataaattctcacccatcaaactcaaatacattgcacaaagaagaaaaaagtaaacttgaaaataaagaataaatgaagtatgaaacaatgaacttataaatttacttttactaaaacatattccaaatcaaattcaagttcaacaatgtaacaaactaaaacattgaaaaggataatctttcttattaagaaagagatctaaaacaaaaaaacaaaaactaataagattgttctttaagccaaaacatcccactgtgaaaattgtaagtcaaatccctcttaacggtactgcaaaaaaaattaagaagaagaaattcaaagcaataagcacaagatcgttagagtaaatttaaattgataatccaaaaaaaaaaaggtttctttgttaccttaatgaagccaatctccttggcattgctacgaaagcactgtctgcaacacatgagaccatactttcggatcaaaccatgggggtttccacacacacggctgtttaatcaattcaatcaaaaaaaaatcagaagatcaaattgagatttgttcgaaatatccaaaaaagaaataacttgaatttgaattaaaaaaaaaacgaattgaattggaagggatcgttaccaggtgcgagaaccgggcccatagctcttggggtgagagttccagacgttagagtgtcccatgattggattgagaacagaagaagaagaagaagaagnnnnnnnnnaagaagaagaagaagaagagtaagaatcgaaagctcgagcagaggttgaagagagcggaggcttatatatatatatatagaaatattgtaaaaccctaattttgatcagctacgattgacccgattggtctcgggtgggtaaaacccgatttggttttagaattaggggacttttttcaaaaattgtgaggaaaaaaatgttatttgattttttatatgcatgaagttttcttttttaattttatttattagatgggaaaatcgttttttttttttaattagggtgaaaaatatgatattatgaaattatatgaggatttacttgaggctagctcaagtggccataagtgggtgtgtgagtgttggaggtcctgggttcgagtcccagataaaacatgttgtaatatataaacgcttaaataaaaaaaaaaaattatatgaagattcagtttttttcaaaaaaaaaaatattatgcaatagtatggcatttttcctagaaaataatacatttaatagaaatatcattacaattgttttaaattttagaatgggttgaggtgttaacctgaggtacccttgttgggtctatgttggttttttttaaatgttttttttttttgaattttaactgcttctctttttgtttttccctcccctttctagttttcttgatgttcgaagtgctgattttggtaactggtttggatctctttttctctgtttggatttttgactagtttgctgatgaattctttggagtcactaaattctactctttccctcactaaagaggaaactatcacaattaactcgcctgaccatgtctagtctccctcaattgtccactctactcacattcttttggtccgtgtgcttactgaaaatactgtgtataaacttggtttcttaaaacaaatgtcagggcattggagaggaagattctcagttataatctttgaatgtaagagtgataggtttcacattggatttggttgtgcaagtgataaacttcgagtcctcaataaagaactatagcactttcaaaattatttaattgttctgtactcaccaagggctctgcaaaatgtgtcaaaggaagatttgatattcacccctttttgggtccagatttatcgactgcctttcctgagcaagtcctcaagcttggctgaagtacttgggaacattattggtgaatttttgaagtgtatgaagattctactaatgaaggttgagggcattttttgagagttcgagtaaagttaaatgtaaccaatccattactacggggaaagatgattaaactgtcaaatatacgagatgaataatgggcagttttttgttacgaatgtttacctgaattttgcttcgaatgtggtctctttagtcatccttttgaaaaatgcatctctttcatggagcgaatggatgatgttaatgatgatgatttaagtatgaaccttggatgaagagtattaaattaccaaccaatacctatgacaaacatcacactaatttttcgaagggaaattcgcggccacttctcactcgacttggacgaaagtctctggttacctctctcccttaattatttgctcaatatcctccccaactaaagaccctacttttaggagaatgctctacttctcaacagcccacactacaactaccttttgcacagcagcatacacactctcgtgttacctttaatgtagcctcttctcctattattgcagagcacggtatgcatccctctaattcttttcctccaagatctttagcctctactcaatctttttccatttcatctccaccaacagttactgatctctctcaaatttacatcctagatataagtctgactgcctcaaacttttttgccacctatcctccacaaataccgtcaaatttcaccacaaccaaatctcacacacctgttatgaacatctcctctgaaaaaatatttaccacaccatcttctttagtctcgatcacttcccaaacaaatacctctgcaggtttctgtcacaccagtgacaaaaagaatgttaagccaaattgttcttttaagaggcaacatgatgttctctccatccgtaaagttctaaaacgatgtcgtggtacccctaatttagcaacttcatcttggtcagttgaagaaggctatgaacctaatggttctgctactttagtggattttgatggttccatcaactctatagcagaggttgctatgcaaccccacaaattaccatgaaaataataagttggaacgcacgaggactaaggaacccaagtgcgttcaagaatttaagattgcttattaaacagcaatcaccaaatgttctcttcattgtggaaacaaaacttagtagtaataatgttactcgcttcaagcagtcacttaatttctataatggacttgaggcgccaatagttggtctaaaaggtggcctaatgctattgtggaaggatgatgttgatgtcactctccagcattatggtgacactttctttgactattttatggctgttgctgatggtagtctctctttctacttcacgggcttctatggtgcaccaaattctcaaaacaaatcagcttcttggcttcttctaaagcgcttcgatgaggttacttctcaaaatccttggttggttattggagattttaatgaaatcttatcgaactttaacaaatcaggtggccttcttcgaaatgaagctgaaataaaccctaaatctcattatcttcacacaccctcccgtatctatctatctctccctttgtttactgcgcgtggctctggagtgaccacgactaggtagttgtgctccggccatgactttctcaacccaagaaaatccaaagccccaacatctctctcatctctctttcccttttcccttacgtgacgatactgttaggtcacgatggccttctccaaaatatggtggtccaaatagaccacaccctaaagcttgcaacacctggaaacccgaatggcggtggtttcccccatttgttcgcaccccatcaaagaggacgagctaattggaggtgacaacccttctctccctctggtttcctcacgtggtcccaacttcgcacgactcctacatctctattcttcttcccaaatgacgaacgacctaacatcgccgacgagccaaacagaggtcaccactacctgggtttttacgggatttgatactaggcatttcaaaaattttgtattttcttgtttgaagatttaggaattttagttatgttttaaatgtatgtttatgcccatttattttttactgtccagatgagttatagattttgattaagttttactaattttatttcttgatttgtatatattttgtggtattttgttatattagtttacattaattcatatataatttgttaaattatatcattaagtatatttttatcaaaatataattaattaaattattataataaattttataatatataatttgaataaaaaaataatattttctttttttaaaaaaaattaatatagtgacaatcagtaagagtagctaatactttacaatctgacaaagtctgactcccaaagtctatagtaacgcgcgatgagtaactttgaaaatgtttagtgacccacaatgaagggtcactaaatactatatatttccagtcacccacattagtgacgcgtaatgaaaggtcactaaaaggttttagagtcactcaacaaagatcactaatatccatttttgtagtagtggtgactaaaagttaagttttttgtaatgataattgtaaagtttaaagaaaaattagtattttgtataaattttcttataaaatgtgtgcaatattttttgattccattttaatgtaaatacatgtgtatgaataaaatttataaagctgatctaaaaaatagacaaatataagtgatgcatctctttcaaaaaaaaaaaaaaaagtaatgcattgctatattttaacacatttaaaaaaaaataaaattttatagggattgtgataagtatgttaaatttagcacatgttaaaaattagtcaaatttaaactttagagatagtcttatgtatttttaatctatatattatcttttgttttttcttaaaaaaataaatttacattttctatctcttacactatgtttggtatgaaggagaggggtagagagagagtgatagaagaagaaactaaatcacttgtttggcaaaaaatatagaatgatggaaagagagataggggaagacattctccctccaaacctatgtttcatgggagggagagagagagagagtatgatggatggagaagttagaaaggatggggagtaggagtgagatgagaagaatggagaaaaaattgatggcgagttatatttgcaccccataaaattataagtacacctcattattaagaaaataaacttaaataatttttaaaaattacttttcatattttcttaaaattttttccacacattatttttaatccaatacttaatttgattttatttttatatatatatatttaaatcatgtatatttttttttaaagaaaattccatataattttttatttttgttttttttgtcataatttttaatttataattaatttttatttgatagataattttttaagaatataaattgaaaaaaaaaagttaaaaaaactcagtacaattaaaaatataagttttatataaaataaaaattattaaaatgatgtgtctttacaaatttttgaggtgtgaataaaatttctcaaaatttattagtaaaattatcaaattgcctttttaaaaataaaaatttattattttttaaaggtaataattgtattttgtctttttctacaatcctccaaaatttggagggattaaattttgaaagtttggagggatacagattctccctccatctctcctctctctctttccaaacaagggatttagtctctccttcaatcactatcactccacccatcttagggccgacaaaacgggttagatacgataacacgactcgaaacttgcacgagaattagtgggtttggggtttgccttaaataagtttgggttgactcgtctaacccgtttaataaacgggtcgtgtttgggttgacatgactaacataaaattggcccgttaatgacctatttaaagttattttagtactttaacgtgtcataaatggcttataaacgcggtaaatacttcataaacgtattactgattgacatgtttaaacaaaatatacttataaacgagttacacgggtcgtgtcctgtcaactcgtttataaacgggtcgtgttcggattttatttttgacacgattattaaacgggtcgtgttcgggtcgagcatgtacctattatacatgggtctcgacacgacacgaacacgacttgcgaaaacgaattgccacccctaacccatctccatccaccaatctctccctcctataccaaacatggtgtaaagatttgatccctctaaatttgtaatgattgtagaaagagataaaatatactttacaaaatacaatacttaccctaaaaagaataatatatatgaggttttttcatttttacactttaaaacagtttttttcattaatgttacaaaatttcacataaaaaccctcatagcaactaatagagcaacctaaatcgtaatcaaaatccacataacaacccacatagaaactaccagaacaactcaaaccataaatttgaaaaacaaaattgaaaaatagtatataaaataattttcttaaattttttatattcaaagggacaattttataa

SEQ ID NO: 15650 - DNA, 3938 bp, Cannabis sativa
gttctttatttttcttttactgcttttattttttgtgcaaatccatcacgatttaggctttgatatagttaacgaaaatttgcgttaacaataatattgtgtaattatttaagcatgttaacatgtgattaaatgaatgttatattgtttatagtattattcacttttcttgtcgagtctctgtaactcacgggtgcttaatggtgcaggtaaagggaaggccaaagttgagcaaccatgagtttgaggtcgtaatagcaatgtacatatcagtcgcggtgccacggaccaatggacagggtgttccatttttattatattttggaatataaaatttatgttataaaagcactttaaaccagattgtaaatattttaaaaatagggagattccgtaattaataatacttatcttttataaaaaagaaattttatgagtttattttaaattgtcaaattttaatttaatcacactttttggtataattatataaattagtaaaagagaattttataaaagcacacacatgtggcgtccctgttggacagggcgttatatttagtcacaataaaagttatttgtgattaatacatagtatatatttagatacaaattgttactaatttaatagtcacaacaagtattgtaactaaaaatacatttaatcacgacaaattatgatttttatagctaatacttttagtcaccaactttttagtcacaacataagaataatttataactagtcacaatttttttttacttttcgtcacaaattttgttgtgattagaagattttttgtagtgaaaattaataattatattaattgagtaataaaagagtaaataaaaaagttattgtgatgtaaaatttattccatactattttattttatatttagcataaatttttgcatgtgtttaatttagaccacattatacactaccattacaattcaattttataaacatggctaaaaaatacatatataccacatttataacacttcctcttatcaagttttatgttatttattgtgatattttcttcttcttttaaaaggatatcaagtattcttattcatgagctttctttctttctttaatttttttttttttgaatggaaataagaatttttgttttaaaaaaaaatggtgctaaccaaaaaaaaaaaaagcctaattaattgcttttatttatctatattcaatgcatgtcttcatagatatagtaattggtttttcatgctagatctattgatataatagtgcctcataattcgcaatagcattatggtccattgctgctctagcaagaatgtatcattattgataattatatttcaaacacatatatattatattaaataatatacaaagaactatttactgattttcattattcatattaattatatatatctttagcttaaagactcttctttgacctcttattcagaattgaaaatttcactaaactgatttcctaatcgaaattatatttgtttctgcatgccaaaaaaaaaaaaaaaaattgattgatgatatacaaaacaaactcaagagcataggcttaggtgggtcctggtgttaggattaattcaagcatgtttcatagtctcatggcggacatgattataatttatatatatacaccaaattaagaattttctttcaacaattaaagaattgagtttatttattttaattaattaatgggttggaaaattcttgtaattaaaatgaaaaatttgtcgttttcagatatctaaacaagacaaaagtaaaaactagccagaagtgtaatgactttggattattgtttcgtccacaaaacatatagtagtggattttgcctttgtttcaaacacctaaaaagataatacgctagcaaaaagtgttgtgaaaggatttgatatatatgtttataggtaggtccaatatgcttggtacccacccttaatttgtacattttatttttatttttattagaaccttaatatatttatttaacaacaagagttctagacagatttttctatttaatttaaaaatttagagaaaaaagatctagaaagagaactgagaaagcttataattggaaaaattacctaatcaaatacacacatgattaggtttcttaatcatattattacttctctctctagtccttttatgaatatgaagaagaaattaatatagaagtttggtaacaatgtgagagaattcatgaaagaaccactcatatcgatgcgagagcatgagggattcaggagccatttaataataaaaagcactaacataacatctctatgcttatatattatattttattagtaattatttcttttttaaaaacaataataaaaaacaaaaaaaaaacattgcttgagagttgagattgaggagaaaattaaccctaacgtcatgacagagtgtgactgatgtcatcatatataaaccccacaaagcaaattagggggggccttctcgtgggctatataccatagtggtggtgcagctatcatcaaatgtttgaattagtgcttgcccaaaaaaatagaataaaatttaaatatatttatgtataaatatcatgttctactactacactactactgtatagtattaataaataggggataaaattaagaaaagttgaaaagatatgtataaaagaatggggaccaaagtagccatgcgtgtgaccacaaagggtcaaaaacaaaatgacccaagtcatgtctctcaaactatatatctatatctatatatataaatgtatgtgtatgcaccccctatagctagctatagagatataaaatcaaaagtgaaaaaaaaataaaataataattattaaatgtaggggttaagatttattcacatgttggggtgaagcaaatagtattaatgtagtcgcagagaggatgagaaagagtggctagtgactggcctaatgtggtaaaagaagacaaccgtactaagatgtagggaaggagaatcggcagaaggagacattgggaatgagctttattttaatttgcttaattatatacatatatatatatatattctttgtgtacttggagatattatttatatgtttttttttttttttttacaaattccatttgggtaaacaatttttgaaaaagttgttggaggagtacaccacgcaaaattaggtaaagccttttcaatcaaactttcaaaagagagaagagaaggtacttaacttacttaattttcatgttacattctcttcttctaattatatttctttaaacaattattgtgttgaaaagtgagatggaaaataaaaaaggtaagtagtaggtttaatgatttttttttcttttttattctcttttactttcttgtaagccatgctgcttttcatatatttaacagtgtaattactcagatgttggcagtgaatgggatatatgtatagcttaatagccagggggtgaagcttttgtcttgtatttgacatgaaaattgaaaacgcttttgaaggagtaataataagtaaaaataaaattaaaagtaaagtaaagtaaaaaaaatagatatgtaaaccctctttcggcccaaccatcaaccaaatagccgcagaagtactacagctcctggttttacattaggaaacacaaccatgacaaagtaactatgatataagagctttgaatgctgtgcccaattttcatttccatatatcttttaatctttttttactttcttttaatatttacatttctaaaatattttaactgtaactgaaattgggcattagagataggggtggagatcattcaattcaatccaattgaacagaattgatccaatccaatctaattacaaaaagttagatatccaattatagttggattggactagatgctaaaagttggattctaattagattggatcggtta

SEQ ID NO: 15651 - DNA, 5589 bp, Cannabis sativa
aaattcagttctaagacgaacaaggcccatagacccttgaaaaccaccaagggtcttaaccttctgctttaatcaaagctgaaattgaaaacttacccaccattgagtctaaaaccatgatacttctagtgttccagaccatcaaagtccctctcgatctccctatagttgggattagaatccagtgggcttttggtgcattccatgaccagaagggccatggaaccccctcgtgtgcatgggcataacttccagaacgaggagagatattgttccagtacgactatggttacatgaaattcattaacaataggagatgatttagttacaagtaactgtcgtttgtgggctaaagactccaaaacaagaacattaccaaattatgacttcaaaacaagaacataatctcgtacaatatcttacagcttccattctttgtgggctaaagactcctaagtttgtctataggtagcagcaaaacaaagcaaaccttagtatccgatcatttagaggcaggcttttgtccttgagctgaattttctttactgcatactgtcttccatctattttgtttttacacagcacaacatggccaaaaccaccatgacctattaagaagaataccaaagtacaaaataaggaaaagggttgagctaattatttcctttgtcttgaataaaatttaaaaatagtatcggatcaagtaaaattcgtaggccaaaagaacaatagaggaaatatatattaaaaagataaagctatcaaagataaaacatgtgggtgtaaaaactgattttacaaaagctaggtaataaaataaataagttgcacactaacaaagagaagtagcttcttgggttcaattcaatcttcaataaaatcagttaagaaattaagaaacatggtgcacagaagttaaaataataactaaaggccagcttatcccatactgcataggtaacccactggcacaactaacataaccagaagtagtaagtaacgcaatgtagttactttccagttagctttataacaatgtacgcacacttctttttctggtgtcctcaaatattgtagtggtaagcagggagcgtagtctataaatatatatatataatattatatattaatgtatacatgcacatttctaataatcaattagttttgtgtaggatgcacgtgcatgctatctttatttgtcagtgtgttaggatgtacaaatacatatactattggtctttaaatacatgtacatacagagagagggaaaccataatcggaattatgttggaaagagctcccaaagtaagaaaaccatatgaaaaaagtaacaagaaaaatcagtgattttctttacctagggactgtaattcctcaaagtcattgagatatcgagagtttggaagagatgtattccgcccttcagtatcagaagtgtatttccagaattgagataattttgatgaaacctacatataattaattaaaataaatagcaacgtatttttaagaattagaagccaaactaagcaactaaacattaagtaataagaaaactaccatatactgctggaatgcatgatcaaatgttttgttaaaatgtgtagatggttcagaagccaactccttaccctgttctgagagaatctgttcacccaattcaaagatcagcatcaaggagaacatggggaaattagatgaggtagctttctattataagaaagatatgggaacaatgaatttgaaaagtcttacccctagattgtacagttctgttgatatttgttgcagtgagctagacagtggcccattagaagagcaagcaagtcgaagcaaatgaacctacataagggcaaaaaaaaaaccaaagtatatacacatagataacaaacttttaaatgtatataagaacaaaagagaaacagaatttaccataatcaaatcccttttagaattttgagatacttgttcgaaaatcattgacctagaggatggtgagtttgagctgtcacttccctgctccccatcctcctcctctatatgttccccaagagtgaaatcctacaagcagagaatagttagctatagtatgatatgctttttgacgttatttagcatttttaacatggaaactagcctagaaaacaaaaatgacactgaatgtcaatgagtaggaatgtttaaaaagtaaatgtcatttttggtcactttgtagttaaaaagagttacatcctttattatatccaaaaaagttttgcttcttatttttaggataagaaacagagactatattattgatgtgagaatgaaagtaaacgtgttataaaagacgataagatatcattatagagcttacaaccatgtacaccaatccctaactaaatcacaaattgatacctttcatatattttgtactaaaaacccaagagctacgtaatattatagcatccaataaaaacaatataataaatcttttatatttctttccggtcccaaaatgacctacacataactgtgatcgtcacattccacaaccacaagtgttggttacattgtgatctatccaataatattgctgaaaaattcatcaaattgctgtgaaattattttaatcacgcacatacatgcacgcattcataaccactatactattcccaatgacaagtaatttttatgaaaaaaattaatattgcatgcccaatcatcaatatgaaaccagttttttcttttcttgtcgataagaaacaagtctagtttcattaagattgttcaagatacttcaaactgaatgaatccataaaaagacactaagctaactcgaaacttcccatcctctcaacaaatcagaaaatggaaaaaaataactatacttctttaacaagcaaaaatcaatacaaatgaacataaatacagtcagtagtcaaacatcaagactgcacaaattacttacctcctcctcacttgttccactggtttcaactaaatcctcctctgaagatgtactggaatctgtggaagatatgtttttatcaccttcttcactctcttcttgaagagcgtgtaatatggccgtagggttatgtaaagaatcttttttttcctccaattccaatggtctgacataattctccttgacctcagctgcaatttttgaggcattcaaagcatgtggtggcagtggcactgaggattttattccagcgttctcatccaacccaaaaccccaattccaggactcccctgagccactgaaaaggtcaataaaaccataaacaaaaggccccccaagattacttgaaactgcaatatcctgacgaaacaattgactactgctatccaaactcgaacataagaccttccaagagaaaaggacatgagagaacaaccttatttaataaattattccaaggaagttgaagtattacactttcaagagtaagagaattaactccagattaataaattaacaagttgaagccccgtgaaggacaaaacttacagaatcatgtgattggcccactggcacaatttcagagatgaattcttgagcagcctccaccaaattgaaaatcattacccgtccttctcgagcattaaaatttgcctaaaagataaacaaactgctgaaacgaccaatataatgcatgttgcagattagaaaaactgagagcagttcttacatacatgatcaaaatctctctcttccctctctctctaaaaaacaagaccagattgcatttgtgagttaacatttacatattcatatcgtataatcaataaaacccatcaagccttacttttccttttcttttttctttgttttttttttttttcttctgaacaatgtatactgattcattacttatcactttaagatattatgactcctcctagctccctaatcacataattacgcagaacggatatctagtaagacaatgtaataaagagccaaacataatttgcatcactaagtatattttttgtaagaccacaagcatgtgagagtcaacaattacctgatcatgaagaagagacaaaagcttttcagcatcatgatttgttaaacctttttcttgagtaatctgcaactttggagacttgaaaggatacccaggcaagcacctgtcaaataaataaaataagaacaattactacctacgaaagtgcataacaaaaaaaacaaggaaaaaaaaaatcaccaacctaacaagaagaacagcagaaacatccaaatcctcgaaacccatatcctttgaataaggcctgttcacatgtaagggcatttttattaaagaagagcatatacatcatgatgggatgcaattcaactttagaaacaaaaccccaaccttatcttgatggaaatttgagaaggtggtccaggaacaattttgcagtcttcttgaaagattgcgcatctacgatagatgagagtaaacatgagagcgatggaaaatccattgacacattgttgagcacattgaaatagaaaacattcagaaatgtaaacaaccaaaacttgataacgcctaactctaaaaattgattagattaaactatcttcttctcatcgttcgaatagccgaagcatcgttagattaaactatctgataaattaataaaacttacaaggcagtgatttcctcagaaagaagttcattatcagaatcggtattatgatgagtgctgccatggccatgatccttggatggtgtccttcctttactccttttcccgctccctcctcctcctccacgcttcttcttcttcgaaccatagcccatctcctacccttactcaccacagagacccaaaccccaatgagtagaaattactattgctagtattgctactgctatggtattggatgaaggaatccaatcaaatcaaaatgcaaataactataattggtattacatttacatcacttctttctctttctctttttcatacgatagtcaaaaagttgatacaggagggcgtcgctgctgaactgagtttaaacagaagagccggatggtatgtgctgagtgctgacttgggatacccttgtgtgtatccttactaaaaaaaagttcttatgtcgatttattattgcacttatggaatttctctgtgactgtgattattgcattgtggatttggaatgtatattaaagaggattgaggcttgtcccaaaatactacaaacaaagatttctacacattaattggagcgtttagaaagtcaattactcaaaatgagtgaaattcaaataagggtagggatacacggggtgtaacgtgcgtactaagatggcacgttacaagttaggtgatgcttacaagttggtcaagtggtagcgcatgttgaggtgcatgctcgtagcatgctgatgcttagtttgtatgtctgtggtatttttgtaaatatcttcaatattgtccgaattgggacggaacttggtattagccatttattttaaatacaatggtgcaatcgaattggagaaactatgtgatttagcatatggtttggccatatatctacataggcaaaatcatatatgttcctagtagaatgctaaaagcttagaatgctcttta

SEQ ID NO: 15652 - DNA, 6581 bp, Cannabis sativa
ttagactttatttgattgagcttctgttttctcttttaagcttcttagaaagctcttgttgagatagctagtaaaatttacttatgttaaaagagtttttttagtactataaaatcaacactattttggttagtacaatgataatttcataatacgaaactcttttgttgcgtacttgatttagtaccataaaaccaatactattttggctggtaacatccatggggatgtgtgatatcaaatgtgaatcctacacactatataaggaggtctaaagttctcatttctgtaacttagttttctatcaacaagcacttatcaaaaaacacaaggcttgataattctcaaaactatttcttatagaattcccttagtgattggagataaggaaaataagcttttggacaaagttgtaataccttgttcaagtcatggtgattcccactaatctatactcaaggttgtgagtcagtaattcttcttcttcatattatatatatgtgttatattacatgcgatgtaatattcatgttcttctatcttttttatataaagatatatagtgtatttggcgttgtaacatttatataattaattttttaatttttatattttattataatagaattataattcttaatttatcttacattgtaataaaatctctaacatcaaatttataaagatgaaccaagtttaaattctatcaaccatcacatgtctcattcgactagctcggtagcattagttcaaatatccatataatttcatcgcatagttattagatatttataatctaaatttaaacttgtaatttagatatttaacttttaattatggctaaaatgtgttaactatatagtcaaagattttagtaggttgtagaaaaaaaaaattggctcttaaaaagaaaaataagttaagaaaaaaatgtgtaatttaaaatgatcaattttttttaggctttgggctaggtgggccttaagtgtgggttaggtcgggcttgtagcctatgagcttataaataagaggtatgtgggtttattattttataactcgcaactttgcatacaaatgctctaccaaattgttatgacttgtgcttgaaagactcaattgatctcgctcatttgatcccaaatattggttgctactcatattaaaataccaagtggaatagaccaaaacaatatttggagctgaactactacaaaatatgtgtgatatttatttcattgctcttaacccatttattacgtttactcattgttggctaaattatggtcaactaataagaattttccttcttggtacgatcaaatatgtgtgtagtgtgttagagtgattagtttgttaagttatttttagttgagttattttcttattatggtcagggttgtttgggaagttagttaagttagttaaccttacttctcccctttaaatagatgaactatctcttgtaattagttcatctaataatttttcattcaacaaagattttcgttctgttttctattctacaatatggtattagagcgggaaagaaaggctttcccttgatcttgatctctcttcgccgtgtttccttcttctccagcgactctctcaccagagttggtgtgttttccctctgcgtttcttgcactctatttctattcaaagtgttctttatttggtctttccttttttttcgaagttgtctaatgataatcagacaactcctattgcaattggtgataattctgcacaagctacgaccaaagaacaagaaaattcgattgtacagagcaatcagactcatcagttgattcagcaaagaaatcctcttgaagatccgaccgatacttactatctccaccatgttgataatccaggcattgttttggtgtttcaacttctcacagggcaatacaattacatgtcatgtcatggagtaagcaatgcaattaaccatttttgtcaagaagaaactcgggttcttggatggttcgattcctaaacctttatttactgaacttattttgtatgatgcctggactagaaataacaacattgtcatatcatgaatcttgaattctgtttctaaggaaattttctctagcattttatatgatgagtctgttgcagctatatggaacgatctaaaggtttgtttccatcaatataatggaccgcgtatatacaatttgaggaagggtttgatgaacctaaagtaagatgatcaaggagtcaacatatatttcactaagctaaaaacgatttggaaaaaatatcctattaccgtcctacttgcatttgcaatggatgcacttgtggtggtgtcaaaaagctccaagaacaccaccacatggagtatataatgtcatttctaatgggtctttcagattcttttttcgcatgtcaaaagtaacatcatggatcctctgcctgaggttaatcgaattttccatctggttacacaggaagaaaatcaaagagaacactcttctactgtggttaatcaaaacccagtcatggtttcttccttttaaggagataaaggcaactctaacaaattagattcaaatggaaacaagtcatatcccattaagaggaacatgtccttctccactcattgcaaaattcttggtcacatcatagagaaatgttacaaagaagatgtcagaacaatatcaaacaccacatgctatgaaaatccaaacccaaaatcaaatactgaaccaaaagatcgtcgtcggtgacctaatcgaatcgtctgatgacgaatccaatgacccagatcctctaaaattattgttccttcgattcatgaccaaccaaagcataaaagaattggggtttttagttttggcacctaaggaaaatgatcccgtggtcttgttggaccacccacggcggtgaacagttgtctggcctagttgtcattgtaccgggaaaatggaagagagggagcgaggaggagagatggggttgggttcttgggttttcagaatcagagaactgggttttagggtccttgagaccatcgacgtcacgcccttgagcaagagagtagaaagaggaagggagtgataagagagagagagagagagagaggattggttcacaattaaagagagaaagagagacgaagaacaagaaatgaaaaaaaaatatttttattattgttttattttttataatttttaaattattttttataatatttaaataattaatattatatgaactaccaaaaacgtgcctcgtgtacacgtgggtaatccaccatgacacttaattgaaatttttgaacgaaaatataaaaagcaaaacagaatgtgagtttggtaagttttaccgtcaaaaaattaatttatgtaattaattagtgttaaaaaaataatgttaaaataattttaccgttaatatcctattctaaaataataacaccatttggcatcgataagtcgtaacacaaaagcatattccattacaattttatcaagatccattgatcagttaaagatacaaaaaaaaaaataaataaataacaaaactctaaaatgtgaatattgtagtccacaaaagattcataaatgtgacttacaccacctttcttctttttttttttaaaaaaaaaaggtgtttacaaagctagatccaattcaactttaaataaagagaaatactaacaatattctcattgtctctctctcttttatctacactgttcatactattacaatttgatagaaaagtgtaaaaaaggtaaaaagaagaatattgttaagaacctctcttaaacaaaaatagcacaattaaaaatcaaaaacaaatttagtaaactggggtgaccacaacattgtccaagacaggaccacacatatgtccataatcatgaagcttggtatgatagtaagcactataaaatgttattcttgttctattagaaattgctttgaacttaatgcttgcagttttaaattgaccttttccttgtgacacaaaagggaccttaagtgtctcatgagctgcaaaagcctccaccatcatagatccatgacaaccattctttgcatctccaattgtgaagctaagtttgtacatcttgttggtgacggttcggatgatttgggcaatggcactttctctccccgcaaccaactcaatcgcagcgagccctgaggggacagagaagtgttttgcgtcgatgaatttgactggcttgagtgactcgatgatccatccgggaaggggtgaaattaggtcttggattttgggtgagagtaagattcctgttgagaagttcttgaatacatgtggtccattttcaaagcctccatttttcaccaagttacctataccaatacattaatatcatcacgtgagcacataacatggcctatggtaataaattttggatccaaatctaacttaagtacatcaatttcaaaatttaaatccaaaattttctcacaaataaatcaacacagtaaatccttatttaaattgtaagttaataataataaaaatcagagtattgctataagatattaatgatgtttaacattacctaaatatattgcattgtgaataattaataatattccataatagttattaaataaaatagagaagtttttttatttttacactttaagtaattttttttttatatttttacgaaaattcacatagcaatcaacggagcaacctaaatcataactaaaatttacataataattcacataaaaatcactagagcaatctggagcaattcaattgtaaattaaaaatatatatatgaagtaattctcctaaaattcactaatgctcttttttagcatttcactaaaaactatttgaaataagtttgagtcccttgctccaatagaaataaataaaacctatagaaaacaaaacacaataaagcaagaagaagtcaaccatccaaagtagtagcattacatctcatactcccacaatctaaagaaaaacaacaataaagcctaaaacaccggcatacaaactagtaaataatcctctttcaaaaaataaacattattaatagtagttaggactcaaactaggaatggcaaacgaggcaggtctgccccgacccgacaagtaattgccccacccgccccaattaactcagaaatttaatcgagtttgacccgactttggaaaacacgaaaactaattaatcaaaatagggagcattaattgaaaatttggtcactaaatcttatgttgtcttcttctaagcaaaatcccaaaacattgaaaattaaccttaaccatttttcagttttttgtatgtttatcattatcatattggatcaaactaaaataaattacttacctctagcataagtgggaggtttcatttccttaatagcaatatgatccaacaatggaccacaagtggggtcctcttgaataccaggattatgaaatgtgaccttaacaaccttattatcagctttgaaagcccaagcataagagtccccaccatcactgctgtacagtgtttgaatgggcagctcagctgactgaccagccactgtgatcctcaacgcctcgtcttgtgcacaagtccttgtggtcccaaaagtgagtgagtatatcacacctgctttaacggcgacgttttgagaaacagatgcctcgttacctaacctcactgcgtgttcgccacgtggcactgcaaagtaaaagccacctggctggggtccaccagagatgtactctaccaaacccttgatttcccacttgggtagtgagtatttgcctattataactgttttcttcatgtttgaggccttgggtgcttcttcaaagtccccatttggtaaaagtgctataaaacaaattaacaaatcatgttagttagtttaagagtattattataagacactagtggtgcttaatactttttagatgtatcgtcttgtaattggttagtgatactctttaaaagctattacattaaactatatgaaattcgatgcttaaattaatagcgatattgacacataaaaaggtgttacactactgatattttttagcatttctcttattttaaacaaggtcgtccttaacgtaagacaacctgtagctgttgcccaaaggttctttagccaaagaaaatctcctaatttttattttttttttacataaattcataaacatggccgaccttgaaatgagacgaaaaagactattgttttaggcccctcaccactcaagttcccataactttttcacccataaactctctaaaaaatagatagaaaaactacttaaaatttgattttaaaggtgcattttttaaattttaccccaaatcccataaaagcttgagacaaccttgatttcaagtgaaaaataaatagaaattatgtatatatatttatataaataaaggactcaccatcgagatagggtgctttagtagctgaagaagcaaagccaacattattgtatagagaagaaatggagagaaagcaaagaaagaggagggaagccatgtttagaggagaaaaacaaagtagagatacttgagtactataagtgatatatagacaaatgaa
